United States Patent Application Publication US 2025/0320254 A1 - sequence listing, part 3

SEQ ID NO: 6804 - protein, 1188 aa, Homo sapiens
MGHLPTGIHGARRLLPLLWLFVLFKNATAFHVTVQDDNNIVVSLEASDVISPASVYVVKITGESKNYFFEFEEFNSTLPPPVIFKASYHGLYYIITLVVVNGNVVTKPSRSITVLTKPLPVTSVSIYDYKPSPETGVLFEIHYPEKYNVFTRVNISYWEGKDFRTMLYKDFFKGKTVFNHWLPGMCYSNITFQLVSEATFNKSTLVEYSGVSHEPKQHRTAPYPPQNISVRIVNLNKNNWEEQSGNFPEESFMRSQDTIGKEKLFHFTEETPEIPSGNISSGWPDFNSSDYETTSQPYWWDSASAAPESEDEFVSVLPMEYENNSTLSETEKSTSGSFSFFPVQMILTWLPPKPPTAFDGFHIHIEREENFTEYLMVDEEAHEFVAELKEPGKYKLSVTTFSSSGSCETRKSQSAKSLSFYISPSGEWIEELTEKPQHVSVHVLSSTTALMSWTSSQENYNSTIVSVVSLTCQKQKESQRLEKQYCTQVNSSKPIIENLVPGAQYQVVIYLRKGPLIGPPSDPVTFAIVPTGIKDLMLYPLGPTAVVLSWTRPYLGVFRKYVVEMFYFNPATMTSEWTTYYEIAATVSLTASVRIANLLPAWYYNFRVTMVTWGDPELSCCDSSTISFITAPVAPEITSVEYFNSLLYISWTYGDDTTDLSHSRMLHWMVVAEGKKKIKKSVTRNVMTAILSLPPGDIYNLSVTACTERGSNTSMLRLVKLEPAPPKSLFAVNKTQTSVTLLWVEEGVADFFEVFCQQVGSSQKTKLQEPVAVSSHVVTISSLLPATAYNCSVTSFSHDSPSVPTFIAVSTMVTEMNPNVVVISVLAILSTLLIGLLLVTLIILRKKHLQMARECGAGTFVNFASLERDGKLPYNWSKNGLKKRKLTNPVQLDDFDAYIKDMAKDSDYKFSLQFEELKLIGLDIPHFAADLPLNRCKNRYTNILPYDFSRVRLVSMNEEEGADYINANYIPGYNSPQEYIATQGPLPETRNDFWKMVLQQKSQIIVMLTQCNEKRRVKCDHYWPFTEEPIAYGDITVEMISEEEQDDWACRHFRINYADEMQDVMHFNYTAWPDHGVPTANAAESILQFVHMVRQQATKSKGPMIIHCSAGVGRTGTFIALDRLLQHIRDHEFVDILGLVSEMRSYRMSMVQTEEQYIFIHQCVQLMWMKKKQQFCISDVIYENVSKS

SEQ ID NO: 6805 - protein, 156 aa, Homo sapiens
MGASRLYTLVLVLQPQRVLLGMKKRGFGAGRWNGFGGKVQEGETIEDGARRELQEESGLTVDALHKVGQIVFEFVGEPELMDVHVFCTDSIQGTPVESDEMRPCWFQLDQIPFKDMWPDDSYWFPLLLQKKKFHGYFKFQGQDTILDYTLREVDTV

SEQ ID NO: 6806 - protein, 1166 aa, Homo sapiens
MCVNPTPGGTISRASRDLLKEFPQPKNLLNSVIGRALGISHAKDKLVYVHTNGPKKKKVTLHIKWPKSVEVEGYGSKKIDAERQAAAAACQLFKGWGLLGPRNELFDAAKYRVLADRFGSPADSWWRPEPTMPPTSWRQLNPESIRPGGPGGLSRSLGREEEEDEEEELEEGTIDVTDFLSMTQQDSHAPLRDSRGSSFEMTDDDSAIRALTQFPLPKNLLAKVIQIATSSSTAKNLMQFHTVGTKTKLSTLTLLWPCPMTFVAKGRRKAEAENKAAALACKKLKSLGLVDRNNEPLTHAMYNLASLRELGETQRRPCTIQVPEPILRKIETFLNHYPVESSWIAPELRLQSDDILPLGKDSGPLSDPITGKPYVPLLEAEEVRLSQSLLELWRRRGPVWQEAPQLPVDPHRDTILNAIEQHPVVVISGDTGCGKTTRIPQLLLERYVTEGRGARCNVIITQPRRISAVSVAQRVSHELGPSLRRNVGFQVRLESKPPSRGGALLFCTVGILLRKLQSNPSLEGVSHVIVDEVHERDVNTDFLLILLKGLQRLNPALRLVLMSATGDNERFSRYFGGCPVIKVPGFMYPVKEHYLEDILAKLGKHQYLHRHRHHESEDECALDLDLVTDLVLHIDARGEPGGILCFLPGWQEIKGVQQRLQEALGMHESKYLILPVHSNIPMMDQKAIFQQPPVGVRKIVLATNIAETSITINDIVHVVDSGLHKEERYDLKTKVSCLETVWVSRANVIQRRGRAGRCQSGFAYHLFPRSRLEKMVPFQVPEILRTPLENLVLQAKIHMPEKTAVEFLSKAVDSPNIKAVDEAVILLQEIGVLDQREYLTTLGQRLAHISTDPRLAKAIVLAAIFRCLHPLLVVVSCLTRDPFSSSLQNRAEVDKVKALLSHDSGSDHLAFVRAVAGWEEVLRWQDRSSRENYLEENLLYAPSLRFIHGLIKQFSENIYEAFLVGKPSDCTLASAQCNEYSEEEELVKGVLMAGLYPNLIQVRQGKVTRQGKFKPNSVTYRTKSGNILLHKSTINREATRLRSRWLTYFMAVKSNGSVFVRDSSQVHPLAVLLLTDGDVHIRDDGRRATISLSDSDLLRLEGDSRTVRLLKELRRALGRMVERSLRSELAALPPSVQEEHGQLLALLAELLRGPCGSFDVRKTADD

SEQ ID NO: 6807 - protein, 1600 aa, Homo sapiens
MNKAPQSTGPPPAPSPGLPQPAFPPGQTAPVVFSTPQATQMNTPSQPRQHFYPSRAQPPSSAASRVQSAAPARPGPAAHVYPAGSQVMMIPSQISYPASQGAYYIPGQGRSTYVVPTQQYPVQPGAPGFYPGASPTEFGTYAGAYYPAQGVQQFPTGVAPTPVLMNQPPQIAPKRERKTIRIRDPNQGGKDITEEIMSGARTASTPTPPQTGGGLEPQANGETPQVAVIVRPDDRSQGAIIADRPGLPGPEHSPSESQPSSPSPTPSPSPVLEPGSEPNLAVLSIPGDTMTTIQMSVEESTPISRETGEPYRLSPEPTPLAEPILEVEVTLSKPVPESEFSSSPLQAPTPLASHTVEIHEPNGMVPSEDLEPEVESSPELAPPPACPSESPVPIAPTAQPEELLNGAPSPPAVDLSPVSEPEEQAKEVTASMAPPTIPSATPATAPSATSPAQEEEMEEEEEEEEGEAGEAGEAESEKGGEELLPPESTPIPANLSQNLEAAAATQVAVSVPKRRRKIKELNKKEAVGDLLDAFKEANPAVPEVENQPPAGSNPGPESEGSGVPPRPEEADETWDSKEDKIHNAENIQPGEQKYEYKSDQWKPLNLEEKKRYDREFLLGFQFIFASMQKPEGLPHISDVVLDKANKTPLRPLDPTRLQGINCGPDFTPSFANLGRTTLSTRGPPRGGPGGELPRGPQAGLGPRRSQQGPRKEPRKIIATVLMTEDIKLNKAEKAWKPSSKRTAADKDRGEEDADGSKTQDLFRRVRSILNKLTPQMFQQLMKQVTQLAIDTEERLKGVIDLIFEKAISEPNFSVAYANMCRCLMALKVPTTEKPTVTVNFRKLLLNRCQKEFEKDKDDDEVFEKKQKEMDEAATAEERGRLKEELEEARDIARRRSLGNIKFIGELFKLKMLTEAIMHDCVVKLLKNHDEESLECLCRLLTTIGKDLDFEKAKPRMDQYFNQMEKIIKEKKTSSRIRFMLQDVLDLRGSNWVPRRGDQGPKTIDQIHKEAEMEEHREHIKVQQLMAKGSDKRRGGPPGPPISRGLPLVDDGGWNTVPISKGSRPIDTSRLTKITKPGSIDSNNQLFAPGGRLSWGKGSSGGSGAKPSDAASEAARPATSTLNRFSALQQAVPTESTDNRRVVQRSSLSRERGEKAGDRGDRLERSERGGDRGDRLDRARTPATKRSFSKEVEERSRERPSQPEGLRKAASLTEDRDRGRDAVKREAALPPVSPLKAALSEEELEKKSKAIIEEYLHLNDMKEAVQCVQELASPSLLFIFVRHGVESTLERSAIAREHMGQLLHQLLCAGHLSTAQYYQGLYEILELAEDMEIDIPHVWLYLAELVTPILQEGGVPMGELFREITKPLRPLGKAASLLLEILGLLCKSMGPKKVGTLWREAGLSWKEFLPEGQDIGAFVAEQKVEYTLGEESEAPGQRALPSEELNRQLEKLLKEGSSNQRVFDWIEANLSEQQIVSNTLVRALMTAVCYSAIIFETPLRVDVAVLKARAKLLQKYLCDEQKELQALYALQALVVTLEQPPNLLRMFFDALYDEDVVKEDAFYSWESSKDPAEQQGKGVALKSVTAFFKWLREAEEESDHN

SEQ ID NO: 6808 - protein, 246 aa, Homo sapiens
MSLQWTAVATFLYAEVFVVLLLCIPFISPKRWQKIFKSRLVELLVSYGNTFFVVLIVILVLLVIDAVREIRKYDDVTEKVNLQNNPGAMEHFHMKLFRAQRNLYIAGFSLLLSFLLRRLVTLISQQATLLASNEAFKKQAESASEAAKKYMEENDQLKKGAAVDGGKLDVGNAEVKLEEENRSLKADLQKLKDELASTKQKLEKAENQVLAMRKQSEGLTKEYDRLLEEHAKLQAAVDGPMDKKEE

SEQ ID NO: 6809 - protein, 619 aa, Homo sapiens
MDDQQALNSIMQDLAVLHKASRPALSLQETRKAKSSSPKKQNDVRVKFEHRGEKRILQFPRPVKLEDLRSKAKIAFGQSMDLHYTNNELVIPLTTQDDLDKAVELLDRSIHMKSLKILLVINGSTQATNLEPLPSLEDLDNTVFGAERKKRLSIIGPTSRDRSSPPPGYIPDELHQVARNGSFTSINSEGEFIPESMDQMLDPLSLSSPENSGSGSCPSLDSPLDGESYPKSRMPRAQSYPDNHQEFSDYDNPIFEKFGKGGTYPRRYHVSYHHQEYNDGRKTFPRARRTQGTSLRSPVSFSPTDHSLSTSSGSSIFTPEYDDSRIRRRGSDIDNPTLTVMDISPPSRSPRAPTNWRLGKLLGQGAFGRVYLCYDVDTGRELAVKQVQFDPDSPETSKEVNALECEIQLLKNLLHERIVQYYGCLRDPQEKTLSIFMEYMPGGSIKDQLKAYGALTENVTRKYTRQILEGVHYLHSNMIVHRDIKGANILRDSTGNVKLGDFGASKRLQTICLSGTGMKSVTGTPYWMSPEVISGEGYGRKADIWSVACTVVEMLTEKPPWAEFEAMAAIFKIATQPTNPKLPPHVSDYTRDFLKRIFVEAKLRPSADELLRHMFVHYH

SEQ ID NO: 6810 - protein, 350 aa, Homo sapiens
MSEVKSRKKSGPKGAPAAEPGKRSEGGKTPVARSSGGGGWADPRTCLSLLSLGTCLGLAWFVFQQSEKFAKVENQYQLLKLETNEFQQLQSKISLISEKWQKSEAIMEQLKSFQIIAHLKRLQEEINEVKTWSNRITEKQDILNNSLTTLSQDITKVDQSTTSMAKDVGLKITSVKTDIRRISGLVTDVISLTDSVQELENKIEKVEKNTVKNIGDLLSSSIDRTATLRKTASENSQRINSVKKTLTELKSDFDKHTDRFLSLEGDRAKVLKTVTFANDLKPKVYNLKKDFSRLEPLVNDLTLRIGRLVTDLLQREKEIAFLSEKISNLTIVQAEIKDIKDEIAHISDMN

SEQ ID NO: 6811 - protein, 966 aa, Homo sapiens
MEPQVTLNVTFKNEIQSFLVSDPENTTWADIEAMVKVSFDLNTIQIKYLDEENEEVSINSQGEYEEALKMAVKQGNQLQMQVHEGHHVVDEAPPPVVGAKRLAARAGKKPLAHYSSLVRVLGSDMKTPEDPAVQSFPLVPCDTDQPQDKPPDWFTSYLETFREQVVNETVEKLEQKLHEKLVLQNPSLGSCPSEVSMPTSEETLFLPENQFSWHIACNNCQRRIVGVRYQCSLCPSYNICEDCEAGPYGHDTNHVLLKLRRPVVGSSEPFCHSKYSTPRLPAALEQVRLQKQVDKNFLKAEKQRLRAEKKQRKAEVKELKKQLKLHRKIHLWNSIHGLQSPKSPLGRPESLLQSNTLMLPLQPCTSVMPMLSAAFVDENLPDGTHLQPGTKFIKHWRMKNTGNVKWSADTKLKFMWGNLTLASTEKKDVLVPCLKAGHVGVVSVEFIAPALEGTYTSHWRLSHKGQQFGPRVWCSIIVDPFPSEESPDNIEKGMISSSKTDDLTCQQEETFLLAKEERQLGEVTEQTEGTAACIPQKAKNVASERELYIPSVDLLTAQDLLSFELLDINIVQELERVPHNTPVDVTPCMSPLPHDSPLIEKPGLGQIEEENEGAGFKALPDSMVSVKRKAENIASVEEAEEDLSGTQFVCETVIRSLTLDAAPDHNPPCRQKSLQMTFALPEGPLGNEKEEIIHIAEEEAVMEEEEDEEDEEEEDELKDEVQSQSSASSEDYIIILPECFDTSRPLGDSMYSSALSQPGLERGAEGKPGVEAGQEPAEAGERLPGGENQPQEHSISDILTTSQTLETVPLIPEVVELPPSLPRSSPCVHHHGSPGVDLPVTIPEVSSVPDQIRGEPRGSSGLVNSRQKSYDHSRHHHGSSIAGGLVKGALSVAASAYKALFAGPPVTAQPIISEDQTAALMAHLFEMGFCDRQLNLRLLKKHNYNILQVVTELLQLNNNDWYSQRY

SEQ ID NO: 6812 - protein, 241 aa, Homo sapiens
MTPGTQSPFFLLLLLTVLTATTAPKPATVVTGSGHASSTPGGEKETSATQRSSVPSSTEKNAFLQIYKQGGFLGLSNIKFRPGSVVVQLTLAFREGTINVHDVETQFNQYKTEAASRYNLTISDVSVSDVPFPFSAQSGAGVPGWGIALLVLVCVLVALAIVYLIALAVCQCRRKNYGQLDIFPARDTYHPMSEYPTYHTHGRYVPPSSTDRSPYEKVSAGNGGSSLSYTNPAVAATSANL

SEQ ID NO: 6813 - protein, 567 aa, Homo sapiens
MKPVWVATLLWMLLLVPRLGAARKGSPEEASFYYGTFPLGFSWGVGSSAYQTEGAWDQDGKGPSIWDVFTHSGKGKVLGNETADVACDGYYKVQEDIILLRELHVNHYRFSLSWPRLLPTGIRAEQVNKKGIEFYSDLIDALLSSNITPIVTLHHWDLPQLLQVKYGGWQNVSMANYFRDYANLCFEAFGDRVKHWITFSDPRAMAEKGYETGHHAPGLKLRGTGLYKAAHHIIKAHAKAWHSYNTTWRSKQQGLVGISLNCDWGEPVDISNPKDLEAAERYLQFCLGWFANPIYAGDYPQVMKDYIGRKSAEQGLEMSRLPVFSLQEKSYIKGTSDFLGLGHFTTRYITERNYPSRQGPSYQNDRDLIELVDPNWPDLGSKWLYSVPWGFRRLLNFAQTQYGDPPIYVMENGASQKFHCTQLCDEWRIQYLKGYINEMLKAIKDGANIKGYTSWSLLDKFEWEKGYSDRYGFYYVEFNDRNKPRYPKASVQYYKKIIIANGFPNPREVESWYLKALETCSINNQMLAAEPLLSHMQMVTEIVVPTVCSLCVLITAVLLMLLLRRQS

SEQ ID NO: 6814 - protein, 265 aa, Homo sapiens
MGLPGLFCLAVLAASSFSKAREEEITPVVSIAYKVLEVFPKGRWVLITCCAPQPPPPITYSLCGTKNIKVAKKVVKTHEPASFNLNVTLKSSPDLLTYFCWASSTSGAHVDSARLQMHWELWSKPVSELRANFTLQDRGAGPRVEMICQASSGSPPITNSLIGKDGQVHLQQRPCHRQPANFSFLPSQTSDWFWCQAANNANVQHSALTVVPPGGDQKMEDWQGPLESPILALPLYRSTRRLSEEEFGGFRIGNGEVRGRKAAAM

SEQ ID NO: 6815 - protein, 250 aa, Homo sapiens [sequence omitted]

SEQ ID NO: 6816 - protein, 299 aa, Homo sapiens
MMGKEEEIARIARRLDKMVTKKSAEGAMDLLRELKAMPITLHLLQSTRVGMSVNALRKQSSDEEVIALAKSLIKSWKKLLDASDAKARERGRGMPLPTSSRDASEAPDPSRKRPELPRAPSTPRITTFPPVPVTCDAVRNKCREMLTAALQTDHDHVAIGADCERLSAQIEECIFRDVGNTDMKYKNRVRSRISNLKDAKNPDLRRNVLCGAITPQQIAVMTSEEMASDELKEIRKAMTKEAIREHQMARTGGTQTDLFTCGKCRKKNCTYTQVQTRSSDEPMTTFVVCNECGNRWKFC

SEQ ID NO: 6817 - protein, 444 aa, Homo sapiens
MWQIVFFTLSCDLVLAAAYNNFRKSMDSIGKKQYQVQHGSCSYTFLLPEMDNCRSSSSPYVSNAVQRDAPLEYDDSVQRLQVLENIMENNTQWLMKVLNQTTRLELQLLEHSLSTNKLEKQILDQTSEINKLQDKNSFLEKKVLAMEDKHIIQLQSIKEEKDQLQVLVSKQNSIIEELEKKIVTATVNNSVLQKQQHDLMETVNNLLTMMSTSNSAKDPTVAKEEQISFRDCAEVFKSGHTTNGIYTLTFPNSTEEIKAYCDMEAGGGGWTIIQRREDGSVDFQRTWKEYKVGFGNPSGEYWLGNEFVSQLTNQQRYVLKIHLKDWEGNEAYSLYEHFYLSSEELNYRIHLKGLTGTAGKISSISQPGNDFSTKDGDNDKCICKCSQMLTGGWWFDACGPSNLNGMYYPQRQNTNKFNGIKWYYWKGSGYSLKATTMMIRPADF

SEQ ID NO: 6818 - protein, 785 aa, Homo sapiens
MPGVIPSESNGLSRGSPSKKNRLSLKFFQKKETKRALDFTDSQENEEKASEYRASEIDQVVPAAQSSPINCEKRENLLPFVGLNNLGNTCYLNSILQVLYFCPGFKSGVKHLFNIISRKKEALKDEANQKDKGNCKEDSLASYELICSLQSLIISVEQLQASFLLNPEKYTDELATQPRRLLNTLRELNPMYEGYLQHDAQEVLQCILGNIQETCQLLKKEEVKNVAELPTKVEEIPHPKEEMNGINSIEMDSMRHSEDFKEKLPKGNGKRKSDTEFGNMKKKVKLSKEHQSLEENQRQTRSKRKATSDTLESPPKIIPKYISENESPRPSQKKSRVKINWLKSATKQPSILSKFCSLGKITTNQGVKGQSKENECDPEEDLGKCESDNTTNGCGLESPGNTVTPVNVNEVKPINKGEEQIGFELVEKLFQGQLVLRTRCLECESLTERREDFQDISVPVQEDELSKVEESSEISPEPKTEMKTLRWAISQFASVERIVGEDKYFCENCHHYTEAERSLLFDKMPEVITIHLKCFAASGLEFDCYGGGLSKINTPLLTPLKLSLEEWSTKPTNDSYGLFAVVMHSGITISSGHYTASVKVTDLNSLELDKGNFVVDQMCEIGKPEPLNEEEARGVVENYNDEEVSIRVGGNTQPSKVLNKKNVEAIGLLGGQKSKADYELYNKASNPDKVASTAFAENRNSETSDTTGTHESDRNKESSDQTGINISGFENKISYVVQSLKEYEGKWLLFDDSEVKVTEEKDFLNSLSPSTSPTSTPYLLFYKKL

SEQ ID NO: 6819 - protein, 1102 aa, Homo sapiens
MNHQQQQQQQKAGEQQLSEPEDMEMEAGDTDDPPRITQNPVINGNVALSDGHNTAEEDMEDDTSWRSEATFQFTVERFSRLSESVLSPPCFVRNLPWKIMVMPRFYPDRPHQKSVGFFLQCNAESDSTSWSCHAQAVLKIINYRDDEKSFSRRISHLFFHKENDWGFSNFMAWSEVTDPEKGFIDDDKVTFEVFVQADAPHGVAWDSKKHTGYVGLKNQGATCYMNSLLQTLFFTNQLRKAVYMMPTEGDDSSKSVPLALQRVFYELQHSDKPVGTKKLTKSFGWETLDSFMQHDVQELCRVLLDNVENKMKGTCVEGTIPKLFRGKMVSYIQCKEVDYRSDRREDYYDIQLSIKGKKNIFESFVDYVAVEQLDGDNKYDAGEHGLQEAEKGVKFLTLPPVLHLQLMRFMYDPQTDQNIKINDRFEFPEQLPLDEFLQKTDPKDPANYILHAVLVHSGDNHGGHYVVYLNPKGDGKWCKFDDDVVSRCTKEEAIEHNYGGHDDDLSVRHCTNAYMLVYIRESKLSEVLQAVTDHDIPQQLVERLQEEKRIEAQKRKERQEAHLYMQVQIVAEDQFCGHQGNDMYDEEKVKYTVFKVLKNSSLAEFVQSLSQTMGFPQDQIRLWPMQARSNGTKRPAMLDNEADGNKTMIELSDNENPWTIFLETVDPELAASGATLPKFDKDHDVMLFLKMYDPKTRSLNYCGHIYTPISCKIRDLLPVMCDRAGFIQDTSLILYEEVKPNLTERIQDYDVSLDKALDELMDGDIIVFQKDDPENDNSELPTAKEYFRDLYHRVDVIFCDKTIPNDPGFVVTLSNRMNYFQVAKTVAQRLNTDPMLLQFFKSQGYRDGPGNPLRHNYEGTLRDLLQFFKPRQPKKLYYQQLKMKITDFENRRSFKCIWLNSQFREEEITLYPDKHGCVRDLLEECKKAVELGEKASGKLRLLEIVSYKIIGVHQEDELLECLSPATSRTFRIEEIPLDQVDIDKENEMLVTVAHFHKEVFGTFGIPFLLRIHQGEHFREVMKRIQSLLDIQEKEFEKFKFAIVMMGRHQYINEDEYEVNLKDFEPQPGNMSHPRPWLGLDHFNKAPKRSRYTYLEKAIKIHN

SEQ ID NO: 6820 - protein, 206 aa, Homo sapiens
MDSAGQDINLNSPNKGLLSDSMTDVPVDTGVAARTPAVEGLTEAEEEELRAELTKVEEEIVTLRQVLAAKERHCGELKRRLGLSTLGELKQNLSRSWHDVQVSSAYVKTSEKLGEWNEKVTQSDLYKKTQETLSQAGQKTSAALSTVGSAISRKLGDMRNSATFKSFEDRVGTIKSKVVGDRENGSDNLPSSAGSGDKPLSDPAPF

SEQ ID NO: 6821 - protein, 284 aa, Homo sapiens
MAGCAARAPPGSEARLSLATFLLGASVLALPLLTRAGLQGRTGLALYVAGLNALLLLLYRPPRYQIAIRACFLGFVFGCGTLLSFSQSSWSHFGWYMCSLSLFHYSEYLVTAVNNPKSLSLDSFLLNHSLEYTVAALSSWLEFTLENIFWPELKQITWLSVTGLLMVVFGECLRKAAMFTAGSNFNHVVQNEKSDTHTLVTSGVYAWFRHPSYVGWFYWSIGTQVMLCNPICGVSYALTVWRFFRDRTEEEEISLIHFFGEEYLEYKKRVPTGLPFIKGVKVDL

SEQ ID NO: 6822 - protein, 186 aa, Homo sapiens
MDSAGQDINLNSPNKGLLSDSMTDVPVDTGVAARTPAVEGLTEAEEEELRAELTKVEEEIVTLRQVLAAKERHCGELKRRLGLSTLGELKQNLSRSWHDVQVSSAYKKTQETLSQAGQKTSAALSTVGSAISRKLGDMRNSATFKSFEDRVGTIKSKVVGDRENGSDNLPSSAGSGDKPLSDPAPF

SEQ ID NO: 6823 - protein, 275 aa, Homo sapiens
MLNLLLLALPVLASRAYAAPAPGQALQRVGIVGGQEAPRSKWPWQVSLRVHGPYWMHFCGGSLIHPQWVLTAAHCVGPDVKDLAALRVQLREQHLYYQDQLLPVSRIIVHPQFYTAQIGADIALLELEEPVNVSSHVHTVTLPPASETFPPGMPCWVTGWGDVDNDERLPPPFPLKQVKVPIMENHICDAKYHLGAYTGDDVRIVRDDMLCAGNTRRDSCQGDSGGPLVCKVNGTWLQAGVVSWGEGCAQPNRPGIYTRVTYYLDWIHHYVPKKP

SEQ ID NO: 6824 - protein, 519 aa, Homo sapiens
MARDLVMFRDVAVDFSQEEWECLNSYQRNLYRDVILENYSNLVSLAGCSISKPDVITLLEQGKEPWMVVRDEKRRWTLDLESRYDTKKLFQGKDIYEMNLSQWKVMERIKSCGLEEQESPHEVCFRQVTKTTSEKMPTYRKLTSLPLYQKSHNREKPYECGECGKAFRVRQQLTFHQRIHTGEKPYECKECGKAFRQCAHLSRHQRIHTSDKLYECKKCGKIFTCGSDLRVHQRIHIGEKPYECKECGKAFRVRGQLNLHQRIHTGEKPYECKECGKAFRQYAHLTRHQRLNIAEKCYECKECGQAFLCSTGLRLHHKLHTGEKPYECKECGKAFRVRQQLTLHQRIHTGEKPYDCKECGKTFSRGYHLTLHQRIHTGEKPYECKECQKFFRRYSELISHQGIHIGEKPYECKECGKAFRLFSQLTQHQSIHFGEKPFKCKECEKTFRLLSQLTQHQSIHTGEKPYDCKECGKAFRLHSSLIQHQRIHSGEKPYKCKECKKAFRQHSHLTYHQRIHNVT

SEQ ID NO: 6825 - protein, 702 aa, Homo sapiens
MSNLSKGTGSRKDTKMRIRAFPVREDVLNSLNNNFLQTLNQAWNDHQTAMVMIRDILMYMDRVYVQQNNVENVYNLGLIIFRDQVVRYGCIRDHLRQTLLDMIARERKGEVVDRGAIRNACQMLMILGLEGRSVYEEDFEAPFLEMSAEFFQMESQKFLAENSASVYIKKVEARINEEIERVMHCLDKSTEEPIVKVVERELISKHMKTIVEMENSGLVHMLKNGKTEDLGCMYKLFSRVPNGLKTMCECMSSYLREQGKALVSEEGEGKNPVDYIQGLLDLKSRFDRFLLESFNNDRLFKQTIAGDFEYFLNLNSRSPEYLSLFIDDKLKKGVKGLTEQEVETILDKAMVLFRFMQEKDVFERYYKQHLARRLLTNKSVSDDSEKNMISKLKTECGCQFTSKLEGMFRDMSISNTTMDEFRQHLQATGVSLGGVDLTVRVLTTGYWPTQSATPKCNIPPAPRHAFEIFRRFYLAKHSGRQLTLQHHMGSADLNATFYGPVKKEDGSEVGVGGAQVTGSNTRKHILQVSTFQMTILMLFNNREKYTFEEIQQETDIPERELVRALQSLACGKPTQRVLTKEPKSKEIENGHIFTVNDQFTSKLHRVKIQTVAAKQGESDPERKETRQKVDDDRKHEIEAAIVRIMKSRKKMQHNVLVAEVTQQLKARFLPSPVVIKKRIEGLIEREYLARTPEDRKVYTYVA

SEQ ID NO: 6826 - protein, 98 aa, Homo sapiens
MLRRGHLAFRDVAIEFPQEEWKCLDPAQRTLYREVMVENYRNLVFLGICLPDLSVISMLEQRRDPRNLQSEVKIANNPGSCSVTQAVVEWQSSVAIVA

SEQ ID NO: 6827 - protein, 431 aa, Homo sapiens
MGPVIGMTPDKRAETPGAEKIAGLSQIYKMGSLPEAVDAARPKATLVDSESADDELTNLNWLHESTNLLTNFSLGSEGLPIVSPLYDIEGDDVPSFGPACYQNPEKKSATSKPPYSFSLLIYMAIEHSPNKCLPVKEIYSWILDHFPYFATAPTGWKNSVRHNLSLNKCFQKVERSHGKVNGKGSLWCVDPEYKPNLIQALKKQPFSSASSQNGSLSPHYLSSVIKQNQVRNLKESDIDAAAAMMLLNTSIEQGILECEKPLPLKTALQKKRSYGNAFHHPSAVRLQESDSLATSIDPKEDHNYSASSMAAQRCASRSSVSSLSSVDEVYEFIPKNSHVGSDGSEGFHSEEDTDVDYEDDPLGDSGYASQPCAKISEKGQSGKKMRKQTCQEIDEELKEAAGSLLHLAGIRTCLGSLISTAKTQNQKQRKK

SEQ ID NO: 6828 - protein, 1201 aa, Homo sapiens
MALGTTLRASLLLLGLLTEGLAQLAIPASVPRGFWALPENLTVVEGASVELRCGVSTPGSAVQWAKDGLLLGPDPRIPGFPRYRLEGDPARGEFHLHIEACDLSDDAEYECQVGRSEMGPELVSPRVILSILVPPKLLLLTPEAGTMVTWVAGQEYVVNCVSGDAKPAPDITILLSGQTISDISANVNEGSQQKLFTVEATARVTPRSSDNRQLLVCEASSPALEAPIKASFTVNVLFPPGPPVIEWPGLDEGHVRAGQSLELPCVARGGNPLATLQWLKNGQPVSTAWGTEHTQAVARSVLVMTVRPEDHGAQLSCEAHNSVSAGTQEHGITLQVTFPPSAIIILGSASQTENKNVTLSCVSKSSRPRVLLRWWLGWRQLLPMEETVMDGLHGGHISMSNLTFLARREDNGLTLTCEAFSEAFTKETFKKSLILNVKYPAQKLWIEGPPEGQKLRAGTRVRLVCLAIGGNPEPSLMWYKDSRTVTESRLPQESRRVHLGSVEKSGSTFSRELVLVTGPSDNQAKFTCKAGQLSASTQLAVQFPPTNVTILANASALRPGDALNLTCVSVSSNPPVNLSWDKEGERLEGVAAPPRRAPFKGSAAARSVLLQVSSRDHGQRVTCRAHSAELRETVSSFYRLNVLYRPEFLGEQVLVVTAVEQGEALLPVSVSANPAPEAFNWTFRGYRLSPAGGPRHRILSSGALHLWNVTRADDGLYQLHCQNSEGTAEARLRLDVHYAPTIRALQDPTEVNVGGSVDIVCTVDANPILPGMFNWERLGEDEEDQSLDDMEKISRGPTGRLRIHHAKLAQAGAYQCIVDNGVAPPARRLLRLVVRFAPQVEHPTPLTKVAAAGDSTSSATLHCRARGVPNIVFTWTKNGVPLDLQDPRYTEHTYHQGGVHSSLLTIANVSAAQDYALFTCTATNALGSDQTNIQLVSISRPDPPSGLKVVSLTPHSVGLEWKPGFDGGLPQRFCIRYEALGTPGFHYVDVVPPQATTFTLTGLQPSTRYRVWLLASNALGDSGLADKGTQLPITTPGLHQPSGEPEDQLPTEPPSGISEKTEAGSEEDRVRNEYEESQWTGERDTQSSTVSTTEAEPYYRSLRDFSPQLPPTQEEVSYSRGFTGEDEDMAFPGHLYDEVERTYPPSGAWGPLYDEVQMGPWDLHWPEDTYQDPRGIYDQVAGDLDTLEPDSLPFELRGHLV

SEQ ID NO: 6829 - protein, 456 aa, Homo sapiens
MGNSRSRVGRSFCSQFLPEEQAEIDQLFDALSSDKNSPNVSSKSFSLKALQNHVGEALPPEMVTRLYDGMRRVDLTGKAKGPSENVSQEQFTASMSHLLKGNSEEKSLMIMKMISATEGPVKAREVQKFTEDLVGSVVHVLSHRQELRGWTGKEAPGPNPRVQVLAAQLLSDMKLQDGKRLLGPQWLDYDCDRAVIEDWVFRVPHVAIFLSVVICKGFLILCSSLDLTTLVPERQVDQGRGFESILDVLSVMYINAQLPREQRHRWCLLFSSELHGHSFSQLCGHITHRGPCVAVLEDHDKHVFGGFASCSWEVKPQFQGDNRCFLFSICPSMAVYTHTGYNDHYMYLNHGQQTIPNGLGMGGQHNYFGLWVDVDFGKGHSRAKPTCTTYNSPQLSAQENFQFDKMEVWAVGDPSEEQLAKGNKSILDADPEAQALLEISGHSRHSEGLREVPDDE

SEQ ID NO: 6830 - protein, 394 aa, Homo sapiens
MIVFIFLAMGLSLENEYTSQTNNCTYLREQCLRDANGCKHAWRVMEDACNDSDPGDPCKMRNSSYCNLSIQYLVESNFQFKECLCTDDFYCTVNKLLGKKCINKSDNVKEDKFKWNLTTRSHHGFKGMWSCLEVAEACVGDVVCNAQLASYLKACSANGNPCDLKQCQAAIRFFYQNIPFNIAQMLAFCDCAQSDIPCQQSKEALHSKTCAVNMVPPPTCLSVIRSCQNDELCRRHYRTFQSKCWQRVTRKCHEDENCISTLSKQDLTCSGSDDCKAAYIDILGTVLQVQCTCRTITQSEESLCKIFQHMLHRKSCFNYPTLSNVKGMALYTRKHANKITLTGFHSPFNGEVIYAAMCMTVTCGILLLVMVKLRTSRISSKARDPSSIQIPGEL

SEQ ID NO: 6831 - protein, 563 aa, Homo sapiens
MWAVLRLALRPCARASPAGPRAYHGDSVASLGTQPDLGSALYQENYKQMKALVNQLHERVEHIKLGGGEKARALHISRGKLLPRERIDNLIDPGSPFLELSQFAGYQLYDNEEVPGGGIITGIGRVSGVECMIIANDATVKGGAYYPVTVKKQLRAQEIAMQNRLPCIYLVDSGGAYLPRQADVFPDRDHFGRTFYNQAIMSSKNIAQIAVVMGSCTAGGAYVPAMADENIIVRKQGTIFLAGPPLVKAATGEEVSAEDLGGADLHCRKSGVSDHWALDDHHALHLTRKVVRNLNYQKKLDVTIEPSEEPLFPADELYGIVGANLKRSFDVREVIARIVDGSRFTEFKAFYGDTLVTGFARIFGYPVGIVGNNGVLFSESAKKGTHFVQLCCQRNIPLLFLQNITGFMVGREYEAEGIAKDGAKMVAAVACAQVPKITLIIGGSYGAGNYGMCGRAYSPRFLYIWPNARISVMGGEQAANVLATITKDQRAREGKQFSSADEAALKEPIIKKFEEEGNPYYSSARVWDDGIIDPADTRLVLGLSFSAALNAPIEKTDFGIFRM

SEQ ID NO: 6832 - protein, 1273 aa, Homo sapiens
MANDSPAKSLVDIDLSSLRDPAGIFELVEVVGNGTYGQVYKGRHVKTGQLAAIKVMDVTEDEEEEIKLEINMLKKYSHHRNIATYYGAFIKKSPPGHDDQLWLVMEFCGAGSITDLVKNTKGNTLKEDWIAYISREILRGLAHLHIHHVIHRDIKGQNVLLTENAEVKLVDFGVSAQLDRTVGRRNTFIGTPYWMAPEVIACDENPDATYDYRSDLWSCGITAIEMAEGAPPLCDMHPMRALFLIPRNPPPRLKSKKWSKKFFSFIEGCLVKNYMQRPSTEQLLKHPFIRDQPNERQVRIQLKDHIDRTRKKRGEKDETEYEYSGSEEEEEEVPEQEGEPSSIVNVPGESTLRRDFLRLQQENKERSEALRRQQLLQEQQLREQEEYKRQLLAERQKRIEQQKEQRRRLEEQQRREREARRQQEREQRRREQEEKRRLEELERRRKEEEERRRAEEEKRRVEREQEYIRRQLEEEQRHLEVLQQQLLQEQAMLLHDHRRPHPQHSQQPPPPQQERSKPSFHAPEPKAHYEPADRAREVEDRFRKTNHSSPEAQSKQTGRVLEPPVPSRSESFSNGNSESVHPALQRPAEPQVPVRTTSRSPVLSRRDSPLQGSGQQNSQAGQRNSTSSIEPRLLWERVEKLVPRPGSGSSSGSSNSGSQPGSHPGSQSGSGERFRVRSSSKSEGSPSQRLENAVKKPEDKKEVFRPLKPADLTALAKELRAVEDVRPPHKVTDYSSSSEESGTTDEEDDDVEQEGADESTSGPEDTRAASSLNLSNGETESVKTMIVHDDVESEPAMTPSKEGTLIVRQSTVDQKRASHHESNGFAGRIHLLPDLLQQSHSSSTSSTSSSPSSSQPTPTMSPQTPQDKLTANETQSASSTLQKHKSSSSFTPFIDPRLLQISPSSGTTVTSVVGFSCDGMRPEAIRQDPTRKGSVVNVNPTNTRPQSDTPEIRKYKKRFNSEILCAALWGVNLLVGTESGLMLLDRSGQGKVYPLINRRRFQQMDVLEGLNVLVTISGKKDKLRVYYLSWLRNKILHNDPEVEKKQGWTTVGDLEGCVHYKVVKYERIKFLVIALKSSVEVYAWAPKPYHKFMAFKSFGELVHKPLLVDLTVEEGQRLKVIYGSCAGFHAVDVDSGSVYDIYLPTHIQCSIKPHAIIILPNTDGMELLVCYEDEGVYVNTYGRITKDVVLQWGEMPTSVAYIRSNQTMGWGEKAIEIRSVETGHLDGVFMHKRAQRLKFLCERNDKVFFASVRSGGSSQVYFMTLGRTSLLSW

SEQ ID NO: 6833 - protein, 431 aa, Homo sapiens
MEGVGGLWPWVLGLLSLPGVILGAPLASSCAGACGTSFPDGLTPEGTQASGDKDIPAINQGLILEETPESSFLIEGDIIRPSPFRLLSATSNKWPMGGSGVVEVPFLLSSKYDEPSRQVILEALAEFERSTCIRFVTYQDQRDFISIIPMYGCFSSVGRSGGMQVVSLAPTCLQKGRGIVLHELMHVLGFWHEHTRADRDRYIRVNWNEILPGFEINFIKSQSSNMLTPYDYSSVMHYGRLAFSRRGLPTITPLWAPSVHIGQRWNLSASDITRVLKLYGCSPSGPRPRGRGSHAHSTGRSPAPASLSLQRLLEALSAESRSPDPSGSSAGGQPVPAGPGESPHGWESPALKKLSAEASARQPQTLASSPRSRPGAGAPGVAQEQSWLAGVSTKPTVPSSEAGIQPVPVQGSPALPGGCVPRNHFKGMSED

SEQ ID NO: 6834 - protein, 684 aa, Homo sapiens
MASGRRGWDSSHEDDLPVYLARPGTTDQVPRQKYGGMFCNVEGAFESKTLDFDALSVGQRGAKTPRSGQGSDRGSGSRPGIEGDTPRRGQGREESREPAPASPAPAGVEIRSATGKEVLQNLGPKDKSDRLLIKGGRIVNDDQSFYADIYMEDGLIKQIGDNLIVPGGVKTIEANGKMVIPGGIDVHTHFQMPYKGMTTVDDFFQGTKAALAGGTTMIIDHVVPEPESSLTEAYEKWREWADGKSCCDYALHVDITHWNDSVKQEVQNLIKDKGVNSFMVYMAYKDLYQVSNTELYEIFTCLGELGAIAQVHAENGDIIAQEQTRMLEMGITGPEGHVLSRPEELEAEAVFRAITIASQTNCPLYVTKVMSKSAADLISQARKKGNVVFGEPITASLGIDGTHYWSKNWAKAAAFVTSPPLSPDPTTPDYINSLLASGDLQLSGSAHCTFSTAQKAIGKDNFTAIPEGTNGVEERMSVIWDKAVATGKMDENQFVAVTSTNAAKIFNLYPRKGRISVGSDSDLVIWDPDAVKIVSAKNHQSAAEYNIFEGMELRGAPLVVICQGKIMLEDGNLHVTQGAGRFIPCSPFSDYVYKRIKARRKMADLHAVPRGMYDGPVFDLTTTPKGGTPAGSARGSPTRPNPPVRNLHQSGFSLSGTQVDEGVRSASKRIVAPPGGRSNITSLS

SEQ ID NO: 6835 - protein, 443 aa, Homo sapiens
MYDCMETFAPGPRRLYGAAGPGAGLLRRATGGSCFAGLESFAWPQPASLQSVETQSTSSEEMVPSSPSPPPPPRVYKPCFVCNDKSSGYHYGVSSCEGCKGFFRRSIQKNMVYTCHRDKNCIINKVTRNRCQYCRLQKCFEVGMSKEAVRNDRNKKKKEVKEEGSPDSYELSPQLEELITKVSKAHQETFPSLCQLGKYTTNSSADHRVQLDLGLWDKFSELATKCIIKIVEFAKRLPGFTGLSIADQITLLKAACLDILMLRICTRYTPEQDTMTFSDGLTLNRTQMHNAGFGPLTDLVFAFAGQLLPLEMDDTETGLLSAICLICGDRMDLEEPEKVDKLQEPLLEALRLYARRRRPSQPYMFPRMLMKITDLRGISTKGAERAITLKMEIPGPMPPLIREMLENPEMFEDDSSQPGPHPNASSEDEVPGGQGKGGLKSPA

SEQ ID NO: 6836 - protein, 538 aa, Homo sapiens
MTTPGKENFRLKSYKNKSLNPDEMRRRREEEGLQLRKQKREEQLFKRRNVATAEEETEEEVMSDGGFHEAQISNMEMAPGGVITSDMIEMIFSKSPEQQLSATQKFRKLLSKEPNPPIDEVISTPGVVARFVEFLKRKENCTLQFESAWVLTNIASGNSLQTRIVIQAGAVPIFIELLSSEFEDVQEQAVWALGNIAGDSTMCRDYVLDCNILPPLLQLFSKQNRLTMTRNAVWALSNLCRGKSPPPEFAKVSPCLNVLSWLLFVSDTDVLADACWALSYLSDGPNDKIQAVIDAGVCRRLVELLMHNDYKVVSPALRAVGNIVTGDDIQTQVILNCSALQSLLHLLSSPKESIKKEACWTISNITAGNRAQIQTVIDANIFPALISILQTAEFRTRKEAAWAITNATSGGSAEQIKYLVELGCIKPLCDLLTVMDSKIVQVALNGLENILRLGEQEAKRNGTGINPYCALIEEAYGLDKIEFLQSHENQEIYQKAFDLIEHYFGTEDEDSSIAPQVDLNQQQYIFQQCEAPMEGFQL

SEQ ID NO: 6837 - protein, 219 aa, Homo sapiens
MPRGRKSRRRRNARAAEENRNNRKIQASEASETPMAASVVASTPEDDLSGPEEDPSTPEEASTTPEEASSTAQAQKPSVPRSNFQGTKKSLLMSILALIFIMGNSAKEALVWKVLGKLGMQPGRQHSIFGDPKKIVTEEFVRRGYLIYKPVPRSSPVEYEFFWGPRAHVESSKLKVMHFVARVRNRCSKDWPCNYDWDSDDDAEVEAILNSGARGYSAP

SEQ ID NO: 6838 - protein, 411 aa, Homo sapiens
MTHWFHRNPLKATAPVSFNYYGVVTGPSASKICNDLRSSRARLLELFTDLSCNPEMMKNAADSYFSLLQGFINSLDESTQESKLRYIQNFKWTDTLQGQVPSAQQDAVFELISMGFNVALWYTKYASRLAGKENITEDEAKEVHRSLKIAAGIFKHLKESHLPKLITPAEKGRDLESRLIEAYVIQCQAEAQEVTIARAIELKHAPGLIAALAYETANFYQKADHTLSSLEPAYSAKWRKYLHLKMCFYTAYAYCYHGETLLASDKCGEAIRSLQEAEKLYAKAEALCKEYGETKGPGPTVKPSGHLFFRKLGNLVKNTLEKCQRENGFIYFQKIPTEAPQLELKANYGLVEPIPFEFPPTSVQWTPETLAAFDLTKRPKDDSTKPKPEEEVKPVKEPDIKPQKDTGCYIS

SEQ ID NO: 6839 - protein, 1922 aa, Homo sapiens
MKSPALQPLSMAGLQLMTPASSPMGPFFGLPWQQEAIHDNIYTPRKYQVELLEAALDHNTIVCLNTGSGKTFIAVLLTKELSYQIRGDFSRNGKRTVFLVNSANQVAQQVSAVRTHSDLKVGEYSNLEVNASWTKERWNQEFTKHQVLIMTCYVALNVLKNGYLSLSDINLLVFDECHLAILDHPYREIMKLCENCPSCPRILGLTASILNGKCDPEELEEKIQKLEKILKSNAETATDLVVLDRYTSQPCEIVVDCGPFTDRSGLYERLLMELEEALNFINDCNISVHSKERDSTLISKQILSDCRAVLVVLGPWCADKVAGMMVRELQKYIKHEQEELHRKFLLFTDTFLRKIHALCEEHFSPASLDLKFVTPKVIKLLEILRKYKPYERQQFESVEWYNNRNQDNYVSWSDSEDDDEDEEIEEKEKPETNFPSPFTNILCGIIFVERRYTAVVLNRLIKEAGKQDPELAYISSNFITGHGIGKNQPRNKQMEAEFRKQEEVLRKFRAHETNLLIATSIVEEGVDIPKCNLVVRFDLPTEYRSYVQSKGRARAPISNYIMLADTDKIKSFEEDLKTYKAIEKILRNKCSKSVDTGETDIDPVMDDDDVFPPYVLRPDDGGPRVTINTAIGHINRYCARLPSDPFTHLAPKCRTRELPDGTFYSTLYLPINSPLRASIVGPPMSCVRLAERVVALICCEKLHKIGELDDHLMPVGKETVKYEEELDLHDEEETSVPGRPGSTKRRQCYPKAIPECLRDSYPRPDQPCYLYVIGMVLTTPLPDELNFRRRKLYPPEDTTRCFGILTAKPIPQIPHFPVYTRSGEVTISIELKKSGFMLSLQMLELITRLHQYIFSHILRLEKPALEFKPTDADSAYCVLPLNVVNDSSTLDIDFKFMEDIEKSEARIGIPSTKYTKETPFVFKLEDYQDAVIIPRYRNFDQPHRFYVADVYTDLTPLSKFPSPEYETFAEYYKTKYNLDLTNLNQPLLDVDHTSSRLNLLTPRHLNQKGKALPLSSAEKRKAKWESLQNKQILVPELCAIHPIPASLWRKAVCLPSILYRLHCLLTAEELRAQTASDAGVGVRSLPADFRYPNLDFGWKKSIDSKSFISISNSSSAENDNYCKHSTIVPENAAHQGANRTSSLENHDQMSVNCRTLLSESPGKLHVEVSADLTAINGLSYNQNLANGSYDLANRDFCQGNQLNYYKQEIPVQPTTSYSIQNLYSYENQPQPSDECTLLSNKYLDGNANKSTSDGSPVMAVMPGTTDTIQVLKGRMDSEQSPSIGYSSRTLGPNPGLILQALTLSNASDGFNLERLEMLGDSFLKHAITTYLFCTYPDAHEGRLSYMRSKKVSNCNLYRLGKKKGLPSRMVVSIFDPPVNWLPPGYVVNQDKSNTDKWEKDEMTKDCMLANGKLDEDYEEEDEEEESLMWRAPKEEADYEDDFLEYDQEHIRFIDNMLMGSGAFVKKISLSPFSTTDSAYEWKMPKKSSLGSMPFSSDFEDFDYSSWDAMCYLDPSKAVEEDDFVVGFWNPSEENCGVDTGKQSISYDLHTEQCIADKSIADCVEALLGCYLTSCGERAAQLFLCSLGLKVLPVIKRTDREKALCPTRENFNSQQKNLSVSCAAASVASSRSSVLKDSEYGCLKIPPRCMFDHPDADKTLNHLISGFENFEKKINYRFKNKAYLLQAFTHASYHYNTITDCYQRLEFLGDAILDYLITKHLYEDPRQHSPGVLTDLRSALVNNTIFASLAVKYDYHKYFKAVSPELFHVIDDFVQFQLEKNEMQGMDSELRRSEEDEEKEEDIEVPKAMGDIFESLAGAIYMDSGMSLETVWQVYYPMMRPLIEKFSANVPRSPVRELLEMEPETAKFSPAERTYDGKVRVTVEVVGKGKFKGVGRSYRIAKSAAARRALRSLKANQPQVPNS

SEQ ID NO: 6840 - protein, 525 aa, Homo sapiens
MSWHPQYRSSKFRHVFGKPASKENCYDSVPITRSVHDNHFCAVNPHFIAVVTECAGGGAFLVIPLHQTGKLDPHYPKVCGHRGNVLDVKWNPFDDFEIASCSEDATIKIWSIPKQLLTRNLTAYRKELVGHARRVGLVEWHPTAANILFSAGYDYKVMIWNLDTKESVITSPMSTISCHQDVILSMSFNTNGSLLATTCKDRKIRVIDPRAGTVLQEASYKGHRASKVLFLGNLKKLMSTGTSRWNNRQVALWDQDNLSVPLMEEDLDGSSGVLFPFYDADTSMLYVVGKGDGNIRYYEVSADKPHLSYLTEYRSYNPQKGIGVMPKRGLDVSSCEIFRFYKLITTKSLIEPISMIVPRRSESYQEDIYPPTAGAQPSLTAQEWLSGMNRDPILVSLRPGSELLRPHPLPAERPIFNSMAPASPRLLNQTEKLAAEDGWRSSSLLEEKMPRWAAEHRLEEKKTWLTNGFDVFECPPPKTENELLQMFYRQQEEIRRLRELLTQREVQAKQLELEIKNLRMGSEQL

SEQ ID NO: 6841 - protein, 177 aa, Homo sapiens
MATGSRTSLLLAFGLLCLPWLQEGSAFPTIPLSRLFDNAMLRAHRLHQLAFDTYQEFNLELLRISLLLIQSWLEPVQFLRSVFANSLVYGASDSNVYDLLKDLEEGIQTLMGRLEDGSPRTGQIFKQTYSKFDTNSHNDDALLKNYGLLYCFRKDMDKVETFLRIVQCRSVEGSCGF

SEQ ID NO: 6842 - protein, 269 aa, Homo sapiens
MAAALFVLLGFALLGTHGASGAAGTVFTTVEDLGSKILLTCSLNDSATEVTGHRWLKGGVVLKEDALPGQKTEFKVDSDDQWGEYSCVFLPEPMGTANIQLHGPPRVKAVKSSEHINEGETAMLVCKSESVPPVTDWAWYKITDSEDKALMNGSESRFFVSSSQGRSELHIENLNMEADPGQYRCNGTSSKGSDQAIITLRVRSHLAALWPFLGIVAEVLVLVTIIFIYEKRRKPEDVLDDDDAGSAPLKSSGQHQNDKGKNVRQRNSS

SEQ ID NO: 6843 - protein, 1893 aa, Homo sapiens
MMDLVLEEDVTVPGTLSGCSGLVPSVPDDLDGINPNAGLGNGLLPNVSEETVSPTRARNMKDFENQITELKKENFNLKLRIYFLEERMQQEFHGPTEHIYKTNIELKVEVESLKRELQEREQLLIKASKAVESLAEAGGSEIQRVKEDARKKVQQVEDLLTKRILLLEKDVTAAQAELEKAFAGTETEKALRLRLESKLSEMKKMHEGDLAMALVLDEKDRLIEELKLSLKSKEALIQCLKEEKSQMACPDENVSSGELRGLCAAPREEKERETEAAQMEHQKERNSFEERIQALEEDLREKEREIATEKKNSLKRDKAIQGLTMALKSKEKKVEELNSEIEKLSAAFAKAREALQKAQTQEFQGSEDYETALSGKEALSAALRSQNLTKSTENHRLRRSIKKITQELSDLQQERERLEKDLEEAHREKSKGDCTIRDLRNEVEKLRNEVNEREKAMENRYKSLLSESNKKLHNQEQVIKHLTESTNQKDVLLQKFNEKDLEVIQQNCYLMAAEDLELRSEGLITEKCSSQQPPGSKTIFSKEKKQSSDYEELIQVLKKEQDIYTHLVKSLQESDSINNLQAELNKIFALRKQLEQDVLSYQNLRKTLEEQISEIRRREEESFSLYSDQTSYLSICLEENNRFQVEHFSQEELKKKVSDLIQLVKELYTDNQHLKKTIFDLSCMGFQGNGFPDRLASTEQTELLASKEDEDTIKIGEDDEINFLSDQHLQQSNEIMKDLSKGGCKNGYLRHTESKISDCDGAHAPGCLEEGAFINLLAPLFNEKATLLLESRPDLLKVVRELLLGQLFLTEQEVSGEHLDGKTEKTPKQKGELVHFVQTNSFSKPHDELKLSCEAQLVKAGEVPKVGLKDASVQTVATEGDLLRFKHEATREAWEEKPINTALSAEHRPENLHGVPGWQAALLSLPGITNREAKKSRLPILIKPSRSLGNMYRLPATQEVVTQLQSQILELQGELKEFKTCNKQLHQKLILAEAVMEGRPTPDKTLLNAQPPVGAAYQDSPGEQKGIKTTSSVWRDKEMDSDQQRSYEIDSEICPPDDLASLPSCKENPEDVLSPTSVATYLSSKSQPSAKVSVMGTDQSESINTSNETEYLKQKIHDLETELEGYQNFIFQLQKHSQCSEAIITVLCGTEGAQDGLSKPKNGSDGEEMTFSSLHQVRYVKHVKILGPLAPEMIDSRVLENLKQQLEEQEYKLQKEQNLNMQLFSEIHNLQNKFRDLSPPRYDSLVQSQARELSLQRQQIKDGHGICVISRQHMNTMIKAFEELLQASDVDYCVAEGFQEQLNQCAELLEKLEKLFLNGKSVGVEMNTQNELMERIEEDNLTYQHLLPESPEPSASHALSDYETSEKSFFSRDQKQDNETEKTSVMVNSFSQDLLMEHIQEIRTLRKRLEESIKTNEKLRKQLERQGSEFVQGSTSIFASGSELHSSLTSEIHFLRKQNQALNAMLIKGSRDKQKENDKLRESLSRKTVSLEHLQREYASVKEENERLQKEGSEKERHNQQLIQEVRCSGQELSRVQEEVKLRQQLLSQNDKLLQSLRVELKAYEKLDEEHRRLREASGEGWKGQDPFRDLHSLLMEIQALRLQLERSIETSSTLQSRLKEQLARGAEKAQEGALTLAVQAVSIPEVPLQPDKHDGDKYPMESDNSFDLFDSSQAVTPKSVSETPPLSGNDTDSLSCDSGSSATSTPCVSRLVTGHHLWASKNGRHVLGLIEDYEALLKQISQGQRLLAEMDIQTQEAPSSTSQELGTKGPHPAPLSKFVSSVSTAKLTLEEAYRRLKLLWRVSLPEDGQCPLHCEQIGEMKAEVTKLHKKLFEQEKKLQNTMKLLQLSKRQEKVIFDQLVVTHKILRKARGNLELRPGGAHPGTCSPSRPGS

SEQ ID NO: 6844 - protein, 2822 aa, Homo sapiens [sequence omitted]

SEQ ID NO: 6845 - protein, 530 aa, Homo sapiens
MARAGWTSPVPLCVCLLLTCGFAEAGKLLVVPMDGSHWFTMQSVVEKLILRGHEVVVVMPEVSWQLERSLNCTVKTYSTSYTLEDQNREFMVFAHAQWKAQAQSIFSLLMSSSSGFLDLFFSHCRSLFNDRKLVEYLKESSFDAVFLDPFDTCGLIVAKYFSLPSVVFTRGIFCHHLEEGAQCPAPLSYVPNDLLGFSDAMTFKERVWNHIVHLEDHLFCQYLFRNALEIASEILQTPVTAYDLYSHTSIWLLRTDFVLDYPKPVMPNMIFIGGINCHQGKPLPMEFEAYINASGEHGIVVFSLGSMVSEIPEKKAMAIADALGKIPQTVLWRYTGTRPSNLANNTILVKWLPQNDLLGHPMTRAFITHAGSHGVYESICNGVPMVMMPLFGDQMDNAKRMETKGAGVTLNVLEMTSEDLENALKAVINDKSYKENIMRLSSLHKDRPVEPLDLAVFWVEFVMRHKGAPHLRPAAHDLTWYQYHSLDVIGFLLAVVLTVAFITFKCCAYGYRKCLGKKGRVKKAHKSKTH

SEQ ID NO: 6846 - protein, 367 aa, Homo sapiens
MKTGHFEIVTMLLATMILVDIFQVKAEVLDMADNAFDDEYLKCTDRMEIKYVPQLLKEEKASHQQLDTVWENAKAKWAARKTQIFLPMNFKDNHGIALMAYISEAQEQTPFYHLFSEAVKMAGQSREDYIYGFQFKAFHFYLTRALQLLRKPCEASSKTVVYRTSQGTSFTFGGLNQARFGHFTLAYSAKPQAANDQLTVLSIYTCLGVDIENFLDKESERITLIPLNEVFQVSQEGAGNNLILQSINKTCSHYECAFLGGLKTENCIENLEYFQPIYVYNPGEKNQKLEDHSEKNWKLEDHGEKNQKLEDHGVKILEPTQIPAPGPVPVPGPKSHPSASSGKLLLPQFGMVIILISVSAINLFVAL

SEQ ID NO: 6847 - protein, 716 aa, Homo sapiens
MWRVLFLLSGLGGLRMDSNFDSLPVQITVPEKIRSIIKEGIESQASYKIVIEGKPYTVNLMQKNFLPHNFRVYSYSGTGIMKPLDQDFQNFCHYQGYIEGYPKSVVMVSTCTGLRGVLQFENVSYGIEPLESSVGFEHVIYQVKHKKADVSLYNEKDIESRDLSFKLQSVEYNHMGSDTTVVAQKVFQLIGLTNAIFVSFNITIILSSLELWIDENKIATTGEANELLHTFLRWKTSYLVLRPHDVAFLLVYREKSNYVGATFQGKMCDANYAGGVVLHPRTISLESLAVILAQLLSLSMGITYDDINKCQCSGAVCIMNPEAIHFSGVKIFSNCSFEDFAHFISKQKSQCLHNQPRLDPFFKQQAVCGNAKLEAGEECDCGTEQDCALIGETCCDIATCRFKAGSNCAEGPCCENCLFMSKERMCRPSFEECDLPEYCNGSSASCPENHYVQTGHPCGLNQWICIDGVCMSGDKQCTDTFGKEVEFGPSECYSHLNSKTDVSGNCGISDSGYTQCEADNLQCGKLICKYVGKFLLQIPRATIIYANISGHLCIAVEFASDHADSQKMWIKDGTSCGSNKVCRNQRCVSSSYLGYDCTTDKCNDRGVCNNKKHCHCSASYLPPDCSVQSDLWPGGSIDSGNFPPVAIPARLPERRYIENIYHSKPMRWPFFLFIPFFIIFCVLIAIMVKVNFQRKKWRTEDYSSDEQPESESEPKG

SEQ ID NO: 6848 - protein, 387 aa, Homo sapiens
MPHLMERMVGSGLLWLALVSCILTQASAVQRDPSTVEDKCEKACRPEEECLALNSTWGCFCRQDLNSSDVHSLQPQLDCGPREIKVKVDKCLLGGLGLGEEVIAYLRDPNCSSILQTEERNWVSVTSPVQASACRNILERNQTHAIYKNTLSLVNDFIIRDTILNINFQCAYPLDMKVSLQAALQPIVSSLNVSVDGNGEFIVRMALFQDQNYTNPYEGDAVELSVESVLYVGAILEQGDTSRFNLVLRNCYATPTEDKADLVKYFIIRNSCSNQRDSTIHVEENGQSSESRFSVQMFMFAGHYDLVFLHCEIHLCDSLNEQCQPSCSRSQVRSEVPAIDLARVLDLGPITRRGAQSPGVMNGTPSTAGFLVAWPMVLLTVLLAWLF

SEQ ID NO: 6849 - protein, 334 aa, Homo sapiens
MSALLRLLRTGAPAAACLRLGTSAGTGSRRAMALYHTEERGQPCSQNYRLFFKNVTGHYISPFHDIPLKVNSKEENGIPMKKARNDEYENLFNMIVEIPRWTNAKMEIATKEPMNPIKQYVKDGKLRYVANIFPYKGYIWNYGTLPQTWEDPHEKDKSTNCFGDNDPIDVCEIGSKILSCGEVIHVKILGILALIDEGETDWKLIAINANDPEASKFHDIDDVKKFKPGYLEATLNWFRLYKVPDGKPENQFAFNGEFKNKAFALEVIKSTHQCWKALLMKKCNGGAINCTNVQISDSPFRCTQEEARSLVESVSSSPNKESNEEEQVWHFLGK

SEQ ID NO: 6850 - protein, 214 aa, Homo sapiens
MDDSETGFNLKVVLVSFKQCLDEKEEVLLDPYIASWKGLVRFLNSLGTIFSFISKDVVSKLRIMERLRGGPQSEHYRSLQAMVAHELSNRLVDLERRSHHPESGCRTVLRLHRALHWLQLFLEGLRTSPEDARTSALCADSYNASLAAYHPWVVRRAVTVAFCTLPTREVFLEAMNVGPPEQAVQMLGEALPFIQRVYNVSQKLYAEHSLLDLP

SEQ ID NO: 6851 - protein, 242 aa, Homo sapiens
MLRLLRLALAFYGRTADPAERQGPQQQGLPQGDTQLTTVQGVVTSFCGDYGMIDESIYFSSDVVTGNVPLKVGQKVNVVVEEDKPHYGLRAIKVDVVPRHLYGAGPSDSGTRVLIGCVTSINEDNIYISNSIYFSIAIVSEDFVPYKGDLLEVEYSTEPGISNIKATSVKPIRCIHTEEVCITSVHGRNGVIDYTIFFTLDSVKLPDGYVPQVDDIVNVVMVESIQFCFIWRAISITPVHKS

SEQ ID NO: 6852 - protein, 94 aa, Homo sapiens
MARGSLRRLLRLLVLGLWLALLRSVAGEQAPGAAAPPAPFRLLWPILGGALSLTFVLGLLSGFLVWRRCRRREKFTTPIEETGGEGCPAVALIQ

SEQ ID NO: 6853 - protein, 1647 aa, Homo sapiens
MSTPDPPLGGTPRPGPSPGPGPSPGAMLGPSPGPSPGSAHSMMGPSPGPPSAGHPIPTQGPGGYPQDNMHQMHKPMESMHEKGMSDDPRYNQMKGMGMRSGGHAGMGPPPSPMDQHSQGYPSPLGGSEHASSPVPASGPSSGPQMSSGPGGAPLDGADPQALGQQNRGPTPFNQNQLHQLRAQIMAYKMLARGQPLPDHLQMAVQGKRPMPGMQQQMPTLPPPSVSATGPGPGPGPGPGPGPGPAPPNYSRPHGMGGPNMPPPGPSGVPPGMPGQPPGGPPKPWPEGPMANAAAPTSTPQKLIPPQPTGRPSPAPPAVPPAASPVMPPQTQSPGQPAQPAPMVPLHQKQSRITPIQKPRGLDPVEILQEREYRLQARIAHRIQELENLPGSLAGDLRTKATIELKALRLLNFQRQLRQEVVVCMRRDTALETALNAKAYKRSKRQSLREARITEKLEKQQKIEQERKRRQKHQEYLNSILQHAKDFKEYHRSVTGKIQKLTKAVATYHANTEREQKKENERIEKERMRRLMAEDEEGYRKLIDQKKDKRLAYLLQQTDEYVANLTELVRQHKAAQVAKEKKKKKKKKKAENAEGQTPAIGPDGEPLDETSQMSDLPVKVIHVESGKILTGTDAPKAGQLEAWLEMNPGYEVAPRSDSEESGSEEEEEEEEEEQPQAAQPPTLPVEEKKKIPDPDSDDVSEVDARHIIENAKQDVDDEYGVSQALARGLQSYYAVAHAVTERVDKQSALMVNGVLKQYQIKGLEWLVSLYNNNLNGILADEMGLGKTIQTIALITYLMEHKRINGPFLIIVPLSTLSNWAYEFDKWAPSVVKVSYKGSPAARRAFVPQLRSGKFNVLLTTYEYIIKDKHILAKIRWKYMIVDEGHRMKNHHCKLTQVLNTHYVAPRRLLLTGTPLQNKLPELWALLNFLLPTIFKSCSTFEQWFNAPFAMTGEKVDLNEEETILIIRRLHKVLRPFLLRRLKKEVEAQLPEKVEYVIKCDMSALQRVLYRHMQAKGVLLTDGSEKDKKGKGGTKTLMNTIMQLRKICNHPYMFQHIEESFSEHLGFTGGIVQGLDLYRASGKFELLDRILPKLRATNHKVLLFCQMTSLMTIMEDYFAYRGFKYLRLDGTTKAEDRGMLLKTFNEPGSEYFIFLLSTRAGGLGLNLQSADTVIIFDSDWNPHQDLQAQDRAHRIGQQNEVRVLRLCTVNSVEEKILAAAKYKLNVDQKVIQAGMFDQKSSSHERRAFLQAILEHEEQDESRHCSTGSGSASFAHTAPPPAGVNPDLEEPPLKEEDEVPDDETVNQMIARHEEEFDLFMRMDLDRRREEARNPKRKPRLMEEDELPSWIIKDDAEVERLTCEEEEEKMFGRGSRHRKEVDYSDSLTEKQWLKAIEEGTLEEIEEEVRQKKSSRKRKRDSDAGSSTPTTSTRSRDKDDESKKQKKRGRPPAEKLSPNPPNLTKKMKKIVDAVIKYKDSSSGRQLSEVFIQLPSRKELPEYYELIRKPVDFKKIKERIRNHKYRSLNDLEKDVMLLCQNAQTFNLEGSLIYEDSIVLQSVFTSVRQKIEKEDDSEGEESEEEEEGEEEGSESESRSVKVKIKLGRKEKAQDRLKGGRRRPSRGSRAKPVVSDDDSEEEQEEDRSGSGSEED

SEQ ID NO: 6854 - protein, 622 aa, Homo sapiens
MNKLNFHNNRVMQDRRSVCIFLPNDESLNIIINVKILCHQLLVQVCDLLRLKDCHLFGLSVIQNNEHVYMELSQKLYKYCPKEWKKEASKVRQYEVTWGIDQFGPPMIIHFRVQYYVENGRLISDRAARYYYYWHLRKQVLHSQCVLREEAYFLLAAFALQADLGNFKRNKHYGKYFEPEAYFPSWVVSKRGKDYILKHIPNMHKDQFALTASEAHLKYIKEAVRLDDVAVHYYRLYKDKREIEASLTLGLTMRGIQIFQNLDEEKQLLYDFPWTNVGKLVFVGKKFEILPDGLPSARKLIYYTGCPMRSRHLLQLLSNSHRLYMNLQPVLRHIRKLEENEEKKQYRESYISDNLDLDMDQLEKRSRASGSSAGSMKHKRLSRHSTASHSSSHTSGIEADTKPRDTGPEDSYSSSAIHRKLKTCSSMTSHGSSHTSGVESGGKDRLEEDLQDDEIEMLVDDPRDLEQMNEESLEVSPDMCIYITEDMLMSRKLNGHSGLIVKEIGSSTSSSSETVVKLRGQSTDSLPQTICRKPKTSTDRHSLSLDDIRLYQKDFLRIAGLCQDTAQSYTFGCGHELDEEGLYCNSCLAQQCINIQDAFPVKRTSKYFSLDLTHDEVPEFVV

SEQ ID NO: 6855 - protein, 1588 aa, Homo sapiens
MVQKKKFCPRLLDYLVIVGARHPSSDSVAQTPELLRRYPLEDHTEFPLPPDVVFFCQPEGCLSVRQRRMSLRDDTSFVFTLTDKDTGVTRYGICVNFYRSFQKRISKEKGEGGAGSRGKEGTHATCASEEGGTESSESGSSLQPLSADSTPDVNQSPRGKRRAKAGSRSRNSTLTSLCVLSHYPFFSTFRECLYTLKRLVDCCSERLLGKKLGIPRGVQRDTMWRIFTGSLLVEEKSSALLHDLREIEAWIYRLLRSPVPVSGQKRVDIEVLPQELQPALTFALPDPSRFTLVDFPLHLPLELLGVDACLQVLTCILLEHKVVLQSRDYNALSMSVMAFVAMIYPLEYMFPVIPLLPTCMASAEQLLLAPTPYIIGVPASFFLYKLDFKMPDDVWLVDLDSNRVIAPTNAEVLPILPEPESLELKKHLKQALASMSLNTQPILNLEKFHEGQEIPLLLGRPSNDLQSTPSTEFNPLIYGNDVDSVDVATRVAMVRFFNSANVLQGFQMHTRTLRLFPRPVVAFQAGSFLASRPRQTPFAEKLARTQAVEYFGEWILNPTNYAFQRIHNNMFDPALIGDKPKWYAHQLQPIHYRVYDSNSQLAEALSVPPERDSDSEPTDDSGSDSMDYDDSSSSYSSLGDFVSEMMKCDINGDTPNVDPLTHAALGDASEVEIDELQNQKEAEEPGPDSENSQENPPLRSSSSTTASSSPSTVIHGANSEPADSTEMDDKAAVGVSKPLPSVPPSIGKSNVDRRQAEIGEGSVRRRIYDNPYFEPQYGFPPEEDEDEQGESYTPRFSQHVSGNRAQKLLRPNSLRLASDSDAESDSRASSPNSTVSNTSTEGFGGIMSFASSLYRNHSTSFSLSNLTLPTKGAREKATPFPSLKGNRRALVDQKSSVIKHSPTVKREPPSPQGRSSNSSENQQFLKEVVHSVLDGQGVGWLNMKKVRRLLESEQLRVFVLSKLNRMVQSEDDARQDIIPDVEISRKVYKGMLDLLKCTVLSLEQSYAHAGLGGMASIFGLLEIAQTHYYSKEPDKRKRSPTESVNTPVGKDPGLAGRGDPKAMAQLRVPQLGPRAPSATGKGPKELDTRSLKEENFIASIGPEVIKPVFDLGETEEKKSQISADSGVSLTSSSQRTDQDSVIGVSPAVMIRSSSQDSEVSTVVSNSSGETLGADSDLSSNAGDGPGGEGSVHLASSRGTLSDSEIETNSATSTIFGKAHSLKPSIKEKLAGSPIRTSEDVSQRVYLYEGLLGKERSTLWDQMQFWEDAFLDAVMLEREGMGMDQGPQEMIDRYLSLGEHDRKRLEDDEDRLLATLLHNLISYMLLMKVNKNDIRKKVRRLMGKSHIGLVYSQQINEVLDQLANLNGRDLSIWSSGSRHMKKQTFVVHAGTDTNGDIFFMEVCDDCVVLRSNIGTVYERWWYEKLINMTYCPKTKVLCLWRRNGSETQLNKFYTKKCRELYYCVKDSMERAAARQQSIKPGPELGGEFPVQDLKTGEGGLLQVTLEGINLKFMHNQVFIELNHIKKCNTVRGVFVLEEFVPEIKEVVSHKYKTPMAHEICYSVLCLFSYVAAVHSSEEDLRTPPRPVSS

SEQ ID NO: 6856 - protein, 382 aa, Homo sapiens
MRSPLCWLLPLLILASVAQGQPTRRPRPGTGPGRRPRPRPRPTPSFPQPDEPAEPTDLPPPLPPGPPSIFPDCPRECYCPPDFPSALYCDSRNLRKVPVIPPRIHYLYLQNNFITELPVESFQNATGLRWINLDNNRIRKIDQRVLEKLPGLVFLYMEKNQLEEVPSALPRNLEQLRLSQNHISRIPPGVFSKLENLLLLDLQHNRLSDGVFKPDTFHGLKNLMQLNLAHNILRKMPPRVPTAIHQLYLDSNKIETIPNGYFKSFPNLAFIRLNYNKLTDRGLPKNSFNISNLLVLHLSHNRISSVPAINNRLEHLYLNNNSIEKINGTQICPNDLVAFHDFSSDLENVPHLRYLRLDGNYLKPPIPLDLMMCFRLLQSVVI

SEQ ID NO: 6857 - protein, 1158 aa, Homo sapiens
MESGHLLWALLFMQSLWPQLTDGATRVYYLGIRDVQWNYAPKGRNVITNQPLDSDIVASSFLKSDKNRIGGTYKKTIYKEYKDDSYTDEVAQPAWLGFLGPVLQAEVGDVILIHLKNFATRPYTIHPHGVFYEKDSEGSLYPDGSSGPLKADDSVPPGGSHIYNWTIPEGHAPTDADPACLTWIYHSHVDAPRDIATGLIGPLITCKRGALDGNSPPQRQDVDHDFFLLFSVVDENLSWHLNENIATYCSDPASVDKEDETFQESNRMHAINGFVFGNLPELNMCAQKRVAWHLFGMGNEIDVHTAFFHGQMLTTRGHHTDVANIFPATFVTAEMVPWEPGTWLISCQVNSHFRDGMQALYKVKSCSMAPPVDLLTGKVRQYFIEAHEIQWDYGPMGHDGSTGKNLREPGSISDKFFQKSSSRIGGTYWKVRYEAFQDETFQEKMHLEEDRHLGILGPVIRAEVGDTIQVVFYNRASQPFSMQPHGVFYEKDYEGTVYNDGSSYPGLVAKPFEKVTYRWTVPPHAGPTAQDPACLTWMYFSAADPIRDTNSGLVGPLLVCRAGALGADGKQKGVDKEFFLLFTVLDENKSWYSNANQAAAMLDFRLLSEDIEGFQDSNRMHAINGFLFSNLPRLDMCKGDTVAWHLLGLGTETDVHGVMFQGNTVQLQGMRKGAAMLFPHTFVMAIMQPDNLGTFEIYCQAGSHREAGMRAIYNVSQCPGHQATPRQRYQAARIYYIMAEEVEWDYCPDRSWEREWHNQSEKDSYGYIFLSNKDGLLGSRYKKAVFREYTDGTFRIPRPRTGPEEHLGILGPLIKGEVGDILTVVFKNNASRPYSVHAHGVLESTTVWPLAAEPGEVVTYQWNIPERSGPGPNDSACVSWIYYSAVDPIKDMYSGLVGPLAICQKGILEPHGGRSDMDREFALLFLIFDENKSWYLEENVATHGSQDPGSINLQDETFLESNKMHAINGKLYANLRGLTMYQGERVAWYMLAMGQDVDLHTIHFHAESFLYRNGENYRADVVDLFPGTFEVVEMVASNPGTWLMHCHVTDHVHAGMETLFTVFSRTEHLSPLTVITKETEKAVPPRDIEEGNVKMLGMQIPIKNVEMLASVLVAISVTLLLVVLALGGVVWYQHRQRKLRRNRRSILDDSFKLLSFKQ

SEQ ID NO: 6858 - protein, 432 aa, Homo sapiens
MRPWEMTSNRQPPSVRPSQHHFSGERCNTPARNRRSPPVRRQRGRRDRLSRHNSISQDENYHHLPYAQQQAIEEPRAFHPPNVSPRLLHPAAHPPQQNAVMVDIHDQLHQGTVPVSYTVTTVAPHGIPLCTGQHIPACSTQQVPGCSVVFSGQHLPVCSVPPPMLQACSVQHLPVPYAAFPPLISSDPFLIHPPHLSPHHPPHLPPPGQFVPFQTQQSRSPLQRIENEVELLGEHLPVGGFTYPPSAHPPTLPPSAPLQFLTHDPLHQEVSFGVPYPPFMPRRLTGRSRYRSQQPIPPPPYHPSLLPYVLSMLPVPPAVGPTFSFELDVEDGEVENYEALLNLAERLGEAKPRGLTKADIEQLPSYRFNPNNHQSEQTLCVVCMCDFESRQLLRVLPCNHEFHAKCVDKWLKANRTCPICRADASEVHRDSE

SEQ ID NO: 6859 - protein, 515 aa, Homo sapiens [sequence omitted]

SEQ ID NO: 6860 - protein, 252 aa, Homo sapiens
MAELEFVQIIIIVVVMMVMVVVITCLLSHYKLSARSFISRHSQGRRREDALSSEGCLWPSESTVSGNGIPEPQVYAPPRPTDRLAVPPFAQRERFHRFQPTYPYLQHEIDLPPTISLSDGEEPPPYQGPCTLQLRDPEQQLELNRESVRAPPNRTIFDSDLMDSARLGGPCPPSSNSGISATCYGSGGRMEGPPPTYSEVIGHYPGSSFQHQQSSGPPSLLEGTRLHHTHIAPLESAAIWSKEKDKQKGHPL

SEQ ID NO: 6861 - protein, 164 aa, Homo sapiens
MAASLGQVLALVLVAALWGGTQPLLKRASAGLQRVHEPTWAQQLLQEMKTLFLNTEYLMPFLLNQCGSLLYYLTLASTDLTLAVPICNSLAIIFTLIVGKALGEDIGGKRAVAGMVLTVIGISLCITSSVPWTAELQLHGKGQLQTLSQKCKREASGTQSERFG

SEQ ID NO: 6862 - protein, 437 aa, Homo sapiens
MQGAQEASASEMLPLLLPLLWAGALAQERRFQLEGPESLTVQEGLCVLVPCRLPTTLPASYYGYGYWFLEGADVPVATNDPDEEVQEETRGRFHLLWDPRRKNCSLSIRDARRRDNAAYFFRLKSKWMKYGYTSSKLSVRVMALTHRPNISIPGTLESGHPSNLTCSVPWVCEQGTPPIFSWMSAAPTSLGPRTTQSSVLTITPRPQDHSTNLTCQVTFPGAGVTMERTIQLNVSSFKILQNTSSLPVLEGQALRLLCDADGNPPAHLSWFQGFPALNATPISNTGVLELPQVGSAEEGDFTCRAQHPLGSLQISLSLFVHWKPEGRAGGVLGAVWGASITTLVFLCVCFIFRVKTRRKKAAQPVQNTDDVNPVMVSGSRGHQHQFQTGIVSDHPAEAGPISEDEQELHYAVLHFHKVQPQEPKVTDTEYSEIKIHK

SEQ ID NO: 6863 - protein, 375 aa, Homo sapiens
MGGHPQLRLVKALLLLGLNPVSASLQDQHCESLSLASNISDNGYRECLANGSWAARVNYSECQEILNEEKKSKVHYHVAVIINYLGHCISLVALLVAFVLFLRLRSIRCLRNIIHWNLISAFILRNATWFVVQLTMSPEVHQSNVGWCRLVTAAYNYFHVTNFFWMFGEGCYLHTAIVLTYSTDRLRKWMFICIGWGVPFPIIVAWAIGKLYYDNEKCWFGKRPGVYTDYIYQGPMILVLLINFIFLFNIVRILMTKLRASTTSETIQYRKAVKATLVLLPLLGITYMLFFVNPGEDEVSRVVFIYFNSFLESFQGFFVSVFYCFLNSEVRSAIRKRWHRWQDKHSIRARVARAMSIPTSPTRVSFHSIKQSTAV

SEQ ID NO: 6864 - protein, 490 aa, Homo sapiens
MHHCKRYRSPEPDPYLSYRWKRRRSYSREHEGRLRYPSRREPPPRRSRSRSHDRLPYQRRYRERRDSDTYRCEERSPSFGEDYYGPSRSRHRRRSRERGPYRTRKHAHHCHKRRTRSCSSASSRSQQSSKRSSRSVEDDKEGHLVCRIGDWLQERYEIVGNLGEGTFGKVVECLDHARGKSQVALKIIRNVGKYREAARLEINVLKKIKEKDKENKFLCVLMSDWFNFHGHMCIAFELLGKNTFEFLKENNFQPYPLPHVRHMAYQLCHALRFLHENQLTHTDLKPENILFVNSEFETLYNEHKSCEEKSVKNTSIRVADFGSATFDHEHHTTIVATRHYRPPEVILELGWAQPCDVWSIGCILFEYYRGFTLFQTHENREHLVMMEKILGPIPSHMIHRTRKQKYFYKGGLVWDENSSDGRYVKENCKPLKSYMLQDSLEHVQLFDLMRRMLEFDPAQRITLAEALLHPFFAGLTPEERSFHTSRNPSR

SEQ ID NO: 6865 - protein, 784 aa, Homo sapiens
MQRLMMLLATSGACLGLLAVAAVAAAGANPAQRDTHSLLPTHRRQKRDWIWNQMHIDEEKNTSLPHHVGKIKSSVSRKNAKYLLKGEYVGKVFRVDAETGDVFAIERLDRENISEYHLTAVIVDKDTGENLETPSSFTIKVHDVNDNWPVFTHRLFNASVPESSAVGTSVISVTAVDADDPTVGDHASVMYQILKGKEYFAIDNSGRIITITKSLDREKQARYEIVVEARDAQGLRGDSGTATVLVTLQDINDNFPFFTQTKYTFVVPEDTRVGTSVGSLFVEDPDEPQNRMTKYSILRGDYQDAFTIETNPAHNEGIIKPMKPLDYEYIQQYSFIVEATDPTIDLRYMSPPAGNRAQVIINITDVDEPPIFQQPFYHFQLKENQKKPLIGTVLAMDPDAARHSIGYSIRRTSDKGQFFRVTKKGDIYNEKELDREVYPWYNLTVEAKELDSTGTPTGKESIVQVHIEVLDENDNAPEFAKPYQPKVCENAVHGQLVLQISAIDKDITPRNVKFKFILNTENNFTLTDNHDNTANITVKYGQFDREHTKVHFLPVVISDNGMPSRTGTSTLTVAVCKCNEQGEFTFCEDMAAQVGVSIQAVVAILLCILTITVITLLIFLRRRLRKQARAHGKSVPEIHEQLVTYDEEGGGEMDTTSYDVSVLNSVRRGGAKPPRPALDARPSLYAQVQKPPRHAPGAHGGPGEMAAMIEVKKDEADHDGDGPPYDTLHIYGYEGSESIAESLSSLGTDSSDSDVDYDFLNDWGPRFKMLAELYGSDPREELLY

SEQ ID NO: 6866 - protein, 580 aa, Homo sapiens
MHLSAVFNALLVSVLAAVLWKHVRLREHAATLEEELALSRQATEPAPALRIDYPKALQILMEGGTHMVCTGRTHTDRICRFKWLCYSNEAEEFIFFHGNTSVMLPNLGSRRFQPALLDLSTVEDHNTQYFNFVELPAAALRFMPKPVFVPDVALIANRFNPDNLMHVFHDDLLPLFYTLRQFPGLAHEARLFFMEGWGEGAHFDLYKLLSPKQPLLRAQLKTLGRLLCFSHAFVGLSKITTWYQYGFVQPQGPKANILVSGNEIRQFARFMTEKLNVSHTGVPLGEEYILVFSRTQNRLILNEAELLLALAQEFQMKTVTVSLEDHTFADVVRLVSNASMLVSMHGAQLVTTLFLPRGATVVELFPYAVNPDHYTPYKTLAMLPGMDLQYVAWRNMMPENTVTHPERPWDQGGITHLDRAEQARILQSREVPRHLCCRNPEWLFRIYQDTKVDIPSLIQTIRRVVKGRPGPRKQKWTVGLYPGKVREARCQASVHGASEARLTVSWQIPWNLKYLKVREVKYEVWLQEQGENTYVPYILALQNHTFTENIKPFTTYLVWVRCIFNKILLGPFADVLVCNT

SEQ ID NO: 6867 - protein, 735 aa, Homo sapiens
MTAGSSYPLFLAAYACTGCLAERLGWFIKSSNEATNITPKHNMKAFLDELKAENIKKFLYNFTQIPHLAGTEQNFQLAKQIQSQWKEFGLDSVELAHYDVLLSYPNKTHPNYISIINEDGNEIFNTSLFEPPPPGYENVSDIVPPFSAFSPQGMPEGDLVYVNYARTEDFFKLERDMKINCSGKIVIARYGKVFRGNKVKNAQLAGAKGVILYSDPADYFAPGVKSYPDGWNLPGGGVQRGNILNLNGAGDPLTPGYPANEYAYRRGIAEAVGLPSIPVHPIGYYDAQKLLEKMGGSAPPDSSWRGSLKVPYNVGPGFTGNFSTQKVKMHIHSTNEVTRIYNVIGTLRGAVEPDRYVILGGHRDSWVFGGIDPQSGAAVVHEIVRSFGTLKKEGWRPRRTILFASWDAEEFGLLGSTEWAEENSRLLQERGVAYINADSSIEGNYTLRVDCTPLMYSLVHNLTKELKSPDEGFEGKSLYESWTKKSPSPEFSGMPRISKLGSGNDFEVFFQRLGIASGRARYTKNWETNKFSGYPLYHSVYETYELVEKFYDPMFKYHLTVAQVRGGMVFELANSIVLPFDCRDYAVVLRKYADKIYSISMKHPQEMKTYSVSFDSLFSAVKNFTEIASKFSERLQDFDKSNPIVLRMMNDQLMFLERAFIDPLGLPDRPFYRHVIYAPSSHNKYAGESFPGIYDALFDIESKVDPSKAWGEVKRQIYVAAFTVQAAAETLSEVA

SEQ ID NO: 6868 - protein, 930 aa, Homo sapiens
MPRAPHFMPLLLLLLLLSLPHTQAAFPQDPLPLLISDLQGTSPLSWFRGLEDDAVAAELGLDFQRFLTLNRTLLVAARDHVFSFDLQAEEEGEGLVPNKYLTWRSQDVENCAVRGKLTDECYNYIRVLVPWDSQTLLACGTNSFSPVCRSYGITSLQQEGEELSGQARCPFDATQSNVAIFAEGSLYSATAADFQASDAVVYRSLGPQPPLRSAKYDSKWLREPHFVQALEHGDHVYFFFREVSVEDARLGRVQFSRVARVCKRDMGGSPRALDRHWTSFLKLRLNCSVPGDSTFYFDVLQALTGPVNLHGRSALFGVFTTQTNSIPGSAVCAFYLDEIERGFEGKFKEQRSLDGAWTPVSEDRVPSPRPGSCAGVGGAALFSSSRDLPDDVLTFIKAHPLLDPAVPPVTHQPLLTLTSRALLTQVAVDGMAGPHSNITVMFLGSNDGTVLKVLTPGGRSGGPEPILLEEIDAYSPARCSGKRTAQTARRIIGLELDTEGHRLFVAFSGCIVYLPLSRCARHGACQRSCLASQDPYCGWHSSRGCVDIRGSGGTDVDQAGNQESMEHGDCQDGATGSQSGPGDSAYGVRRDLPPASASRSVPIPLLLASVAAAFALGASVSGLLVSCACRRAHRRRGKDIETPGLPRPLSLRSLARLHGGGPEPPPPSKDGDAVQTPQLYTTFLPPPEGVPPPELACLPTPESTPELPVKHLRAAGDPWEWNQNRNNAKEGPGRSRGGHAAGGPAPRVLVRPPPPGCPGQAVEVTTLEELLRYLHGPQPPRKGAEPPAPLTSRALPPEPAPALLGGPSPRPHECASPLRLDVPPEGRCASAPARPALSAPAPRLGVGGGRRLPFSGHRAPPALLTRVPSGGPSRYSGGPGKHLLYLGRPEGYRGRALKRVDVEKPQLSLKPPLVGPSSRQAVPNGGRFNF

SEQ ID NO: 6869 - protein, 261 aa, Homo sapiens
MSRYLRPPNTSLFVRNVADDTRSEDLRREFGRYGPIVDVYVPLDFYTRRPRGFAYVQFEDVRDAEDALHNLDRKWICGRQIEIQFAQGDRKTPNQMKAKEGRNVYSSSRYDDYDRYRRSRSRSYERRRSRSRSFDYNYRRSYSPRNRPTGRPRRSRSHSDNDRFKHRNRSFSRSKSNSRSRSKSQPKKEMKAKSRSRSASHTKTRGTSKTDSKTHYKSGSRYEKESRKKEPPRSKSQSRSQSRSRSKSRSRSWTSPKSSGH

SEQ ID NO: 6870 - protein, 2436 aa, Homo sapiens
MGFLHQLQLLLWKNVTLKRRSPWVLAFEIFIPLVLFFILLGLRQKKPTISVKEVSFYTAAPLTSAGILPVMQSLCPDGQRDEFGFLQYANSTVTQLLERLDRVVEEGNLFDPARPSLGSELEALRQHLEALSAGPGTSGSHLDRSTVSSFSLDSVARNPQELWRFLTQNLSLPNSTAQALLAARVDPPEVYHLLFGPSSALDSQSGLHKGQEPWSRLGGNPLFRMEELLLAPALLEQLTCTPGSGELGRILTVPESQKGALQGYRDAVCSGQAAARARRFSGLSAELRNQLDVAKVSQQLGLDAPNGSDSSPQAPPPRRLQALLGDLLDAQKVLQDVDVLSALALLLPQGACTGRTPGPPASGAGGAANGTGAGAVMGPNATAEEGAPSAAALATPDTLQGQCSAFVQLWAGLQPILCGNNRTIEPEALRRGNMSSLGFTSKEQRNLGLLVHLMTSNPKILYAPAGSEVDRVILKANETFAFVGNVTHYAQVWLNISAEIRSFLEQGRLQQHLRWLQQYVAELRLHPEALNLSLDELPPALRQDNFSLPSGMALLQQLDTIDNAACGWIQFMSKVSVDIFKGFPDEESIVNYTLNQAYQDNVTVFASVIFQTRKDGSLPPHVHYKIRQNSSFTEKTNEIRRAYWRPGPNTGGRFYFLYGFVWIQDMMERAIIDTFVGHDVVEPGSYVQMFPYPCYTRDDFLFVIEHMMPLCMVISWVYSVAMTIQHIVAEKEHRLKEVMKTMGLNNAVHWVAWFITGFVQLSISVTALTAILKYGQVLMHSHVVIIWLFLAVYAVATIMFCFLVSVLYSKAKLASACGGIIYFLSYVPYMYVAIREEVAHDKITAFEKCIASLMSTTAFGLGSKYFALYEVAGVGIQWHTFSQSPVEGDDFNLLLAVTMLMVDAVVYGILTWYIEAVHPGMYGLPRPWYFPLQKSYWLGSGRTEAWEWSWPWARTPRLSVMEEDQACAMESRRFEETRGMEEEPTHLPLVVCVDKLTKVYKDDKKLALNKLSLNLYENQVVSFLGHNGAGKTTTMSILTGLFPPTSGSATIYGHDIRTEMDEIRKNLGMCPQHNVLFDRLTVEEHLWFYSRLKSMAQEEIRREMDKMIEDLELSNKRHSLVQTLSGGMKRKLSVAIAFVGGSRAIILDEPTAGVDPYARRAIWDLILKYKPGRTILLSTHHMDEADLLGDRIAIISHGKLKCCGSPLFLKGTYGDGYRLTLVKRPAEPGGPQEPGLASSPPGRAPLSSCSELQVSQFIRKHVASCLLVSDTSTELSYILPSEAAKKGAFERLFQHLERSLDALHLSSFGLMDTTLEEVFLKVSEEDQSLENSEADVKESRKDVLPGAEGPASGEGHAGNLARCSELTQSQASLQSASSVGSARGDEGAGYTDVYGDYRPLFDNPQDPDNVSLQEVEAEALSRVGQGSRKLDGGWLKVRQFHGLLVKRFHCARRNSKALFSQILLPAFFVCVAMTVALSVPEIGDLPPLVLSPSQYHNYTQPRGNFIPYANEERREYRLRLSPDASPQQLVSTFRLPSGVGATCVLKSPANGSLGPTLNLSSGESRLLAARFFDSMCLESFTQGLPLSNFVPPPPSPAPSDSPASPDEDLQAWNVSLPPTAGPEMWTSAPSLPRLVREPVRCTCSAQGTGFSCPSSVGGHPPQMRVVTGDILTDITGHNVSEYLLFTSDRFRLHRYGAITFGNVLKSIPASFGTRAPPMVRKIAVRRAAQVFYNNKGYHSMPTYLNSLNNAILRANLPKSKGNPAAYGITVTNHPMNKTSASLSLDYLLQGTDVVIAIFIIVAMSFVPASFVVFLVAEKSTKAKHLQFVSGCNPIIYWLANYVWDMLNYLVPATCCVIILFVFDLPAYTSPTNFPAVLSLFLLYGWSITPIMYPASFWFEVPSSAYVFLIVINLFIGITATVATFLLQLFEHDKDLKVVNSYLKSCFLIFPNYNLGHGLMEMAYNEYINEYYAKIGQFDKMKSPFEWDIVTRGLVAMAVEGVVGFLLTIMCQYNFLRRPQRMPVSTKPVEDDVDVASERQRVLRGDADNDMVKIENLTKVYKSRKIGRILAVDRLCLGVRPGECFGLLGVNGAGKTSTFKMLTGDESTTGGEAFVNGHSVLKELLQVQQSLGYCPQCDALFDELTAREHLQLYTRLRGISWKDEARVVKWALEKLELTKYADKPAGTYSGGNKRKLSTAIALIGYPAFIFLDEPTTGMDPKARRFLWNLILDLIKTGRSVVLTSHSMEECEALCTRLAIMVNGRLRCLGSIQHLKNRFGDGYMITVRTKSSQSVKDVVRFFNRNFPEAMLKERHHTKVQYQLKSEHISLAQVFSKMEQVSGVLGIEDYSVSQTTLDNVFVNFAKKQSDNLEQQETEPPSALQSPLGCLLSLLRPRSAPTELRALVADEPEDLDTEDEGLISFEEERAQLSFNTDTLC

SEQ ID NO: 6871 - protein, 540 aa, Homo sapiens
MDSVAFEDVDVNFTQEEWALLDPSQKNLYRDVMWETMRNLASIGKKWKDQNIKDHYKHRGRNLRSHMLERLYQTKDGSQRGGIFSQFANQNLSKKIPGVKLCESIVYGEVSMGQSSLNRHIKDHSGHEPKEYQEYGEKPDTRNQCWKPFSSHHSFRTHEIIHTGEKLYDCKECGKTFFSLKRIRRHIITHSGYTPYKCKVCGKAFDYPSRFRTHERSHTGEKPYECQECGKAFTCITSVRRHMIKHTGDGPYKCKVCGKPFHSLSSFQVHERIHTGEKPFKCKQCGKAFSCSPTLRIHERTHTGEKPYECKQCGKAFSYLPSLRLHERIHTGEKPFVCKQCGKAFRSASTFQIHERTHTGEKPYECKECGEAFSCIPSMRRHMIKHTGEGPYKCKVCGKPFHSLSPFRIHERTHTGEKPYVCKHCGKAFVSSTSIRIHERTHTGEKPYECKQCGKAFSYLNSFRTHEMIHTGEKPFECKRCGKAFRSSSSFRLHERTHTGQKPYHCKECGKAYSCRASFQRHMLTHAEDGPPYKCMWESL

SEQ ID NO: 6872 - protein, 370 aa, Homo sapiens
MAGAENWPGQQLELDEDEASCCRWGAQHAGARELAALYSPGKRLQEWCSVILCFSLIAHNLVHLLLLARWEDTPLVILGVVAGALIADFLSGLVHWGADTWGSVELPIVGKAFIRPFREHHIDPTAITRHDFIETNGDNCLVTLLPLLNMAYKFRTHSPEALEQLYPWECFVFCLIIFGTFTNQIHKWSHTYFGLPRWVTLLQDWHVILPRKHHRIHHVSPHETYFCITTGVKVPRNFRLLEELEEGQKGVGDGTVSWGLEDDEDMTLTRWTGMIIGPPRTIYENRIYSLKIECGPKYPEAPPFVRFVTKINMNGVNSSNGVVDPRAISVLAKWQNSYSIKVVLQELRRLMMSKENMKLPQPPEGQCYSN

SEQ ID NO: 6873 - protein, 361 aa, Homo sapiens
MALNVAPVRDTKWLTLEVCRQFQRGTCSRSDEECKFAHPPKSCQVENGRVIACFDSLKGRCSRENCKYLHPPTHLKTQLEINGRNNLIQQKTAAAMLAQQMQFMFPGTPLHPVPTFPVGPAIGTNTAISFAPYLAPVTPGVGLVPTEILPTTPVIVPGSPPVTVPGSTATQKLLRTDKLEVCREFQRGNCARGETDCRFAHPADSTMIDTSDNTVTVCMDYIKGRCMREKCKYFHPPAHLQAKIKAAQHQANQAAVAAQAAAAAATVMAFPPGALHPLPKRQALEKSNGTSAVFNPSVLHYQQALTSAQLQQHAAFIPTDNSEIISRNGMECQESALRITKHCYCTYYPVSSSIELPQTAC

SEQ ID NO: 6874 - protein, 556 aa, Homo sapiens
MARTTSQLYDAVPIQSSVVLCSCPSPSMVRTQTESSTPPGIPGGSRQGPAMDGTAAEPRPGAGSLQHAQPPPQPRKKRPEDFKFGKILGEGSFSTVVLARELATSREYAIKILEKRHIIKENKVPYVTRERDVMSRLDHPFFVKLYFTFQDDEKLYFGLSYAKNGELLKYIRKIGSFDETCTRFYTAEIVSALEYLHGKGIIHRDLKPENILLNEDMHIQITDFGTAKVLSPESKQARANSFVGTAQYVSPELLTEKSACKSSDLWALGCIIYQLVAGLPPFRAGNEYLIFQKIIKLEYDFPEKFFPKARDLVEKLLVLDATKRLGCEEMEGYGPLKAHPFFESVTWENLHQQTPPKLTAYLPAMSEDDEDCYGNYDNLLSQFGCMQVSSSSSSHSLSASDTGLPQRSGSNIEQYIHDLDSNSFELDLQFSEDEKRLLLEKQAGGNPWHQFVENNLILKMGPVDKRKGLFARRRQLLLTEGPHLYYVDPVNKVLKGEIPWSQELRPEAKNFKTFFVHTPNRTYYLMDPSGNAHKWCRKIQEVWRQRYQSHPDAAVQ

SEQ ID NO: 6875 - protein, 1052 aa, Homo sapiens
MKLVNIWLLLLVVLLCGKKHLGDRLEKKSFEKAPCPGCSHLTLKVEFSSTVVEYEYIVAFNGYFTAKARNSFISSALKSSEVDNWRIIPRNNPSSDYPSDFEVIQIKEKQKAGLLTLEDHPNIKRVTPQRKVFRSLKYAESDPTVPCNETRWSQKWQSSRPLRRASLSLGSGFWHATGRHSSRRLLRAIPRQVAQTLQADVLWQMGYTGANVRVAVFDTGLSEKHPHFKNVKERTNWTNERTLDDGLGHGTFVAGVIASMRECQGFAPDAELHIFRVFTNNQVSYTSWFLDAFNYAILKKIDVLNLSIGGPDFMDHPFVDKVWELTANNVIMVSAIGNDGPLYGTLNNPADQMDVIGVGGIDFEDNIARFSSRGMTTWELPGGYGRMKPDIVTYGAGVRGSGVKGGCRALSGTSVASPVVAGAVTLLVSTVQKRELVNPASMKQALIASARRLPGVNMFEQGHGKLDLLRAYQILNSYKPQASLSPSYIDLTECPYMWPYCSQPIYYGGMPTVVNVTILNGMGVTGRIVDKPDWQPYLPQNGDNIEVAFSYSSVLWPWSGYLAISISVTKKAASWEGIAQGHVMITVASPAETESKNGAEQTSTVKLPIKVKIIPTPPRSKRVLWDQYHNLRYPPGYFPRDNLRMKNDPLDWNGDHIHTNFRDMYQHLRSMGYFVEVLGAPFTCFDASQYGTLLMVDSEEEYFPEEIAKLRRDVDNGLSLVIFSDWYNTSVMRKVKFYDENTRQWWMPDTGGANIPALNELLSVWNMGFSDGLYEGEFTLANHDMYYASGCSIAKFPEDGVVITQTFKDQGLEVLKQETAVVENVPILGLYQIPAEGGGRIVLYGDSNCLDDSHRQKDCFWLLDALLQYTSYGVTPPSLSHSGNRQRPPSGAGSVTPERMEGNHLHRYSKVLEAHLGDPKPRPLPACPRLSWAKPQPLNETAPSNLWKHQKLLSIDLDKVVLPNFRSNRPQVRPLSPGESGAWDIPGGIMPGRYNQEVGQTIPVFAFLGAMVVLAFFVVQINKAKSRPKRRKPRVKRPQLMQQVHPPKTPSV

SEQ ID NO: 6876 - protein, 176 aa, Homo sapiens
MGPAEAGRRGAASPVPPPLVRVAPSLFLGSARAAGAEEQLARAGVTLCVNVSRQQPGPRAPGVAELRVPVFDDPAEDLLAHLEPTCAAMEAAVRAGGACLVYCKNGRSRSAAVCTAYLMRHRGLSLAKAFQMVKSARPVAEPNPGFWSQLQKYEEALQAQSCLQGEPPALGLGPEA

SEQ ID NO: 6877 - protein, 170 aa, Homo sapiens
MGKRYFCDYCDRSFQDNLHNRKKHLNGLQHLKAKKVWYDMFRDAAAILLDEQNKRPCRKFLLTGQCDFGSNCRFSHMSERDLQELSIQVEEERRAREWLLDAPELPEGHLEDWLEKRAKRLSSAPSSRAEPIRTTVFQYPVGWPPVQELPPSLRAPPPGGWPLQPRVQWG

SEQ ID NO: 6878 - protein, 441 aa, Homo sapiens
MRVVTIVILLCFCKAAELRKASPGSVRSRVNHGRAGGGRRGSNPVKRYAPGLPCDVYTYLHEKYLDCQERKLVYVLPGWPQDLLHMLLARNKIRTLKNNMFSKFKKLKSLDLQQNEISKIESEAFFGLNKLTTLLLQHNQIKVLTEEVFIYTPLLSYLRLYDNPWHCTCEIETLISMLQIPRNRNLGNYAKCESPQEQKNKKLRQIKSEQLCNEEEKEQLDPKPQVSGRPPVIKPEVDSTFCHNYVFPIQTLDCKRKELKKVPNNIPPDIVKLDLSYNKINQLRPKEFEDVHELKKLNLSSNGIEFIDPAAFLGLTHLEELDLSNNSLQNFDYGVLEDLYFLKLLWLRDNPWRCDYNIHYLYYWLKHHYNVHFNGLECKTPEEYKGWSVGKYIRSYYEECPKDKLPAYPESFDQDTEDDEWEKKHRDHTAKKQSVIITIVG

SEQ ID NO: 6879 - protein, 178 aa, Homo sapiens
MSPSGRLCLLTIVGLILPTRGQTLKDTTSSSSADSTIMDIQVPTRAPDAVYTELQPTSPTPTWPADETPQPQTQTQQLEGTDGPLVTDPETHKSTKAAHPTDDTTTLSERPSPSTDVQTDPQTLKPSGFHEDDPFFYDEHTLRKRGLLVAAVLFITGIIILTSGKCRQLSRLCRNRCR

SEQ ID NO: 6880 - protein, 154 aa, Homo sapiens [sequence omitted]

SEQ ID NO: 6881 - protein, 326 aa, Homo sapiens
MATNFSDIVKQGYVKMKSRKLGIYRRCWLVFRKSSSKGPQRLEKYPDEKSVCLRGCPKVTEISNVKCVTRLPKETKRQAVAIIFTDDSARTFTCDSELEAEEWYKTLSVECLGSRLNDISLGEPDLLAPGVQCEQTDRFNVFLLPCPNLDVYGECKLQITHENIYLWDIHNPRVKLVSWPLCSLRRYGRDATRFTFEAGRMCDAGEGLYTFQTQEGEQIYQRVHSATLAIAEQHKRVLLEMEKNVRLLNKGTEHYSYPCTPTTMLPRSAYWHHITGSQNIAEASSYAGEGYGAAQASSETDLLNRFILLKPKPSQGDSSEAKTPSQ

SEQ ID NO: 6882 - protein, 402 aa, Homo sapiens
MAETSEEVAVLVQRVVKDITNAFRRNPHIDEIGLIPCPEARYNRSPIVLVENKLGVESWCVKFLLPYVHNKLLLYRTRKQWLNRDELIDVTCTLLLLNPDFTTAWNVRKELILSGTLNPIKDLHLGKLALTKFPKSPETWIHRRWVLQQLIQETSLPSFVTKGNLGTIPTERAQRLIQEEMEVCGEAAGRYPSNYNAWSHRIWVLQHLAKLDVKILLDELSSTKHWASMHVSDHSGFHYRQFLLKSLISQTVIDSSVMEQNPLRSEPALVPPKDEEAAVSTEEPRINLPHLLEEEVEFSTDLIDSYPGHETLWCHRRHIFYLQHHLNAGSQLSQAMEVDGLNDSSKQGYSQETKRLKRTPVPDSLGLEMEHRFIDQVLSTCRNVEQARFASAYRKWLVTLSQ

SEQ ID NO: 6883 - protein, 204 aa, Homo sapiens
MGSPRSALSCLLLHLLVLCLQAQHVREQSLVTDQLSRRLIRTYQLYSRTSGKHVQVLANKRINAMAEDGDPFAKLIVETDTFGSRVRVRGAETGLYICMNKKGKLIAKSNGKGKDCVFTEIVLENNYTALQNAKYEGWYMAFTRKGRPRKGSKTRQHQREVHFMKRLPRGHHTTEQSLRFEFLNYPPFTRSLRGSQRTWAPEPR

SEQ ID NO: 6884 - protein, 1801 aa, Homo sapiens
MSDDIRKRFEFPNSLIQSQAVGHLIAAVLKENGFSEKIHQSTNQTPALNLLWEKCCSDNVVVRTACCEGLVALVAQDHAEFSYVLNGILNLIPSTRNTHGLIKAIMHLLQMQALKEGQGGEKNIQSIYTIRNHPHPLITVLEHRPDCWPVFLQQLTAFFQQCPERLEVSCIQIMAPFLWYLYCEPSQLQEYAKLRLALLKVLLQPQVLCDKDQPSILEQQILQLCCDIVPCLQVKDLIQTTEAMMFIEEVCLSLLRHPVFWKIQLTQMSLQLLCVSEVSLKITGECSSSIHLLEHSVELLKEDFPVELVIIGIALLLLQTPASQQKPILNLALKLLSVTEDQKIPKSSLLLVMPILQILSSTALEDCISVDEEGPSRQQLALNLLEMIQQECYRDDHQKLSYKLVCPVTSMYGTIFTAWRILEVMTDSSAASDWLASVESLLPITAVIPAPAFLLLAHLLVEDKGQNLHQILKVTTELAQADSSQVPNLIPVLMFKLGRPLEPILYNDILYTLPKLGVHKVCIGQILRIIQLLGTTPRLRAVTLRLLTSLWEKQDRVYPELQRFMAVSDVPSLSVGKEVQWEKLIAKAASIRDICKQRPYQHGADMLAAISQVLNECTKPDQATPAALVLQGLHALCQAEVVCIRSTWNALSPKLSCDTRPLILKTLSELFSLVPSLTVNTTEYENFKVQVLSFLWTHTQNKDPIVANAAYRSLANFSAGEHTILHLPEKIRPEIPIPEELDDDEDVEDVDLSVPGSCYLKLLSLTPPLVLPALEEFFTSLVKQEMVNMPRGIYHSALKGGARSDQGKTVAGIPNFILKMYETNKQPGLKPGLAGGMLFCYDVSMYQSKDGKPLNRLMASRGRSFKQTSLALVHEVHIQLSEWHRAIFLPQAWLAYMNRAYHAILQGRLGELELQLKHGKEEPEEVQYKKSTAWLWVRDMLTDEITKAAAKESPVVKGNALLALSSLAVVVSRHEASLSSDSDGLLEVQPNFLSMKEWVSMVLDTLLVIVDSHYQPRGQLLSWFYYKSYSGENTASAIARSAAATALSLLVPVFIISCKEKVEEILNMLTARLPGKPSADESQAVQIHMGLALGMFLSRLCEEKLSDISGQEMNLLLMKSLDALENCCFDTSLEYNTGCILGVGLVLSLMSHSSQMQSRVHVAALLRKLSAHVDDSGSQSRTFQEVLAYTLSCVCTSAFSAGIIEATEAEDVMNKLRLLVENSQQTSGFALALGNIVHGLSVCGHGKAEDLGSKLLPAWIRIVLTEGTPTMLCLAALHGMVALVGSEGDVMQLKSEAIQTSHFQGRLNEVIRTLTQVISVSGVIGLQSNAVWLLGHLHLSTLSSSQSRASVPTDYSYLPESSFIGAAIGFFITGGKKGPESVPPSLLKVVMKPIATVGESYQYPPVNWAALLSPLMRLNFGEEIQQLCLEIMVTQAQSSQNAAALLGLWVTPPLIHSLSLNTKRYLLISAPLWIKHISDEQILGFVENLMVAVFKAASPLGSPELCPSALHGLSQAMKLPSPAHHLWSLLSEATGKIFDLLPNKIRRKDLELYISIAKCLLEMTDDDANRIAQVTKSNIEKAAFVKLYLVSQGRFPLVNLTDMLSVAVQHREKEVLAWMILHSLYQARIVSHANTGVLKRMEWLLELMGYIRNVAYQSTSFHNTALDKALDFFLLIFATAVVAWADHTAPLLLGLSASWLPWHQENGPAGPVPSFLGRSPMHRVTLQEVLTLLPNSMALLLQKEPWKEQTQKFIDWLFSIMESPKEALSAQSRDLLKATLLSLRVLPEFKKKAVWTRAYGW

SEQ ID NO: 6885 - protein, 976 aa, Homo sapiens
MGNLESAEGVPGEPPSVPLLLPPGKMPMPEPCELEERFALVLSSMNLPPDKARLLRQYDNEKKWDLICDQERFQVKNPPHTYIQKLQSFLDPSVTRKKFRRRVQESTKVLRELEISLRTNHIGWVREFLNDENKGLDVLVDYLSFAQCSVMYSTLPGRRALKNSRLVSQKDDVHVCILCLRAIMNYQYGFNLVMSHPHAVNEIALSLNNKNPRTKALVLELLAAVCLVRGGHEIILAAFDNFKEVCKELHRFEKLMEYFRNEDSNIDFMVACMQFINIVVHSVEDMNFRVHLQYEFTKLGLEEFLQKSRHTESEKLQVQIQAYLDNVFDVGGLLEDAETKNVALEKVEELEEHVSHLTEKLLDLENENMMRVAELEKQLLQREKELESIKETYENTSHQVHTLRRLIKEKEEAFQRRCHLEPNVRGLESVDSEALARVGPAELSEGMPPSDLDLLAPAPPPEEVLPLPPPPAPPLPPPPPPLPDKCPPAPPLPGAAPSVVLTVGLSAIRIKKPIKTKFRLPVFNWTALKPNQISGTVFSELDDEKILEDLDLDKFEELFKTKAQGPALDLICSKNKTAQKAASKVTLLEANRAKNLAITLRKAGRSAEEICRAIHTFDLQTLPVDFVECLMRFLPTEAEVKLLRQYERERQPLEELAAEDRFMLLFSKVERLTQRMAGMAFLGNFQDNLQMLTPQLNAIIAASASVKSSQKLKQMLEIILALGNYMNSSKRGAVYGFKLQSLDLLLDTKSTDRKMTLLHFIALTVKEKYPDLANFWHELHFVEKAAAVSLENVLLDVKELGRGMELIRRECSIHDNSVLRNFLSTNEGKLDKLQRDAKTAEEAYNAVVRYFGESPKTTPPSVFFPVFVRFIRSYKEAEQENEARKKQEEVMREKQLAQEAKKLDAKTPSQRNKWQQQELIAELRRRQAKEHRPVYEGKDGTIEDIITGLHCQPMVVRHQARSAAPPSGPPRAPGPH

SEQ ID NO: 6886 - protein, 650 aa, Homo sapiens
MMGIGKNTTSKSMEAGSSTEGKYEDEAKHPAFFTLPVVINGGATSSGEQDNEDTELMAIYTTENGIAEKSSLAETLDSTGSLDPQRSDMIYTIEDVPPWYLCIFLGLQHYLTCFSGTIAVPFLLADAMCVGYDQWATSQLIGTIFFCVGITTLLQTTFGCRLPLFQASAFAFLAPARAILSLDKWKCNTTDVSVANGTAELLHTEHIWYPRIREIQGAIIMSSLIEVVIGLLGLPGALLKYIGPLTITPTVALIGLSGFQAAGERAGKHWGIAMLTIFLVLLFSQYARNVKFPLPIYKSKKGWTAYKLQLFKMFPIILAILVSWLLCFIFTVTDVFPPDSTKYGFYARTDARQGVLLVAPWFKVPYPFQWGLPTVSAAGVIGMLSAVVASIIESIGDYYACARLSCAPPPPIHAINRGIFVEGLSCVLDGIFGTGNGSTSSSPNIGVLGITKVGSRRVIQCGAALMLALGMIGKFSALFASLPDPVLGALFCTLFGMITAVGLSNLQFIDLNSSRNLFVLGFSIFFGLVLPSYLRQNPLVTGITGIDQVLNVLLTTAMFVGGCVAFILDNTIPGTPEERGIRKWKKGVGKGNKSLDGMESYNLPFGMNIIKKYRCFSYLPISPTFVGYTWKGLRKSDNSRSSDEDSQATG

SEQ ID NO: 6887 - protein, 2269 aa, Homo sapiens
MAEPSSARRPVPLIESELYFLIARYLSAGPCRRAAQVLVQELEQYQLLPKRLDWEGNEHNRSYEELVLSNKHVAPDHLLQICQRIGPMLDKEIPPSISRVTSLLGAGRQSLLRTAKDCRHTVWKGSAFAALHRGRPPEMPVNYGSPPNLVEIHRGKQLTGCSTFSTAFPGTMYQHIKMHRRILGHLSAVYCVAFDRTGHRIFTGSDDCLVKIWSTHNGRLLSTLRGHSAEISDMAVNYENTMIAAGSCDKIIRVWCLRTCAPVAVLQGHTGSITSLQFSPMAKGSQRYMVSTGADGTVCFWQWDLESLKFSPRPLKFTEKPRPGVQMLCSSFSVGGMFLATGSTDHVIRMYFLGFEAPEKIAELESHTDKVDSIQFCNNGDRFLSGSRDGTARIWRFEQLEWRSILLDMATRISGDLSSEEERFMKPKVTMIAWNQNDSIVVTAVNDHVLKVWNSYTGQLLHNLMGHADEVFVLETHPFDSRIMLSAGHDGSIFIWDITKGTKMKHYFNMIEGQGHGAVFDCKFSQDGQHFACTDSHGHLLIFGFGCSKPYEKIPDQMFFHTDYRPLIRDSNNYVLDEQTQQAPHLMPPPFLVDVDGNPHPTKYQRLVPGRENSADEHLIPQLGYVATSDGEVIEQIISLQTNDNDERSPESSILDGMIRQLQQQQDQRMGADQDTIPRGLSNGEETPRRGFRRLSLDIQSPPNIGLRRSGQVEGVRQMHQNAPRSQIATERDLQAWKRRVVVPEVPLGIFRKLEDFRLEKGEEERNLYIIGRKRKTLQLSHKSDSVVLVSQSRQRTCRRKYPNYGRRNRSWRELSSGNESSSSVRHETSCDQSEGSGSSEEDEWRSDRKSESYSESSSDSSSRYSDWTADAGINLQPPLRTSCRRRITRFCSSSEDEISTENLSPPKRRRKRKKENKPKKENLRRMTPAELANMEHLYEFHPPVWITDTTLRKSPFVPQMGDEVIYFRQGHEAYIEAVRRNNIYELNPNKEPWRKMDLRDQELVKIVGIRYEVGPPTLCCLKLAFIDPATGKLMDKSFSIRYHDMPDVIDFLVLRQFYDEARQRNWQSCDRFRSIIDDAWWFGTVLSQEPYQPQYPDSHFQCYIVRWDNTEIEKLSPWDMEPIPDNVDPPEELGASISVTTDELEKLLYKPQAGEWGQKSRDEECDRIISGIDQLLNLDIAAAFAGPVDLCTYPKYCTVVAYPTDLYTIRMRLVNRFYRRLSALVWEVRYIEHNARTFNEPESVIARSAKKITDQLLKFIKNQHCTNISELSNTSENDEQNAEDLDDSDLPKTSSGRRRVHDGKKSIRATNYVESNWKKQCKELVNLIFQCEDSEPFRQPVDLVEYPDYRDIIDTPMDFGTVRETLDAGNYDSPLEFCKDIRLIFSNAKAYTPNKRSKIYSMTLRLSALFEEKMKKISSDFKIGQKFNEKLRRSQRFKQRQNCKGDSQPNKSIRNLKPKRLKSQTKIIPELVGSPTQSTSSRTAYLGTHKTSAGISSGVTSGDSSDSAESSERRKRNRPITNGSTLSESEVEDSLATSLSSSASSSSEESKESSRARESSSRSGLSRSSNLRVTRTRAAQRKTGPVSLANGCGRKATRKRVYLSDSDNNSLETGEILKARAGNNRKVLRKCAAVAANKIKLMSDVEENSSSESVCSGRKLPHRNASAVARKKLLHNSEDEQSLKSEIEEEELKDENQLLPVSSSHTAQSNVDESENRDSESESDLRVARKNWHANGYKSHTPAPSKTKFLKIESSEEDSKSHDSDHACNRTAGPSTSVQKLKAESISEEADSEPGRSGGRKYNTFHKNASFFKKTKILSDSEDSESEEQDREDGKCHKMEMNPISGNLNCDPIAMSQCSSDHGCETDLDSDDDKIEKPNNFMKDSASQDNGLSRKISRKRVCSSDSDSSLQVVKKSSKARTGLLRITRRCAATAANKIKLMSDVEDVSLENVHTRSKNGRKKPLHLACTTAKKKLSDCEGSVHCEVPSEQYACEGKPPDPDSEGSTKVLSQALNGDSDSEDMLNSEHKHRHTNIHKIDAPSKRKSSSVTSSGEDSKSHIPGSETDRTFSSESTLAQKATAENNFEVELNYGLRRWNGRRLRTYGKAPFSKTKVIHDSQETAEKEVKRKRSHPELENVKISETTGNSKFRPDTSSKSSDLGSVTESDIDCTDNTKTKRRKTKGKAKVVRKGKTFTANISKTVRRQRQSKRPRLSVDDNDWEDLDYAKSKRVLRRSKIKTRNQGRRTVRYHDGDDDRSLENVLDFNGCTL

SEQ ID NO: 6888 - protein, 92 aa, Homo sapiens
MTKLAQWLWGLAILGSTWVALTTGALGLELPLSCQEVLWPLPAYLLVSAGCYALGTVGYRVATFHDCEDAARELQSQIQEARADLARRGLRF

SEQ ID NO: 6889 - protein, 344 aa, Homo sapiens
MVSVNSSHCFYNDSFKYTLYGCMFSMVFVLGLISNCVAIYIFICVLKVRNETTTYMINLAMSDLLFVFTLPFRIFYFTTRNWPFGDLLCKISVMLFYTNMYGSILFLTCISVDRFLAIVYPFKSKTLRTKRNAKIVCTGVWLTVIGGSAPAVFVQSTHSQGNNASEACFENFPEATWKTYLSRIVIFIEIVGFFIPLILNVTCSSMVLKTLTKPVTLSRSKINKTKVLKMIFVHLIIFCFCFVPYNINLILYSLVRTQTFVNCSVVAAVRTMYPITLCIAVSNCCFDPIVYYFTSDTIQNSIKMKNWSVRRSDFRFSEVHGAENFIQHNLQTLKSKIFDNESAA

SEQ ID NO: 6890 - protein, 209 aa, Homo sapiens
MSSTLPALLCVGLCLSQRISAQQQMYDTPTLSVHPGPEVISGEKVTFYCRLDTATSMFLLLKEGRSSHVQRGYGKVQAEFPLGPVTTAHRGTYRCFGSYNNHAWSFPSEPVKLLVTGDIENTSLAPEDPTFPADTWGTYLLTTETGLQKDHALWDHTAQNLLRMGLAFLVLVALVWFLVEDWLSRKRTRERASRASTWEGRRRLNTQTL

SEQ ID NO: 6891 - protein, 399 aa, Homo sapiens
MGSSRCGPGAHPVHLWPPHFAFSGHHPRDLGPHSGPALLVSLASEVQDLHLAQRKEMASGFSKGPTLGLLPDVPSLMETLSYSYCYVGIMTGPFFRYRTYLDWLEQPFPGAVPSLRPLLRRAWPAPLFGLLFLLSSHLFPLEAVREDAFYARPLPARLFYMIPVFFAFRMRFYVAWIAAECGCIAAGFGAYPVAAKARAGGGPTLQCPPPSSPEKAASLEYDYETIRNIDCYSTDFCVRVRDGMRYWNMTVQWWLAQYIYKSAPARSYVLRSAWTMLLSAYWHGLHPGYYLSFLTIPLCLAAEGRLESALRGRLSPGGQKAWDWVHWFLKMRAYDYMCMGFVLLSLADTLRYWASIYFCIHFLALAALGLGLALGGGSPSRRKAASQPTSLAPEKLREE

SEQ ID NO: 6892 - protein, 1784 aa, Homo sapiens
MAKPTSKDSGLKEKFKILLGLGTPRPNPRSAEGKQTEFIITAEILRELSMECGLNNRIRMIGQICEVAKTKKFEEHAVEALWKAVADLLQPERPLEARHAVLALLKAIVQGQGERLGVLRALFFKVIKDYPSNEDLHERLEVFKALTDNGRHITYLEEELADFVLQWMDVGLSSEFLLVLVNLVKFNSCYLDEYIARMVQMICLLCVRTASSVDIEVSLQVLDAVVCYNCLPAESLPLFIVTLCRTINVKELCEPCWKLMRNLLGTHLGHSAIYNMCHLMEDRAYMEDAPLLRGAVFFVGMALWGAHRLYSLRNSPTSVLPSFYQAMACPNEVVSYEIVLSITRLIKKYRKELQVVAWDILLNIIERLLQQLQTLDSPELRTIVHDLLTTVEELCDQNEFHGSQERYFELVERCADQRPESSLLNLISYRAQSIHPAKDGWIQNLQALMERFFRSESRGAVRIKVLDVLSFVLLINRQFYEEELINSVVISQLSHIPEDKDHQVRKLATQLLVDLAEGCHTHHFNSLLDIIEKVMARSLSPPPELEERDVAAYSASLEDVKTAVLGLLVILQTKLYTLPASHATRVYEMLVSHIQLHYKHSYTLPIASSIRLQAFDFLLLLRADSLHRLGLPNKDGVVRFSPYCVCDYMEPERGSEKKTSGPLSPPTGPPGPAPAGPAVRLGSVPYSLLFRVLLQCLKQESDWKVLKLVLGRLPESLRYKVLIFTSPCSVDQLCSALCSMLSGPKTLERLRGAPEGFSRTDLHLAVVPVLTALISYHNYLDKTKQREMVYCLEQGLIHRCASQCVVALSICSVEMPDIIIKALPVLVVKLTHISATASMAVPLLEFLSTLARLPHLYRNFAAEQYASVFAISLPYTNPSKFNQYIVCLAHHVIAMWFIRCRLPFRKDFVPFITKGLRSNVLLSFDDTPEKDSFRARSTSLNERPKSLRIARPPKQGLNNSPPVKEFKESSAAEAFRCRSISVSEHVVRSRIQTSLTSASLGSADENSVAQADDSLKNLHLELTETCLDMMARYVFSNFTAVPKRSPVGEFLLAGGRTKTWLVGNKLVTVTTSVGTGTRSLLGLDSGELQSGPESSSSPGVHVRQTKEAPAKLESQAGQQVSRGARDRVRSMSGGHGLRVGALDVPASQFLGSATSPGPRTAPAAKPEKASAGTRVPVQEKTNLAAYVPLLTQGWAEILVRRPTGNTSWLMSLENPLSPFSSDINNMPLQELSNALMAAERFKEHRDTALYKSLSVPAASTAKPPPLPRSNTDSAVVMEEGSPGEVPVLVEPPGLEDVEAALGMDRRTDAYSRSSSVSSQEEKSLHAEELVGRGIPIERVVSSEGGRPSVDLSFQPSQPLSKSSSSPELQTLQDILGDPGDKADVGRLSPEVKARSQSGTLDGESAAWSASGEDSRGQPEGPLPSSSPRSPSGLRPRGYTISDSAPSRRGKRVERDALKSRATASNAEKVPGINPSFVFLQLYHSPFFGDESNKPILLPNESQSFERSVQLLDQIPSYDTHKIAVLYVGEGQSNSELAILSNEHGSYRYTEFLTGLGRLIELKDCQPDKVYLGGLDVCGEDGQFTYCWHDDIMQAVFHIATLMPTKDVDKHRCDKKRHLGNDFVSIVYNDSGEDFKLGTIKGQFNFVHVIVTPLDYECNLVSLQCRKDMEGLVDTSVAKIVSDRNLPFVARQMALHANMASQVHHSRSNPTDIYPSKWIARLRHIKRLRQRICEEAAYSNPSLPLVHPPSHSKAPAQTPAEPTPGYEVGQRKRLISSVEDFTEFV

SEQ ID NO: 6893 - protein, 198 aa, Homo sapiens
MGKQKKTRKYATMKRMLSLRDQRLKEKDRLKPKKKEKKDPSALKEREVPQHPSCLFFQYNTQLGPPYHILVDTNFINFSIKAKLDLVQSMMDCLYAKCIPCITDCVMAEIEKLGQKYRVALRIAKDPRFERLPCTHKGTYADDCLVQRVTQHKCYIVATVDRDLKRRIRKIPGVPIMYISNHRYNIERMPDDYGAPRF

SEQ ID NO: 6894 - protein, 852 aa, Homo sapiens
MLGPAVLGLSLWALLHPGTGAPLCLSQQLRMKGDYVLGGLFPLGEAEEAGLRSRTRPSSPVCTRFSSNGLLWALAMKMAVEEINNKSDLLPGLRLGYDLFDTCSEPVVAMKPSLMFLAKAGSRDIAAYCNYTQYQPRVLAVIGPHSSELAMVTGKFFSFFLMPQVSYGASMELLSARETFPSFFRTVPSDRVQLTAAAELLQEFGWNWVAALGSDDEYGRQGLSIFSALAAARGICIAHEGLVPLPRADDSRLGKVQDVLHQVNQSSVQVVLLFASVHAAHALFNYSISSRLSPKVWVASEAWLTSDLVMGLPGMAQMGTVLGFLQRGAQLHEFPQYVKTHLALATDPAFCSALGEREQGLEEDVVGQRCPQCDCITLQNVSAGLNHHQTFSVYAAVYSVAQALHNTLQCNASGCPAQDPVKPWQLLENMYNLTFHVGGLPLRFDSSGNVDMEYDLKLWVWQGSVPRLHDVGRFNGSLRTERLKIRWHTSDNQKPVSRCSRQCQEGQVRRVKGFHSCCYDCVDCEAGSYRQNPDDIACTFCGQDEWSPERSTRCFRRRSRFLAWGEPAVLLLLLLLSLALGLVLAALGLFVHHRDSPLVQASGGPLACFGLVCLGLVCLSVLLFPGQPSPARCLAQQPLSHLPLTGCLSTLFLQAAEIFVESELPLSWADRLSGCLRGPWAWLVVLLAMLVEVALCTWYLVAFPPEVVTDWHMLPTEALVHCRTRSWVSFGLAHATNATLAFLCFLGTFLVRSQPGCYNRARGLTFAMLAYFITWVSFVPLLANVQVVLRPAVQMGALLLCVLGILAAFHLPRCYLLMRQPGLNTPEFFLGGGPGDAQGQNDGNTGNQGKHE

SEQ ID NO: 6895 - protein, 303 aa, Homo sapiens
MCHGRIAPKSTSVFAVASVGHGVFLPLVILCTLLGDGLASVCPLPPEPENGGYICHPRPCRDPLTAGSVIEYLCAEGYMLKGDYKYLTCKNGEWKPAMEISCRLNEDKDTHTSLGVPTLSIVASTASSVALILLLVVLFVLLQPKLKSFHHSRRDQGVSGDQVSIMVDGVQVALPSYEEAVYGSSGHCVPPADPRVQIVLSEGSGPSGRSVPREQQLPDQGACSSAGGEDEAPGQSGLCEAWGSRASETVMVHQATTSSWVAGSGNRQLAHKETADSENSDIQSLLSLTSEEYTDDIPLLKEA

SEQ ID NO: 6896 - protein, 781 aa, Homo sapiens
MATQADLMELDMAMEPDRKAAVSHWQQQSYLDSGIHSGATTTAPSLSGKGNPEEEDVDTSQVLYEWEQGFSQSFTQEQVADIDGQYAMTRAQRVRAAMFPETLDEGMQIPSTQFDAAHPTNVQRLAEPSQMLKHAVVNLINYQDDAELATRAIPELTKLLNDEDQVVVNKAAVMVHQLSKKEASRHAIMRSPQMVSAIVRTMQNTNDVETARCTAGTLHNLSHHREGLLAIFKSGGIPALVKMLGSPVDSVLFYAITTLHNLLLHQEGAKMAVRLAGGLQKMVALLNKTNVKFLAITTDCLQILAYGNQESKLIILASGGPQALVNIMRTYTYEKLLWTTSRVLKVLSVCSSNKPAIVEAGGMQALGLHLTDPSQRLVQNCLWTLRNLSDAATKQEGMEGLLGTLVQLLGSDDINVVTCAAGILSNLTCNNYKNKMMVCQVGGIEALVRTVLRAGDREDITEPAICALRHLTSRHQEAEMAQNAVRLHYGLPVVVKLLHPPSHWPLIKATVGLIRNLALCPANHAPLREQGAIPRLVQLLVRAHQDTQRRTSMGGTQQQFVEGVRMEEIVEGCTGALHILARDVHNRIVIRGLNTIPLFVQLLYSPIENIQRVAAGVLCELAQDKEAAEAIEAEGATAPLTELLHSRNEGVATYAAAVLFRMSEDKPQDYKKRLSVELTSSLFRTEPMAWNETADLGLDIGAQGEPLGYRQDDPSYRSFHSGGYGQDALGMDPMMEHEMGGHHPGADYPVDGLPDLGHAQDLMDGLPPGDSNQLAWFDTDL

SEQ ID NO: 6897 - protein, 422 aa, Homo sapiens
MAGCVPLLQGLVLVLALHRVEPSATSLKERHGLHSDSACTGVQESLFLPASKANDVLVRWKRAGSYLLEELFEGNLEKECYEEICVYEEAREVFENEVVTDEFWRRYKGGSPCISQPCLHNGSCQDSIWGYTCTCSPGYEGSNCELAKNECHPERTDGCQHFCLPGQESYTCSCAQGYRLGEDHKQCVPHDQCACGVLTSEKRAPDLQDLPWQVKLTNSEGKDFCGGVIIRENFVLTTAKCSLLHRNITVKTYFNRTSQDPLMIKITHVHVHMRYDADAGENDLSLLELEWPIQCPGAGLPVCTPEKDFAEHLLIPRTRGLLSGWARNGTDLGNSLTTRPVTLVEGEECGQVLNVTVTTRTYCERSSVAAMHWMDGSVVTREHRGSWFLTGVLGSQPVGGQAHMVLVTKVSRYSLWFKQIMN

SEQ ID NO: 6898 - protein, 442 aa, Homo sapiens
MKPGPPHRAGAAHGAGAGAGAAAGPGARGLLLPPLLLLLLAGRAAGAQRWRSENFERPVDLEGSGDDDSFPDDELDDLYSGSGSGYFEQESGIETAMRFSPDVALAVSTTPAVLPTTNIQPVGTPFEELPSERPTLEPATSPLVVTEVPEEPSQRATTVSTTMATTAATSTGDPTVATVPATVATATPSTPAAPPFTATTAVIRTTGVRRLLPLPLTTVATARATTPEAPSPPTTAAVLDTEAPTPRLVSTATSRPRALPRPATTQEPDIPERSTLPLGTTAPGPTEVAQTPTPETFLTTIRDEPEVPVSGGPSGDFELPEEETTQPDTANEVVAVGGAAAKASSPPGTLPKGARPGPGLLDNAIDSGSSAAQLPQKSILERKEVLVAVIVGGVVGALFAAFLVTLLIYRMKKKDEGSYTLEEPKQASVTYQKPDKQEEFYA

SEQ ID NO: 6899 - protein, 666 aa, Homo sapiens
MEGVSALLARCPTAGLAGGLGVTACAAAGVLLYRIARRMKPTHTMVNCWFCNQDTLVPYGNRNCWDCPHCEQYNGFQENGDYNKPIPAQYLEHLNHVVSSAPSLRDPSQPQQWVSSQVLLCKRCNHHQTTKIKQLAAFAPREEGRYDEEVEVYRHHLEQMYKLCRPCQAAVEYYIKHQNRQLRALLLSHQFKRREADQTHAQNFSSAVKSPVQVILLRALAFLACAFLLTTALYGASGHFAPGTTVPLALPPGGNGSATPDNGTTPGAEGWRQLLGLLPEHMAEKLCEAWAFGQSHQTGVVALGLLTCLLAMLLAGRIRLRRIDAFCTCLWALLLGLHLAEQHLQAASPSWLDTLKFSTTSLCCLVGFTAAVATRKATGPRRFRPRRFFPGDSAGLFPTSPSLAIPHPSVGGSPASLFIPSPPSFLPLANQQLFRSPRRTSPSSLPGRLSRALSLGTIPSLTRADSGYLFSGSRPPSQVSRSGEFPVSDYFSLLSGSCPSSPLPSPAPSVAGSVASSSGSLRHRRPLISPARLNLKGQKLLLFPSPPGEAPTTPSSSDEHSPHNGSLFTMEPPHVPRKPPLQDVKHALDLRSKLERGSACSNRSIKKEDDSSQSSTCVVDTTTRGCSEEAATWRGRFGPSLVRGLLAVSLAANALFTSVFLYQSLR

SEQ ID NO: 6900 - protein, 194 aa, Homo sapiens
MTENSTSAPAAKPKRAKASKKSTDHPKYSDMIVAAIQAEKNRAGSSRQSIQKYIKSHYKVGENADSQIKLSIKRLVTTGVLKQTKGVGASGSFRLAKSDEPKKSVAFKKTKKEIKKVATPKKASKPKKAASKAPTKKPKATPVKKAKKKLAATPKKAKKPKTVKAKPVKASKPKKAKPVKPKAKSSAKRAGKKK

SEQ ID NO: 6901 - protein, 677 aa, Homo sapiens
MAEEKKLKLSNTVLPSESMKVVAESMGIAQIQEETCQLLTDEVSYRIKEIAQDALKFMHMGKRQKLTTSDIDYALKLKNVEPLYGFHAQEFIPFRFASGGGRELYFYEEKEVDLSDIINTPLPRVPLDVCLKAHWLSIEGCQPAIPENPPPAPKEQQKAEATEPLKSAKPGQEEDGPLKGKGQGATTADGKGKEKKAPPLLEGAPLRLKPRSIHELSVEQQLYYKEITEACVGSCEAKRAEALQSIATDPGLYQMLPRFSTFISEGVRVNVVQNNLALLIYLMRMVKALMDNPTLYLEKYVHELIPAVMTCIVSRQLCLRPDVDNHWALRDFAARLVAQICKHFSTTTNNIQSRITKTFTKSWVDEKTPWTTRYGSIAGLAELGHDVIKTLILPRLQQEGERIRSVLDGPVLSNIDRIGADHVQSLLLKHCAPVLAKLRPPPDNQDAYRAEFGSLGPLLCSQVVKARAQAALQAQQVNRTTLTITQPRPTLTLSQAPQPGPRTPGLLKVPGSIALPVQTLVSARAAAPPQPSPPPTKFIVMSSSSSAPSTQQVLSLSTSAPGSGSTTTSPVTTTVPSVQPIVKLVSTATTAPPSTAPSGPGSVQKYIVVSLPPTGEGKGGPTSHPSPVPPPASSPSPLSGSALCGGKQEAGDSPPPAPGTPKANGSQPNSGSPQPAP

SEQ ID NO: 6902 - protein, 95 aa, Homo sapiens
MKGSRALLLVALTLFCICRMATGEDNDEFFMDFLQTLLVGTPEELYEGTLGKYNVNEDAKAAMTELKSCIDGLQPMHKAELVKLLVQVLGSQDGA

SEQ ID NO: 6903 - protein, 111 aa, Homo sapiens
MSDAAVDTSSEITTKDLKEKKEVVEEAENGRDAPANGNAENEENGEQEADNEVDEEEEEGGEEEEEEEEGDGEEEDGDEDEEAESATGKRAAEDDEDDDVDTKKQKTDEDD

SEQ ID NO: 6904 - protein, 79 aa, Homo sapiens
MNGFGRLEHFSGAVYEGQFKDNMFHGLGTYTFPNGAKYTGNFNENRVEGEGEYTDIQGLEWSGNFHFTAAPDLKLKLHM

SEQ ID NO: 6905 - protein, 256 aa, Homo sapiens
MKLTRKMVLTRAKASELHSVRKLNCWGSRLTDISICQEMPSLEVITLSVNSISTLEPVSRCQRLSELYLRRNRIPSLAELFYLKGLPRLRVLWLAENPCCGTSPHRYRMTVLRTLPRLQKLDNQAVTEEELSRALSEGEEITAAPEREGTGHGGPKLCCTLSSLSSAAETGRDPLDSEEEATSGAQDERGLKPPSRGQFPSLSARDASSSHRGRNVLTAILLLLRELDAEGLEAVQQTVGSRLQALRGEEVQEHAE

SEQ ID NO: 6906 - protein, 1006 aa, Homo sapiens
MHYDGHVRFDLPPQGSVLARNVSTRSCPPRTSPAVDLEEEEEESSVDGKGDRKSTGLKLSKKKARRRHTDDPSKECFTLKFDLNVDIETEIVPAMKKKSLGEVLLPVFERKGIALGKVDIYLDQSNTPLSLTFEAYRFGGHYLRVKAPAKPGDEGKVEQGMKDSKSLSLPILRPAGTGPPALERVDAQSRRESLDILAPGRRRKNMSEFLGEASIPGQEPPTPSSCSLPSGSSGSTNTGDSWKNRAASRFSGFFSSGPSTSAFGREVDKMEQLEGKLHTYSLFGLPRLPRGLRFDHDSWEEEYDEDEDEDNACLRLEDSWRELIDGHEKLTRRQCHQQEAVWELLHTEASYIRKLRVIINLFLCCLLNLQESGLLCEVEAERLFSNIPEIAQLHRRLWASVMAPVLEKARRTRALLQPGDFLKGFKMFGSLFKPYIRYCMEEEGCMEYMRGLLRDNDLFRAYITWAEKHPQCQRLKLSDMLAKPHQRLTKYPLLLKSVLRKTEEPRAKEAVVAMIGSVERFIHHVNACMRQRQERQRLAAVVSRIDAYEVVESSSDEVDKLLKEFLHLDLTAPIPGASPEETRQLLLEGSLRMKEGKDSKMDVYCFLFTDLLLVTKAVKKAERTRVIRPPLLVDKIVCRELRDPGSFLLIYLNEFHSAVGAYTFQASGQALCRGWVDTIYNAQNQLQQLRAQEPPGSQQPLQSLEEEEDEQEEEEEEEEEEEEGEDSGTSAASSPTIMRKSSGSPDSQHCASDGSTETLAMVVVEPGDTLSSPEFDSGPFSSQSDETSLSTTASSATPTSELLPLGPVDGRSCSMDSAYGTLSPTSLQDFVAPGPMAELVPRAPESPRVPSPPPSPRLRRRTPVQLLSCPPHLLKSKSEASLLQLLAGAGTHGTPSAPSRSLSELCLAVPAPGIRTQGSPQEAGPSWDCRGAPSPGSGPGLVGCLAGEPAGSHRKRCGDLPSGASPRVQPEPPPGVSAQHRKLTLAQLYRIRTTLLLNSTLTASEV

SEQ ID NO: 6907 - protein, 364 aa, Homo sapiens
MTSELDIFVGNTTLIDEDVYRLWLDGYSVTDAVALRVRSGILEQTGATAAVLQSDTMDHYRTFHMLERLLHAPPKLLHQLIFQIPPSRQALLIERYYAFDEAFVREVLGKKLSKGTKKDLDDISTKTGITLKSCRRQFDNFKRVFKVVEEMRGSLVDNIQQHFLLSDRLARDYAAIVFFANNRFETGKKKLQYLSFGDFAFCAELMIQNWTLGAVGEAPTDPDSQMDDMDMDLDKEFLQDLKELKVLVADKDLLDLHKSLVCTALRGKLGVFSEMEANFKNLSRGLVNVAAKLTHNKDVRDLFVDLVEKFVEPCRSDHWPLSDVRFFLNQYSASVHSLDGFRHQALWDRYMGTLRGCLLRLYHD

SEQ ID NO: 6908 - protein, 295 aa, Homo sapiens
MIEVLTTTDSQKLLHQLNALLEQESRCQPKVCGLRLIESAHDNGLRMTARLRDFEVKDLLSLTQFFGFDTETFSLAVNLLDRFLSKMKVQPKHLGCVGLSCFYLAVKSIEEERNVPLATDLIRISQYRFTVSDLMRMEKIVLEKVCWKVKATTAFQFLQLYYSLLQENLPLERRNSINFERLEAQLKACHCRIIFSKAKPSVLALSIIALEIQAQKCVELTEGIECLQKHSKINGRDLTFWQELVSKCLTEYSSNKCSKPNVQKLKWIVSGRTARQLKHSYYRITHLPTIPEMVP

SEQ ID NO: 6909 - protein, 701 aa, Homo sapiens
MVVSTFTDMDTFPNNFPPGGDSGLTGSQSEFQKMLIDERLRCEHHKANYQTLKAEHTRLQNEHVKLQNELKHLFNEKQTQQEKLQLLLEELRGELVEKTKDLEEMKLQILTPQKLELLRAQIQQELETPMRERFRNLDEEVEKYRAVYNKLRYEHTFLKSEFEHQKEEYARILDEGKIKYESEIARLEEDKEELRNQLLNVDLTKDSKRVEQLAREKVYLCQKLKGLEAEVAELKAEKENSEAQVENAQRIQVRQLAEMQATVRSLEAEKQSANLRAERLEKELQSSSEQNTFLINKLHKAEREINTLSSKVKELKHSNKLEITDIKLETARAKSELERERNKIQSELDGLQSDNEILKAAVEHHKVLLVEKDRELIRKVQAAKEEGYQKLVVLQDEKLELENRLADLEKMKVEHDVWRQSEKDQYEEKLRASQMAEEITRKELQSVRLKLQQQIVTIENAEKEKNENSDLKQQISSLQIQVTSLAQSENDLLNSNQMLKEMVERLKQECRNFRSQAEKAQLEAEKTLEEKQIQWLEEKHKLHERITDREEKYNQAKEKLQRAAIAQKKRKSLHENKLKRLQEKVEVLEAKKEELETENQVLNRQNVPFEDYTRLQKRLKDIQRRHNEFRSLILVPNMPPTASINPVSFQSSAMVPSMELPFPPHMQEEQHQRELSLLRKRLEELETTQRKQLEELGSSGE

SEQ ID NO: 6910 - protein, 595 aa, Homo sapiens
MAGAIASRMSFSSLKRKQPKTFTVRIVTMDAEMEFNCEMKWKGKDLFDLVCRTLGLRETWFFGLQYTIKDTVAWLKMDKKVLDHDVSKEEPVTFHFLAKFYPENAEEELVQEITQHLFFLQVKKQILDEKIYCPPEASVLLASYAVQAKYGDYDPSVHKRGFLAQEELLPKRVINLYQMTPEMWEERITAWYAEHRGRARDEAEMEYLKIAQDLEMYGVNYFAIRNKKGTELLLGVDALGLHIYDPENRLTPKISFPWNEIRNISYSDKEFTIKPLDKKIDVFKFNSSKLRVNKLILQLCIGNHDLFMRRRKADSLEVQQMKAQAREEKARKQMERQRLAREKQMREEAERTRDELERRLLQMKEEATMANEALMRSEETADLLAEKAQITEEEAKLLAQKAAEAEQEMQRIKATAIRTEEEKRLMEQKVLEAEVLALKMAEESERRAKEADQLKQDLQEAREAERRAKQKLLEIATKPTYPPMNPIPAPLPPDIPSFNLIGDSLSFDFKDTDMKRLSMEIEKEKVEYMEKSKHLQEQLNELKTEIEALKLKERETALDILHNENSDRGGSSKHNTIKKLTLQSAKSRVAFFEEL

SEQ ID NO: 6911 - protein, 736 aa, Homo sapiens
MGNPENIEDAYVAVIRPKNTASLNSREYRAKSYEILLHEVPIEGQKKKRKKVLLETKLQGNSEITQGILDYVVETTKPISPANQGIRGKRVVLMKKFPLDGEKMGREASLFIVPSVVKDNTKYTYTPGCPIFYCLQDIMRVCSESSTHFATLTARMLIALDKWLDERHAQSHFIPALFRPSPLERIKTNVINPAYATESGQTENSLHMGYSALEIKSKMLALEKADTCIYNPLFGSDLQYTNRVDKVVINPYFGLGAPDYSKIQIPKQEKWQRSMSSVTEDKERQWVDDFPLHRSACEGDSELLSRLLSERFSVNQLDSDHWAPIHYACWYGKVEATRILLEKGKCNPNLLNGQLSSPLHFAAGGGHAEIVQILLNHPETDRHITDQQGRSPLNICEENKQNNWEEAAKLLKEAINKPYEKVRIYRMDGSYRSVELKHGNNTTVQQIMEGMRLSQETQQYFTIWICSENLSLQLKPYHKPLQHVRDWPEILAELTNLDPQRETPQLFLRRDVRLPLEVEKQIEDPLAILILFDEARYNLLKGFYTAPDAKLITLASLLLQIVYGNYESKKHKQGFLNEENLKSIVPVTKLKSKAPHWTNRILHEYKNLSTSEGVSKEMHHLQRMFLQNCWEIPTYGAAFFTGQIFTKASPSNHKVIPVYVGVNIKGLHLLNMETKALLISLKYGCFMWQLGDTDTCFQIHSMENKMSFIVHTKQAGLVVKLLMKLNGQLMPTERNS

SEQ ID NO: 6912 - protein, 1606 aa, Homo sapiens
MVVFINAKIKSLIKLFKKKTVSNLDEESRWTVHYTAPWHQQENVFLPTTRPPCVEDLHRQAKLNLKSVLRECDKLRHDGYRSSQYYSQGPTFAANASPFCDDYQDEDEETDQKCSLSSSEEERFISIRRPKTPASSDFSDLNTQTNWTKSLPLPTPEEKMRQQAQTVQADVVPINITGENFDRQASLRRSLIYTDTLVRRPKKVKRRKTITGVPDNIQKELASGTGQDDADGHSVYTPDHYSTLGRFNSCRSAGQRSETRDSSCQTEDVKVVPPSMRRIRAQKGQGIAAQMGHFSGSSGNMSVLSDSAGIVFPSRLDSDAGFHSLPRSGARANIQSLEPRLGALGPAGDMNGTFLYQRGHPQADENLGHLGGASGTGTLLRPKSQELRHFESENIMSPACVVSPHATYSTSIIPNATLSSSSEVIAIPTAQSAGQRESKSSGSSHARIKSRDHLISRHAVKGDPQSPGRHWNEGHATILSQDLDPHSPGEPALLSLCDSAVPLNAPANRENGSQAMPYNCRNNLAFPAHPQDVDGKSESSYSGGGGHSSSEPWEYKSSGNGRASPLKPHLATPGYSTPTSNMSSCSLDQTSNKEDAGSLYSEDHDGYCASVHTDSGHGSGNLCNSSDGFGNPRHSVINVFVGRAQKNQGDRSNYQDKSLSRNISLKKAKKPPLPPSRTDSLRRIPKKSSQCNGQVLNESLIATLQHSLQLSLPGKSGSSPSQSPCSDLEEPWLPRSRSQSTVSAGSSMTSATTPNVYSLCGATPSQSDTSSVKSEYTDPWGYYIDYTGMQEDPGNPAGGCSTSSGVPTGNGPVRHVQEGSRATMPQVPGGSVKPKIMSPEKSHRVISPSSGYSSQSNTPTALTPVPVFLKSVSPANGKGKPKPKVPERKSSLISSVSISSSSTSLSSSTSTEGSGTMKKLDPAVGSPPAPPPPPVPSPPFPCPADRSPFLPPPPPVTDCSQGSPLPHSPVFPPPPPEALIPFCSPPDWCLSPPRPALSPILPDSPVSLPLPPPLLPSSEPPPAPPLDPKFMKDTRPPFTNSGQPESSRGSLRPPSTKEETSRPPMPLITTEALQMVQLRPVRKNSGAEAAQLSERTAQEQRTPVAPQYHLKPSAFLKSRNSTNEMESESQPASVTSSLPTPAKSSSQGDHGSAAERGGPVSRSPGAPSAGEAEARPSPSTTPLPDSSPSRKPPPISKKPKLFLVVPPPQKDFAVEPAENVSEALRAVPSPTTGEEGSVHSREAKESSAAQAGSHATHPGTSVLEGGAAGSMSPSRVEANVPMVQPDVSPAPKQEEPAENSADTGGDGESCLSQQDGAAGVPETNAAGSSSEACDFLKEDGNDEVMTPSRPRTTEDLFAAIHRSKRKVLGRRDSDDDHSRNHSPSPPVTPTGAAPSLASPKQVGSIQRSIRKSSTSSDNFKALLLKKGSRSDTSARMSAAEMLKNTDPRFQRSRSEPSPDAPESPSSCSPSKNRRAQEEWAKNEGLMPRSLSFSGPRYGRSRTPPSAASSRYSMRNRIQSSPMTVISEGEGEAVEPVDSIARGALGAAEGCSLDGLAREEMDEGGLLCGEGPAASLQPQAPGPVDGTASAEGREPSPQCGGSLSEES

SEQ ID NO: 6913 - protein, 506 aa, Homo sapiens
MEDHQHVPIDIQTSKLLDWLVDRRHCSLKWQSLVLTIREKINAAIQDMPESEEIAQLLSGSYIHYFHCLRILDLLKGTEASTKNIFGRYSSQRMKDWQEIIALYEKDNTYLVELSSLLVRNVNYEIPSLKKQIAKCQQLQQEYSRKEEECQAGAAEMREQFYHSCKQYGITGENVRGELLALVKDLPSQLAEIGAAAQQSLGEAIDVYQASVGFVCESPTEQVLPMLRFVQKRGNSTVYEWRTGTEPSVVERPHLEELPEQVAEDAIDWGDFGVEAVSEGTDSGISAEAAGIDWGIFPESDSKDPGGDGIDWGDDAVALQITVLEAGTQAPEGVARGPDALTLLEYTETRNQFLDELMELEIFLAQRAVELSEEADVLSVSQFQLAPAILQGQTKEKMVTMVSVLEDLIGKLTSLQLQHLFMILASPRYVDRVTEFLQQKLKQSQLLALKKELMVQKQQEALEEQAALEPKLDLLLEKTKELQKLIEADISKRYSGRPVNLMGTSL

SEQ ID NO: 6914 - protein, 506 aa, Homo sapiens
MDVRLYPSAPAVGARPGAEPAGLAHLDYYHGGKFDGDSAYVGMSDGNPELLSTSQTYNGQSENNEDYEIPPITPPNLPEPSLLHLGDHEASYHSLCHGLTPNGLLPAYSYQAMDLPAIMVSNMLAQDSHLLSGQLPTIQEMVHSEVAAYDSGRPGPLLGRPAMLASHMSALSQSQLISQMGIRSSIAHSSPSPPGSKSATPSPSSSTQEEESEVHFKISGEKRPSADPGKKAKNPKKKKKKDPNEPQKPVSAYALFFRDTQAAIKGQNPSATFGDVSKIVASMWDSLGEEQKQAYKRKTEAAKKEYLKALAAYRASLVSKSSPDQGETKSTQANPPAKMLPPKQPMYAMPGLASFLTPSDLQAFRSGASPASLARTLGSKSLLPGLSASPPPPPSFPLSPTLHQQLSLPPHAQGALLSPPVSMSPAPQPPVLPTPMALQVQLAMSPSPPGPQDFPHISEFPSSSGSCSPGPSNPTSSGDWDSSYPSGECGISTCSLLPRDKSLYLT

SEQ ID NO: 6915 - protein, 277 aa, Homo sapiens
MPRLHDHFWSCSCAHSARRRGPPRASAAGLAAKVGEMINVSVSGPSLLAAHGAPDADPAPRGRSAAMSGPEPGSPYPNTWHHRLLQRSLVLFSVGVVLALVLNLLQIQRNVTLFPEEVIATIFSSAWWVPPCCGTAAAVVGLLYPCIDSHLGEPHKFKREWASVMRCIAVFVGINHASAKLDFANNVQLSLTLAALSLGLWWTFDRSRSGLGLGITIAFLATLITQFLVYNGVYQYTSPDFLYIRSWLPCIFFSGGVTVGNIGRQLAMGVPEKPHSD

SEQ ID NO: 6916 - protein, 424 aa, Homo sapiens
MSDHGDVSLPPEDRVRALSQLGSAVEVNEDIPPRRYFRSGVEIIRMASIYSEEGNIEHAFILYNKYITLFIEKLPKHRDYKSAVIPEKKDTVKKLKEIAFPKAEELKAELLKRYTKEYTEYNEEKKKEAEELARNMAIQQELEKEKQRVAQQKQQQLEQEQFHAFEEMIRNQELEKERLKIVQEFGKVDPGLGGPLVPDLEKPSLDVFPTLTVSSIQPSDCHTTVRPAKPPVVDRSLKPGALSNSESIPTIDGLRHVVVPGRLCPQFLQLASANTARGVETCGILCGKLMRNEFTITHVLIPKQSAGSDYCNTENEEELFLIQDQQGLITLGWIHTHPTQTAFLSSVDLHTHCSYQMMLPESVAIVCSPKFQETGFFKLTDHGLEEISSCRQKGFHPHSKDPPLFCSCSHVTVVDRAVTITDLR

SEQ ID NO: 6917 - protein, 699 aa, Homo sapiens
MKIAVLFCFFLLIIFQTDFGKNEEIPRKQRRKIYHRRLRKSSTSHKHRSNRQLGIQQTTVFTPVARLPIVNFDYSMEEKFESFSSFPGVESSYNVLPGKKGHCLVKGITMYNKAVWSPEPCTTCLCSDGRVLCDETMCHPQRCPQTVIPEGECCPVCSATVSYSLLSGIALNDRNEFSGDSSEQREPTNLLHKQLPPPQVGMDRIVRKEALQSEEDEEVKEEDTEQKRETPESRNQGQLYSEGDSRGGDRKQRPGEERRLAHQQQRQGREEEEDEEEEGEEGEEDEEDEEDPVRGDMFRMPSRSPLPAPPRGTLRLPSGCSLSYRTISCINAMLTQIPPLTAPQITSLELTGNSIASIPDEAFNGLPNLERLDLSKNNITSSGIGPKAFKLLKKLMRLNMDGNNLIQIPSQLPSTLEELKVNENNLQAIDEESLSDLNQLVTLELEGNNLSEANVNPLAFKPLKSLAYLRLGKNKFRIIPQGLPGSIEELYLENNQIEEITEICFNHTRKINVIVLRYNKIEENRIAPLAWINQENLESIDLSYNKLYHVPSYLPKSLLHLVLLGNQIERIPGYVFGHMEPGLEYLYLSFNKLADDGMDRVSFYGAYHSLRELFLDHNDLKSIPPGIQEMKALHFLRLNNNKIRNILPEEICNAEEDDDSNLEHLHLENNYIKIREIPSYTFSCIRSYSSIVLKPQNIK

SEQ ID NO: 6918 - protein, 315 aa, Homo sapiens
MQRRSRGINTGLILLLSQIFHVGINNIPPVTLATLALNIWFFLNPQKPLYSSCLSVEKCYQQKDWQRLLLSPLHHADDWHLYFNMASMLWKGINLERRLGSRWFAYVITAFSVLTGVVYLLLQFAVAEFMDEPDFKRSCAVGFSGVLFALKVLNNHYCPGGFVNILGFPVPNRFACWVELVAIHLFSPGTSFAGHLAGILVGLMYTQGPLKKIMEACAGGFSSSVGYPGRQYYFNSSGSSGYQDYYPHGRPDHYEEAPRNYDTYTAGLSEEEQLERALQASLWDRGNTRNSPPPYGFHLSPEEMRRQRLHRFDSQ

SEQ ID NO: 6919 - protein, 1240 aa, Homo sapiens
MARQPPPPWVHAAFLLCLLSLGGAIEIPMDPSIQNELTQPPTITKQSAKDHIVDPRDNILIECEAKGNPAPSFHWTRNSRFFNIAKDPRVSMRRRSGTLVIDFRSGGRPEEYEGEYQCFARNKFGTALSNRIRLQVSKSPLWPKENLDPVVVQEGAPLTLQCNPPPGLPSPVIFWMSSSMEPITQDKRVSQGHNGDLYFSNVMLQDMQTDYSCNARFHFTHTIQQKNPFTLKVLTTRGVAERTPSFMYPQGTASSQMVLRGMDLLLECIASGVPTPDIAWYKKGGDLPSDKAKFENFNKALRITNVSEEDSGEYFCLASNKMGSIRHTISVRVKAAPYWLDEPKNLILAPGEDGRLVCRANGNPKPTVQWMVNGEPLQSAPPNPNREVAGDTIIFRDTQISSRAVYQCNTSNEHGYLLANAFVSVLDVPPRMLSPRNQLIRVILYNRTRLDCPFFGSPIPTLRWFKNGQGSNLDGGNYHVYENGSLEIKMIRKEDQGIYTCVATNILGKAENQVRLEVKDPTRIYRMPEDQVARRGTTVQLECRVKHDPSLKLTVSWLKDDEPLYIGNRMKKEDDSLTIFGVAERDQGSYTCVASTELDQDLAKAYLTVLADQATPTNRLAALPKGRPDRPRDLELTDLAERSVRLTWIPGDANNSPITDYVVQFEEDQFQPGVWHDHSKYPGSVNSAVLRLSPYVNYQFRVIAINEVGSSHPSLPSERYRTSGAPPESNPGDVKGEGTRKNNMEITWTPMNATSAFGPNLRYIVKWRRRETREAWNNVTVWGSRYVVGQTPVYVPYEIRVQAENDFGKGPEPESVIGYSGEDLPSAPRRFRVRQPNLETINLEWDHPEHPNGIMIGYTLKYVAFNGTKVGKQIVENFSPNQTKFTVQRTDPVSRYRFTLSARTQVGSGEAVTEESPAPPNEATPTAAPPTLPPTTVGATGAVSSTDATAIAATTEATTVPIIPTVAPTTIATTTTVATTTTTTAAATTTTESPPTTTSGTKIHESAPDEQSIWNVTVLPNSKWANITWKHNFGPGTDFVVEYIDSNHTKKTVPVKAQAQPIQLTDLYPGMTYTLRVYSRDNEGISSTVITFMTSTAYTNNQADIATQGWFIGLMCAIALLVLILLIVCFIKRSRGGKYPVREKKDVPLGPEDPKEEDGSFDYSDEDNKPLQGSQTSLDGTIKQQESDDSLVDYGEGGEGQFNEDGSFIGQYTVKKDKEETEGNESSEATSPVNAIYSLA

SEQ ID NO: 6920 - protein, 685 aa, Homo sapiens
MQIFVKTLTGKTITLEVEPSDTIENVKAKIQDKEGIPPDQQRLIFAGKQLEDGRTLSDYNIQKESTLHLVLRLRGGMQIFVKTLTGKTITLEVEPSDTIENVKAKIQDKEGIPPDQQRLIFAGKQLEDGRTLSDYNIQKESTLHLVLRLRGGMQIFVKTLTGKTITLEVEPSDTIENVKAKIQDKEGIPPDQQRLIFAGKQLEDGRTLSDYNIQKESTLHLVLRLRGGMQIFVKTLTGKTITLEVEPSDTIENVKAKIQDKEGIPPDQQRLIFAGKQLEDGRTLSDYNIQKESTLHLVLRLRGGMQIFVKTLTGKTITLEVEPSDTIENVKAKIQDKEGIPPDQQRLIFAGKQLEDGRTLSDYNIQKESTLHLVLRLRGGMQIFVKTLTGKTITLEVEPSDTIENVKAKIQDKEGIPPDQQRLIFAGKQLEDGRTLSDYNIQKESTLHLVLRLRGGMQIFVKTLTGKTITLEVEPSDTIENVKAKIQDKEGIPPDQQRLIFAGKQLEDGRTLSDYNIQKESTLHLVLRLRGGMQIFVKTLTGKTITLEVEPSDTIENVKAKIQDKEGIPPDQQRLIFAGKQLEDGRTLSDYNIQKESTLHLVLRLRGGMQIFVKTLTGKTITLEVEPSDTIENVKAKIQDKEGIPPDQQRLIFAGKQLEDGRTLSDYNIQKESTLHLVLRLRGGV

SEQ ID NO: 6921 - protein, 98 aa, Homo sapiens
MAAEPLTELEESIETVVTTFFTFARQEGRKDSLSVNEFKELVTQQLPHLLKDVGSLDEKMKSLDVNQDSELKFNEYWRLIGELAKEIRKKKDLKIRKK

SEQ ID NO: 6922 - protein, 361 aa, Homo sapiens
MAGGRHRRVVGTLHLLLLVAALPWASRGVSPSASAWPEEKNYHQPAILNSSALRQIAEGTSISEMWQNDLQPLLIERYPGSPGSYAARQHIMQRIQRLQADWVLEIDTFLSQTPYGYRSFSNIISTLNPTAKRHLVLACHYDSKYFSHWNNRVFVGATDSAVPCAMMLELARALDKKLLSLKTVSDSKPDLSLQLIFFDGEEAFLHWSPQDSLYGSRHLAAKMASTPHPPGARGTSQLHGMDLLVLLDLIGAPNPTFPNFFPNSARWFERLQAIEHELHELGLLKDHSLEGRYFQNYSYGGVIQDDHIPFLRRGVPVLHLIPSPFPEVWHTMDDNEENLDESTIDNLNKILQVFVLEYLHL

SEQ ID NO: 6923 - protein, 338 aa, Homo sapiens
MDPETRGQEIIKVTPLQQMLASCTGAILTSVIVTPLDVVKIRLQAQNNPLPKGKCFVYSNGLMDHLCVCEEGGNKLWYKKPGNFQGTLDAFFKIIRNEGIKSLWSGLPPTLVMAVPATVIYFTCYDQLSALLRSKLGENETCIPIVAGIVARFGAVTVISPLELIRTKMQSKKFSYVELHRFVSKKVSEDGWISLWRGWAPTVLRDVPFSAMYWYNYEILKKWLCEKSGLYEPTFMINFTSGALSGSFAAVATLPFDVVKTQKQTQLWTYESHKISMPLHMSTWIIMKNIVAKNGFSGLFSGLIPRLIKIAPACAIMISTYEFGKAFFQKQNVRRQQY

SEQ ID NO: 6924 - protein, 474 aa, Homo sapiens
MADMQNLVERLERAVGRLEAVSHTSDMHRGYADSPSKGAAPYVQAFDSLLAGPVAEYLKISKEIGGDVQKHAEMVHTGLKLERALLVTASQCQQPAENKLSDLLAPISEQIKEVITFREKNRGSKLFNHLSAVSESIQALGWVAMAPKPGPYVKEMNDAAMFYTNRVLKEYKDVDKKHVDWVKAYLSIWTELQAYIKEFHTTGLAWSKTGPVAKELSGLPSGPSAGSCPPPPPPCPPPPPVSTISCSYESASRSSLFAQINQGESITHALKHVSDDMKTHKNPALKAQSGPVRSGPKPFSAPKPQTSPSPKRATKKEPAVLELEGKKWRVENQENVSNLVIEDTELKQVAYIYKCVNTTLQIKGKINSITVDNCKKLGLVFDDVVGIVEIINSKDVKVQVMGKVPTISINKTDGCHAYLSKNSLDCEIVSAKSSEMNVLIPTEGGDFNEFPVPEQFKTLWNGQKLVTTVTEIAG

SEQ ID NO: 6925 - protein, 364 aa, Homo sapiens
MHPQVVILSLILHLADSVAGSVKVGGEAGPSVTLPCHYSGAVTSMCWNRGSCSLFTCQNGIVWTNGTHVTYRKDTRYKLLGDLSRRDVSLTIENTAVSDSGVYCCRVEHRGWFNDMKITVSLEIVPPKVTTTPIVTTVPTVTTVRTSTTVPTTTTVPMTTVPTTTVPTTMSIPTTTTVLTTMTVSTTTSVPTTTSIPTTTSVPVTTTVSTFVPPMPLPRQNHEPVATSPSSPQPAETHPTTLQGAIRREPTSSPLYSYTTDGNDTVTESSDGLWNNNQTQLFLEHSLLTANTTKGIYAGVCISVLVLLALLGVIIAKKYFFKKEVQQLSVSFSSLQIKALQNAVEKEVQAEDNIYIENSLYATD

SEQ ID NO: 6926 - protein, 4547 aa, Homo sapiens
MSQHQLRVPQPEGLGRKRTSSEDNLYLAVLRASEGKKDERDRVQKKTFTKWVNKHLIKAQRHISDLYEDLRDGHNLISLLEVLSGDSLPREKGRMRFHKLQNVQIALDYLRHRQVKLVNIRNDDIADGNPKLTLGLIWTIILHFQISDIQVSGQSEDMTAKEKLLLWSQRMVEGYQGLRCDNFTSSWRDGRLFNAIIHRHKPLLIDMNKVYRQTNLENLDQAFSVAERDLGVTRLLDPEDVDVPQPDEKSIITYVSSLYDAMPRVPDVQDGVRANELQLRWQEYRELVLLLLQWMRHHTAAFEERRFPSSFEEIEILWSQFLKFKEMELPAKEADKNRSKGIYQSLEGAVQAGQLKVPPGYHPLDVEKEWGKLHVAILEREKQLRSEFERLECLQRIVTKLQMEAGLCEEQLNQADALLQSDVRLLAAGKVPQRAGEVERDLDKADSMIRLLFNDVQTLKDGRHPQGEQMYRRVYRLHERLVAIRTEYNLRLKAGVAAPATQVAQVTLQSVQRRPELEDSTLRYLQDLLAWVEENQHRVDGAEWGVDLPSVEAQLGSHRGLHQSIEEFRAKIERARSDEGQLSPATRGAYRDCLGRLDLQYAKLLNSSKARLRSLESLHSFVAAATKELMWLNEKEEEEVGFDWSDRNTNMTAKKESYSALMRELELKEKKIKELQNAGDRLLREDHPARPTVESFQAALQTQWSWMLQLCCCIEAHLKENAAYFQFFSDVREAEGQLQKLQEALRRKYSCDRSATVTRLEDLLQDAQDEKEQLNEYKGHLSGLAKRAKAVVQLKPRHPAHPMRGRLPLLAVCDYKQVEVTVHKGDECQLVGPAQPSHWKVLSSSGSEAAVPSVCFLVPPPNQEAQEAVTRLEAQHQALVTLWHQLHVDMKSLLAWQSLRRDVQLIRSWSLATFRTLKPEEQRQALHSLELHYQAFLRDSQDAGGFGPEDRLMAEREYGSCSHHYQQLLQSLEQGAQEESRCQRCISELKDIRLQLEACETRTVHRLRLPLDKEPARECAQRIAEQQKAQAEVEGLGKGVARLSAEAEKVLALPEPSPAAPTLRSELELTLGKLEQVRSLSAIYLEKLKTISLVIRGTQGAEEVLRAHEEQLKEAQAVPATLPELEATKASLKKLRAQAEAQQPTFDALRDELRGAQEVGERLQQRHGERDVEVERWRERVAQLLERWQAVLAQTDVRQRELEQLGRQLRYYRESADPLGAWLQDARRRQEQIQAMPLADSQAVREQLRQEQALLEEIERHGEKVEECQRFAKQYINAIKDYELQLVTYKAQLEPVASPAKKPKVQSGSESVIQEYVDLRTHYSELTTLTSQYIKFISETLRRMEEEERLAEQQRAEERERLAEVEAALEKQRQLAEAHAQAKAQAEREAKELQQRMQEEVVRREEAAVDAQQQKRSIQEELQQLRQSSEAEIQAKARQAEAAERSRLRIEEEIRVVRLQLEATERQRGGAEGELQALRARAEEAEAQKRQAQEEAERLRRQVQDESQRKRQAEVELASRVKAEAEAAREKQRALQALEELRLQAEEAERRLRQAEVERARQVQVALETAQRSAEAELQSKRASFAEKTAQLERSLQEEHVAVAQLREEAERRAQQQAEAERAREEAERELERWQLKANEALRLRLQAEEVAQQKSLAQAEAEKQKEEAEREARRRGKAEEQAVRQRELAEQELEKQRQLAEGTAQQRLAAEQELIRLRAETEQGEQQRQLLEEELARLQREAAAATQKRQELEAELAKVRAEMEVLLASKARAEEESRSTSEKSKQRLEAEAGRFRELAEEAARLRALAEEAKRQRQLAEEDAARQRAEAERVLAEKLAAIGEATRLKTEAEIALKEKEAENERLRRLAEDEAFQRRRLEEQAAQHKADIEERLAQLRKASDSELERQKGLVEDTLRQRRQVEEEILALKASFEKAAAGKAELELELGRIRSNAEDTLRSKEQAELEAARQRQLAAEEERRRREAEERVQKSLAAEEEAARQRKAALEEVERLKAKVEEARRLRERAEQESARQLQLAQEAAQKRLQAEEKAHAFAVQQKEQELQQTLQQEQSVLDQLRGEAEAARRAAEEAEEARVQAEREAAQSRRQVEEAERLKQSAEEQAQARAQAQAAAEKLRKEAEQEAARRAQAEQAALRQKQAADAEMEKHKKFAEQTLRQKAQVEQELTTLRLQLEETDHQKNLLDEELQRLKAEATEAARQRSQVEEELFSVRVQMEELSKLKARIEAENRALILRDKDNTQRFLQEEAEKMKQVAEEAARLSVAAQEAARLRQLAEEDLAQQRALAEKMLKEKMQAVQEATRLKAEAELLQQQKELAQEQARRLQEDKEQMAQQLAEETQGFQRTLEAERQRQLEMSAEAERLKLRVAEMSRAQARAEEDAQRFRKQAEEIGEKLHRTELATQEKVTLVQTLEIQRQQSDHDAERLREAIAELEREKEKLQQEAKLLQLKSEEMQTVQQEQLLQETQALQQSFLSEKDSLLQRERFIEQEKAKLEQLFQDEVAKAQQLREEQQRQQQQMEQERQRLVASMEEARRRQHEAEEGVRRKQEELQQLEQQRRQQEELLAEENQRLREQLQLLEEQHRAALAHSEEVTASQVAATKTLPNGRDALDGPAAEAEPEHSFDGLRRKVSAQRLQEAGILSAEELQRLAQGHTTVDELARREDVRHYLQGRSSIAGLLLKATNEKLSVYAALQRQLLSPGTALILLEAQAASGFLLDPVRNRRLTVNEAVKEGVVGPELHHKLLSAERAVTGYKDPYTGQQISLFQAMQKGLIVREHGIRLLEAQIATGGVIDPVHSHRVPVDVAYRRGYFDEEMNRVLADPSDDTKGFFDPNTHENLTYLQLLERCVEDPETGLCLLPLTDKAAKGGELVYTDSEARDVFEKATVSAPFGKFQGKTVTIWEIINSEYFTAEQRRDLLRQFRTGRITVEKIIKIIITVVEEQEQKGRLCFEGLRSLVPAAELLESRVIDRELYQQLQRGERSVRDVAEVDTVRRALRGANVIAGVWLEEAGQKLSIYNALKKDLLPSDMAVALLEAQAGTGHIIDPATSARLTVDEAVRAGLVGPEFHEKLLSAEKAVTGYRDPYTGQSVSLFQALKKGLIPREQGLRLLDAQLSTGGIVDPSKSHRVPLDVACARGCLDEETSRALSAPRADAKAYSDPSTGEPATYGELQQRCRPDQLTGLSLLPLSEKAARARQEELYSELQARETFEKTPVEVPVGGFKGRTVTVWELISSEYFTAEQRQELLRQFRTGKVTVEKVIKILITIVEEVETLRQERLSFSGLRAPVPASELLASGVLSRAQFEQLKDGKTTVKDLSELGSVRTLLQGSGCLAGIYLEDTKEKVSIYEAMRRGLLRATTAALLLEAQAATGFLVDPVRNQRLYVHEAVKAGVVGPELHEQLLSAEKAVTGYRDPYSGSTISLFQAMQKGLVLRQHGIRLLEAQIATGGIIDPVHSHRVPVDVAYQRGYFSEEMNRVLADPSDDTKGFFDPNTHENLTYRQLLERCVEDPETGLRLLPLKGAEKAEVVETTQVYTEEETRRAFEETQIDIPGGGSHGGSTMSLWEVMQSDLIPEEQRAQLMADFQAGRVTKERMIIIIIEIIEKTEIIRQQGLASYDYVRRRLTAEDLFEARIISLETYNLLREGTRSLREALEAESAWCYLYGTGSVAGVYLPGSRQTLSIYQALKKGLLSAEVARLLLEAQAATGFLLDPVKGERLTVDEAVRKGLVGPELHDRLLSAERAVTGYRDPYTEQTISLFQAMKKELIPTEEALRLLDAQLATGGIVDPRLGFHLPLEVAYQRGYLNKDTHDQLSEPSEVRSYVDPSTDERLSYTQLLRRCRRDDGTGQLLLPLSDARKLTFRGLRKQITMEELVRSQVMDEATALQLREGLTSIEEVTKNLQKFLEGTSCIAGVFVDATKERLSVYQAMKKGIIRPGTAFELLEAQAATGYVIDPIKGLKLTVEEAVRMGIVGPEFKDKLLSAERAVTGYKDPYSGKLISLFQAMKKGLILKDHGIRLLEAQIATGGIIDPEESHRLPVEVAYKRGLFDEEMNEILTDPSDDTKGFFDPNTEENLTYLQLMERCITDPQTGLCLLPLKEKKRERKTSSKSSVRKRRVVIVDPETGKEMSVYEAYRKGLIDHQTYLELSEQECEWEEITISSSDGVVKSMIIDRRSGRQYDIDDAIAKNLIDRSALDQYRAGTLSITEFADMLSGNAGGFRSRSSSVGSSSSYPISPAVSRTQLASWSDPTEETGPVAGILDTETLEKVSITEAMHRNLVDNITGQRLLEAQACTGGIIDPSTGERFPVTDAVNKGLVDKIMVDRINLAQKAFCGFEDPRTKTKMSAAQALKKGWLYYEAGQRFLEVQYLTGGLIEPDTPGRVPLDEALQRGTVDARTAQKLRDVGAYSKYLTCPKTKLKISYKDALDRSMVEEGTGLRLLEAAAQSTKGYYSPYSVSGSGSTAGSRTGSRTGSRAGSRRGSFDATGSGFSMTFSSSSYSSSGYGRRYASGSSASLGGPESAVA

SEQ ID NO: 6927 - protein, 418 aa, Homo sapiens
METHISCLFPELLAMIFGYLDVRDKGRAAQVCTAWRDAAYHKSVWRGVEAKLHLRRANPSLFPSLQARGIRRVQILSLRRSLSYVIQGMANIESLNLSGCYNLTDNGLGHAFVQEIGSLRALNLSLCKQITDSSLGRIAQYLKGLEVLELGGCSNITNTGLLLIAWGLQRLKSLNLRSCRHLSDVGIGHLAGMTRSAAEGCLGLEQLTLQDCQKLTDLSLKHISRGLTGLRLLNLSFCGGISDAGLLHLSHMGSLRSLNLRSCDNISDTGIMHLAMGSLRLSGLDVSFCDKVGDQSLAYIAQGLDGLKSLSLCSCHISDDGINRMVRQMHGLRTLNIGQCVRITDKGLELIAEHLSQLTGIDLYGCTRITKRGLERITQLPCLKVLNLGLWQMTDSEKEARGDFSPLFTVRTRGSSRR

SEQ ID NO: 6928 - protein, 125 aa, Homo sapiens
MRPRCCILALVCWITVFLLQCSKGTTDAPVGSGLWLCQPTPRCGNKIYNPSEQCCYDDAILSLKETRRCGSTCTFWPCFELCCPESFGPQQKFLVKLRVLGMKSQCHLSPISRSCTRNRRHVLYP

SEQ ID NO: 6929 - protein, 691 aa, Homo sapiens
MAPFPEEVDVFTAPHWRMKQLVGLYCDKLSKTNFSNNNDFRALLQSLYATFKEFKMHEQIENEYIIGLLQQRSQTIYNVHSDNKLSEMLSLFEKGLKNVKNEYEQLNYAKQLKERLEAFTRDFLPHMKEEEEVFQPMLMEYFTYEELKDIKKKVIAQHCSQKDTAELLRGLSLWNHAEERQKFFKYSVDEKSDKEAEVSEHSTGITHLPPEVMLSIFSYLNPQELCRCSQVSMKWSQLTKTGSLWKHLYPVHWARGDWYSGPATELDTEPDDEWVKNRKDESRAFHEWDEDADIDESEESAEESIAISIAQMEKRLLHGLIHNVLPYVGTSVKTLVLAYSSAVSSKMVRQILELCPNLEHLDLTQTDISDSAFDSWSWLGCCQSLRHLDLSGCEKITDVALEKISRALGILTSHQSGFLKTSTSKITSTAWKNKDITMQSTKQYACLHDLTNKGIGEEIDNEHPWTKPVSSENFTSPYVWMLDAEDLADIEDTVEWRHRNVESLCVMETASNFSCSTSGCFSKDIVGLRTSVCWQQHCASPAFAYCGHSFCCTGTALRTMSSLPESSAMCRKAARTRLPRGKDLIYFGSEKSDQETGRVLLFLSLSGCYQITDHGLRVLTLGGGLPYLEHLNLSGCLTITGAGLQDLVSACPSLNDEYFYYCDNINGPHADTASGCQNLQCGFRACCRSGE

SEQ ID NO: 6930 - protein, 368 aa, Homo sapiens
MAYSTVQRVALASGLVLALSLLLPKAFLSRGKRQEPPPTPEGKLGRFPPMMHHHQAPSDGQTPGARFQRSHLAEAFAKAKGSGGGAGGGGSGRGLMGQIIPIYGFGIFLYILYILFKLSKGKTTAEDGKCYTAMPGNTHRKITSFELAQLQEKLKETEAAMEKLINRVGPNGERAQTVTSDQEKRLLHQLREITRVMKEGKFIDRFSPEKEAEEAPYMEDWEGYPEETYPIYDLSDCIKRRQETILVDYPDPKELSAEEIAERMGMIEEEESDHLGWESLPTDPRAQEDNSVTSCDPKPETCSCCFHEDEDPAVLAENAGFSADSYPEQEETTKEEWSQDFKDEGLGISTDKAYTGSMLRKRNPQGLE

SEQ ID NO: 6931 - protein, 738 aa, Homo sapiens
MRMCTPIRGLLMALAVMFGTAMAFAPIPRITWEHREVHLVQFHEPDIYNYSALLLSEDKDTLYIGAREAVFAVNALNISEKQHEVYWKVSEDKKAKCAEKGKSKQTECLNYIRVLQPLSATSLYVCGTNAFQPACDHLNLTSFKFLGKNEDGKGRCPFDPAHSYTSVMVDGELYSGTSYNFLGSEPIISRNSSHSPLRTEYAIPWLNEPSFVFADVIRKSPDSPDGEDDRVYFFFTEVSVEYEFVFRVLIPRIARVCKGDQGGLRTLQKKWTSFLKARLICSRPDSGLVFNVLRDVFVLRSPGLKVPVFYALFTPQLNNVGLSAVCAYNLSTAEEVFSHGKYMQSTTVEQSHTKWVRYNGPVPKPRPGACIDSEARAANYTSSLNLPDKTLQFVKDHPLMDDSVTPIDNRPRLIKKDVNYTQIVVDRTQALDGTVYDVMFVSTDRGALHKAISLEHAVHIIEETQLFQDFEPVQTLLLSSKKGNRFVYAGSNSGVVQAPLAFCGKHGTCEDCVLARDPYCAWSPPTATCVALHQTESPSRGLIQEMSGDASVCPASSPKPLPPPGSSSLSCLGHVGDRRLSSPWTPWPASGAGPDSSSRVSLLPPFLSDQAQHVHALGNFYLFCQATGPADIRFVWEKNGRALETCVPVQTHALPDGRAHALSWLQDAIRESAEYRCSVLSSAGNKTSKVQVAVMRPEVTHQERWTRELSAWRAVAGEHDRMMQSWRKAWESCSKDTL

SEQ ID NO: 6932 - protein, 453 aa, Homo sapiens
MLRILCLALCSLLTGTRADPGALLRLGMDIMNQVQSAMDESHILEKMAAEAGKKQPGMKPIKGITNLKVKDVQLPVITLNFVPGVGIFQCVSTGMTVTGKSFMGGNMEIIVALNITATNRLLRDEETGLPVFKSEGCEVILVNVKTNLPSNMLPKMVNKFLDSTLHKVLPGLMCPAIDAVLVYVNRKWTNLSDPMPVGQMGTVKYVLMSAPATTASYIQLDFSPVVQQQKGKTIKLADAGEALTFPEGYAKGSSQLLLPATFLSAELALLQKSFHVNIQDTMIGELPPQTTKTLARFIPEVAVAYPKSKPLTTQIKIKKPPKVTMKTGKSLLHLHSTLEMFAARWRSKAPMSLFLLEVHFNLKVQYSVHENQLQMATSLDRLLSLSRKSSSIGNFNERELTGFITSYLEEAYIPVVNDVLQVGLPLPDFLAMNYNLAELDIVENALMLDLKLG

SEQ ID NO: 6933 - protein, 202 aa, Homo sapiens
MATLIYVDKENGEPGTRVVAKDGLKLGSGPSIKALDGRSQVSTPRFGKTFDAPPALPKATRKALGTVNRATEKSVKTKGPLKQKQPSFSAKKMTEKTVKAKSSVPASDDAYPEIEKFFPFNPLDFESFDLPEEHQIAHLPLSGVPLMILDEERELEKLFQLGPPSPVKMPSPPWESNLLQSPSSILSTLDVELPPVCCDIDI

SEQ ID NO: 6934 - protein, 716 aa, Homo sapiens
MMSIRQRREIRATEVSEDFPAQEENVKLENKLPSGCTSRRLWKILSLTIGGTIALCIGLLTSVYLATLHENDLWFSNIKEVEREISFRTECGLYYSYYKQMLQAPTLVQGFHGLIYDNKTESMKTINLLQRMNIYQEVFLSILYRVLPIQKYLEPVYFYIYTLFGLQAIYVTALYITSWLLSGTWLSGLLAAFWYVTNRIDTTRVEFTIPLRENWALPFFAIQIAAITYFLRPNLQPLSERLTLLAIFISTFLFSLTWQFNQFMMLMQALVLFTLDSLDMLPAVKATWLYGIQITSLLLVCILQFFNSMILGSLLISFNLSVFIARKLQKNLKTGSFLNRLGKLLLHLFMVLCLTLFLNNIIKKILNLKSDEHIFKFLKAKFGLGATRDFDANLYLCEEAFGLLPFNTFGRLSDTLLFYAYIFVLSITVIVAFVVAFHNLSDSTNQQSVGKMEKGTVDLKPETAYNLIHTILFGFLALSTMRMKYLWTSHMCVFASFGLCSPEIWELLLKSVHLYNPKRICIMRYSVPILILLYLCYKFWPGMMDELSELREFYDPDTVELMNWINSNTPRKAVFAGSMQLLAGVKLCTGRTLTNHPHYEDSSLRERTRAVYQIYAKRAPEEVHALLRSFGTDYVILEDSICYERRHRRGCRLRDLLDIANGHMMDGPGENDPDLKPADHPRFCEEIKRNLPPYVAYFTRVFQNKTFHVYKLSRNK

SEQ ID NO: 6935 - protein, 251 aa, Homo sapiens
MSGSNPKAAAAASAAGPGGLVAGKEEKKKAGGGVLNRLKARRQAPHHAADDGVGAAVTEQELLALDTIRPEHVLRLSRVTENYLCKPEDNIYSIDFTRFKIRDLETGTVLFEIAKPCVSDQEEDEEEGGGDVDISAGRFVRYQFTPAFLRLRTVGATVEFTVGDKPVSNFRMIERHYFREHLLKNFDFDFGFCIPSSRNTCEHIYEFPQLSEDVIRLMIENPYETRSDSFYFVDNKLIMHNKADYAYNGGQ

SEQ ID NO: 6936 - protein, 458 aa, Homo sapiens
MARMGLAGAAGRWWGLALGLTAFFLPGVHSQVVQVNDSMYGFIGTDVVLHCSFANPLPSVKITQVTWQKSTNGSKQNVAIYNPSMGVSVLAPYRERVEFLRPSFTDGTIRLSRLELEDEGVYICEFATFPTGNRESQLNLTVMAKPTNWIEGTQAVLRAKKGQDDKVLVATCTSANGKPPSVVSWETRLKGEAEYQEIRNPNGTVTVISRYRLVPSREAHQQSLACIVNYHMDRFKESLTLNVQYEPEVTIEGFDGNWYLQRMDVKLTCKADANPPATEYHWTTLNGSLPKGVEAQNRTLFFKGPINYSLAGTYICEATNPIGTRSGQVEVNITEKPRPQRGLGSAARLLAGTVAVFLILVAVLTVFFLYNRQQKSPPETDGAGTDQPLSQKPEPSPSRQSSLVPEDIQVVHLDPGRQQQQEEEDLQKLSLQPPYYDLGVSPSYHPSVRTTEPRGECP

SEQ ID NO: 6937 - protein, 543 aa, Homo sapiens
MATRRLGVGETLGALNAALGPGGPVWIKETRTRHLRSRDFLAPHRALQARFDDGQVPEHLLHALACLQGPGVAPVLRCAPTPAGLSLQLQRSAVFERVLSAVAAYATPASPASLGQRVLLHCPALRSSPCALRLSQLRTVLVADHLARALRAHGVCVRLVPAVRDPHMLTFLQQLRVDWPAASERASSHTLRSHALEELTSANDGRTLSPGILGRLCLKELVEEQGRTAGYDPNLDNCLVTEDLLSVLAELQEALWHWPEDSHPGLAGASDTGTGGCLVVHVVSCEEEFQQQKLDLLWQKLVDKAPLRQKHLICGPVKVAGAPGTLMTAPEYYEFRHTQVCKASALKHGGDLAQDPAWTEIFGVLSVATIKFEMLSTAPQSQLFLALADSSISTKGTKSGTFVMYNCARLATLFESYKCSMEQGLYPTFPPVSSLDFSLLHDEGEWLLLFNSILPFPDLLSRTAVLDCTAPGLHIAVRTEMICKFLVQLSMDFSSYYNRVHILGEPRPHLFGQMFVRLQLLRAVREVLHTGLAMLGLPPLSHI

SEQ ID NO: 6938 - protein, 341 aa, Homo sapiens
MALPSRILLWKLVLLQSSAVLLHSAVEETDAGLYTCNLHHHYCHLYESLAVRLEVTDGPPATPAYWDGEKEVLAVARGAPALLTCVNRGHVWTDRHVEEAQQVVHWDRQPPGVPHDRADRLLDLYASGERRAYGPLFLRDRVAVGADAFERGDFSLRIEPLEVADEGTYSCHLHHHYCGLHERRVFHLTVAEPHAEPPPRGSPGNGSSHSGAPGPDPTLARGHNVINVIVPESRAHFFQQLGYVLATLLLFILLLVTVLLAARRRRGGYEYSDQKSGKSKGKDVNLAEFAVAAGDQMLYRSEDIQLDYKNNILKERAELAHSPLPAKYIDLDKGFRKENCK

SEQ ID NO: 6939 - protein, 650 aa, Homo sapiens
MATSNNPRKFSEKIALHNQKQAEETAAFEEVMKDLSLTRAARLQLQKSQYLQLGPSRGQYYGGSLPNVNQIGSGTMDLPFQPSGFLGEALAAAPVSLTPFQSSGLDTSRTTRHHGLVDRVYRERGRLGSPHRRPLSVDKHGRQADSCPYGTMYLSPPADTSWRRTNSDSALHQSTMTPTQPESFSSGSQDVHQKRVLLLTVPGMEETTSEADKNLSKQAWDTKKTGSRPKSCEVPGINIFPSADQENTTALIPATHNTGGSLPDLTNIHFPSPLPTPLDPEEPTFPALSSSSSTGNLAANLTHLGIGGAGQGMSTPGSSPQHRPAGVSPLSLSTEARRQQASPTLSPLSPITQAVAMDALSLEQQLPYAFFTQAGSQQPPPQPQPPPPPPPASQQPPPPPPPQAPVRLPPGGPLLPSASLTRGPQPPPLAVTVPSSLPQSPPENPGQPSMGIDIASAPALQQYRTSAGSPANQSPTSPVSNQGFSPGSSPQHTSTLGSVFGDAYYEQQMAARQANALSHQLEQFNMMENAISSSSLYSPGSTLNYSQAAMMGLTGSHGSLPDSQQLGYASHSGIPNIILTVTGESPPSLSKELTSSLAGVGDVSFDSDSQFPLDELKIDPLTLDGLHMLNDPDMVLADPATEDTFRMDRL

SEQ ID NO: 6940 - protein, 448 aa, Homo sapiens
MPGIKRILTVTILALCLPSPGNAQAQCTNGFDLDRQSGQCLDIDECRTIPEACRGDMMCVNQNGGYLCIPRTNPVYRGPYSNPYSTPYSGPYPAAAPPLSAPNYPTISRPLICRFGYQMDESNQCVDVDECATDSHQCNPTQICINTEGGYTCSCTDGYWLLEGQCLDIDECRYGYCQQLCANVPGSYSCTCNPGFTLNEDGRSCQDVNECATENPCVQTCVNTYGSFICRCDPGYELEEDGVHCSDMDECSFSEFLCQHECVNQPGTYFCSCPPGYILLDDNRSCQDINECEHRNHTCNLQQTCYNLQGGFKCIDPIRCEEPYLRISDNRCMCPAENPGCRDQPFTILYRDMDVVSGRSVPADIFQMQATTRYPGAYYIFQIKSGNEGREFYMRQTGPISATLVMTRPIKGPREIQLDLEMITVNTVINFRGSSVIRLRIYVSQYPF

SEQ ID NO: 6941 - protein, 376 aa, Homo sapiens
MAALGDIQESPSVPSPVSLSSPGTPGTQHHEPQLHLHGHQHGSPGSSPKVLSQPSDLDLQDVEEVEIGRDTFWPDSEPKPEQAPRSPGSQAPDEGAGGALRSLLRSLPRRARCSAGFGPESSAERPAGQPPGAVPCAQPRGAWRVTLVQQAAAGPEGAPERAAELGVNFGRSRQGSARGAKPHRCEACGKSFKYNSLLLKHQRIHTGEKPYACHECGKRFRGWSGFIQHHRIHTGEKPYECGQCGRAFSHSSHFTQHLRIHNGEKPYKCGECGQAFSQSSNLVRHQRLHTGEKPYACSQCGKAFIWSSVLIEHQRIHTGEKPYECSDCGKAFRGRSHFFRHLRTHTGEKPFACGACGKAFGQSSQLIQHQRVHYRE

SEQ ID NO: 6942 - protein, 831 aa, Homo sapiens
MPLEMEPKMSKLAFGCQRSSTSDDDSGCALEEYAWVPPGLRPEQIQLYFACLPEEKVPYVNSPGEKHRIKQLLYQLPPHDNEVRYCQSLSEEEKKELQVFSAQRKKEALGRGTIKLLSRAVMHAVCEQCGLKINGGEVAVFASRAGPGVCWHPSCFVCFTCNELLVDLIYFYQDGKIHCGRHHAELLKPRCSACDEIIFADECTEAEGRHWHMKHFCCLECETVLGGQRYIMKDGRPFCCGCFESLYAEYCETCGEHIGVDHAQMTYDGQHWHATEACFSCAQCKASLLGCPFLPKQGQIYCSKTCSLGEDVHASDSSDSAFQSARSRDSRRSVRMGKSSRSADQCRQSLLLSPALNYKFPGLSGNADDTLSRKLDDLSLSRQGTSFASEEFWKGRVEQETPEDPEEWADHEDYMTQLLLKFGDKSLFQPQPNEMDIRASEHWISDNMVKSKTELKQNNQSLASKKYQSDMYWAQSQDGLGDSAYGSHPGPASSRRLQELELDHGASGYNHDETQWYEDSLECLSDLKPEQSVRDSMDSLALSNITGASVDGENKPRPSLYSLQNFEEMETEDCEKMSNMGTLNSSMLHRSAESLKSLSSELCPEKILPEEKPVHLPVLRRSKSQSRPQQVKFSDDVIDNGNYDIEIRQPPMSERTRRRVYNFEERGSRSHHHRRRRSRKSRSDNALNLVTERKYSPKDRLRLYTPDNYEKFIQNKSAREIQAYIQNADLYGQYAHATSDYGLQNPGMNRFLGLYGEDDDSWCSSSSSSSDSEEEGYFLGQPIPQPRPQRFAYYTDDLSSPPSALPTPQFGQRTTKSKKKKGHKGKNCIIS

SEQ ID NO: 6943 - protein, 583 aa, Homo sapiens
MLRMRVPALLVLLFCFRGRAGWSRYWISGNAANGQHDLHIRPVELEDEASYECQATQAGLRSRPAQLHVLVPPEAPQVLGGPSVSLVAGVPANLTCRSRGDARPTPELLWFRDGVLLDGATFHQTLLKEGTPGSVESTLTLTPFSHDDGATFVCRARSQALPTGRDTAITLSLQYPPEVTLSASPHTVQEGEKVIFLCQATAQPPVTGYRWAKGGSPVLGARGPRLEVVADASFLTEPVSCEVSNAVGSANRSTALDVLFGPILQAKPEPVSVDVGEDASFSCAWRGNPLPRVTWTRRGGAQVLGSGATLRLPSVGPEDAGDYVCRAEAGLSGLRGGAAEARLTVNAPPVVTALHSAPAFLRGPARLQCLVFASPAPDAVVWSWDEGFLEAGSQGRFLVETFPAPESRGGLGPGLISVLHISGTQESDFSRSFNCSARNRLGEGGAQASLGRRDLLPTVRIVAGVAAATTTLLMVITGVALCCWRHSKASASFSEQKNLMRIPGSSDGSSSRGPEEEETGSREDRGPIVHTDHSDLVLEEEGTLETKDPTNGYYKVRGVSPPASPDSRVTSFQWKSPGISNLP

SEQ ID NO: 6944 - protein, 193 aa, Homo sapiens
MPNWGGGKKCGVCQKTVYFAEEVQCEGNSFHKSCFLCMVCKKNLDSTTVAVHGEEIYCKSCYGKKYGPKGYGYGQGAGTLSTDKGESLGIKHEEAPGHRPTTNPNASKFAQKIGGSERCPRCSQAVYAAEKVIGAGKSWHKACFRCAKCGKGLESTTLADKDGEIYCKGCYAKNFGPKGFGFGQGAGALVHSE

SEQ ID NO: 6945 - protein, 347 aa, Homo sapiens
MESPASSQPASMPQSKGKSKRKKDLRISCMSKPPAPNPTPPRNLDSRTFITIGDRNFEVEADDLVTISELGRGAYGVVEKVRHAQSGTIMAVKRIRATVNSQEQKRLLMDLDINMRTVDCFYTVTFYGALFREGDVWICMELMDTSLDKFYRKVLDKNMTIPEDILGEIAVSIVRALEHLHSKLSVIHRDVKPSNVLINKEGHVKMCDFGISGYLVDSVAKTMDAGCKPYMAPERINPELNQKGYNVKSDVWSLGITMIEMAILRFPYESWGTPFQQLKQVVEEPSPQLPADRFSPEFVDFTAQCLRKNPAERMSYLELMEHPFFTLHKTKKTDIAAFVKEILGEDS

SEQ ID NO: 6946 - protein, 644 aa, Homo sapiens
MAEAVAAPISPWTMAATIQAMERKIESQAARLLSLEGRTGMAEKKLADCEKTAVEFGNQLEGKWAVLGTLLQEYGLLQRRLENVENLLRNRNFWILRLPPGSKGESPKEWGKLEDWQKELYKHVMRGNYETLVSLDYAISKPEVLSQIEQGKEPCNWRRPGPKIPDVPVDPSPGSGPPVPAPDLLMQIKQEGELQLQEQQALGVEAWAAGQPDIGEEPWGLSQLDSGAGDISTDATSGVHSNFSTTIPPTSWQTDLPPHHPSSACSDGTLKLNTAASTEDVKIVIKTEVQEEEVVATPVHPTDLEAHGTLFGPGQATRFFPSPAQEGAWESQGSSFPSQDPVLGLREPARPERDMGELSPAVAQEETPPGDWLFGGVRWGWNFRCKPPVGLNPRTGPEGLPYSSPDNGEAILDPSQAPRPFNEPCKYPGRTKGFGHKPGLKKHPAAPPGGRPFTCATCGKSFQLQVSLSAHQRSCGAPDGSGPGTGGGGSGSGGGGGGSGGGSARDGSALRCGECGRCFTRPAHLIRHRMLHTGERPFPCTECEKRFTERSKLIDHYRTHTGVRPFTCTVCGKSFIRKDHLRKHQRNHAAGAKTPARGQPLPTPPAPPDPFKSPASKGPLASTDLVTDWTCGLSVLGPTDGGDM

SEQ ID NO: 6947 - protein, 551 aa, Homo sapiens
MEEELPLFSGDSGKPVQATLSSLKMLDVGKWPIFSLCSEEELQLIRQACVFGSAGNEVLYTTVNDEIFVLGTNCCGCLGLGDVQSTIEPRRLDSLNGKKIACLSYGSGPHIVLATTEGEVFTWGHNAYSQLGNGTTNHGLVPCHISTNLSNKQVIEVACGSYHSLVLTSDGEVFAWGYNNSGQVGSGSTVNQPIPRRVTGCLQNKVVVTIACGQMCCMAVVDTGEVYVWGYNGNGQLGLGNSGNQPTPCRVAALQGIRVQRVACGYAHTLVLTDEGQVYAWGANSYGQLGTGNKSNQSYPTPVTVEKDRIIEIAACHSTHTSAAKTQGGHVYMWGQCRGQSVILPHLTHFSCTDDVFACFATPAVTWRLLSVEPDDHLTVAESLKREFDNPDTADLKFLVDGKYIYAHKVLLKIRCEHFRSSLEDNEDDIVEMSEFSYPVYRAFLEYLYTDSISLSPEEAVGLLDLATFYRENRLKKLCQQTIKQGICEENAIALLSAAVKYDAQDLEEFCFRFCINHLTVVTQTSGFAEMDHDLLKNFISKASRVGAFKN

SEQ ID NO: 6948 - protein, 339 aa, Homo sapiens
MSGQLERCEREWHELEGEFQELQETHRIYKQKLEELAALQTLCSSSISKQKKHLKDLKLTLQRCKRHASREEAELVQQMAANIKERQDVFFDMEAYLPKKNGLYLNLVLGNVNVTLLSNQAKFAYKDEYEKFKLYLTIILLLGAVACRFVLHYRVTDEVFNFLLVWYYCTLTIRESILISNGSRIKGWWVSHHYVSTFLSGVMLTWPNGPIYQKFRNQFLAFSIFQSCVQFLQYYYQRGCLYRLRALGERNHLDLTVEGFQSWMWRGLTFLLPFLFCGHFWQLYNAVTLFELSSHEECREWQVFVLAFTFLILFLGNFLTTLKVVHAKLQKNRGKTKQP

SEQ ID NO: 6949 - protein, 215 aa, Homo sapiens [sequence omitted]

SEQ ID NO: 6950 - protein, 505 aa, Homo sapiens
MWPSLLLLLLLPGPPPVAGLEDAAFPHLGESLQPLPRACPLRCSCPRVDTVDCDGLDLRVFPDNITRAAQHLSLQNNQLQELPYNELSRLSGLRTLNLHNNLISSEGLPDEAFESLTQLQHLCVAHNKLSVAPQFLPRSLRVADLAANQVMEIFPLTFGEKPALRSVYLHNNQLSNAGLPPDAFRGSEAIATLSLSNNQLSYLPPSLPPSLERLHLQNNLISKVPRGALSRQTQLRELYLQHNQLTDSGLDATTFSKLHSLEYLDLSHNQLTTVPAGLPRTLAILHLGRNRIRQVEAARLHGARGLRYLLLQHNQLGSSGLPAGALRPLRGLHTLHLYGNGLDRVPPALPRRLRALVLPHNHVAALGARDLVATPGLTELNLAYNRLASARVHHRAFRRLRALRSLDLAGNQLTRLPMGLPTGLRTLQLQRNQLRMLEPEPLAGLDQLRELSLAHNRLRVGDIGPGTWHELQALQVRHRLVSHTVPRAPPSPCLPCHVPNILVSW

SEQ ID NO: 6951 - protein, 189 aa, Homo sapiens
MVMLLLLLSALAGLFGAAEGQAFHLGKCPNPPVQENFDVNKYLGRWYEIEKIPTTFENGRCIQANYSLMENGKIKVLNQELRADGTVNQIEGEATPVNLTEPAKLEVKFSWFMPSAPYWILATDYENYALVYSCTCIIQLFHVDFAWILARNPNLPPETVDSLKNILTSNNIDVKKMTVTDQVNCPKLS

SEQ ID NO: 6952 - protein, 643 aa, Homo sapiens
MTPALTALLCLGLSLGPRTRMQAGPFPKPTLWAEPGSVISWGSPVTIWCQGSLEAQEYQLDKEGSPEPWDRNNPLEPKNKARFSIPSMTQHHAGRYRCHYYSSAGWSEPSDPLELVMTGFYNKPTLSALPSPVVASGGNMTLRCGSQKGYHHFVLMKEGEHQLPRTLDSQQLHSGGFQALFPVGPVTPSHRWRFTCYYYYTNTPWVWSHPSDPLEILPSGVSRKPSLLTLQGPVLAPGQSLTLQCGSDVGYDRFVLYKEGERDFLQRPGQQPQAGLSQANFTLGPVSRSYGGQYRCYGAHNLSSEWSAPSDPLDILITGQIYDTVSLSAQPGPTVASGENMTLLCQSRGYFDTFLLTKEGAAHPPLRLRSMYGAHKYQAEFPMSPVTSAHAGTYRCYGSRSSNPHLLSFPSEPLELMVSGPEDQPLNPPGSGPQNAPGLGSGAGTRAAGLGRYLEVLIGVSVAFVLLLFLLLFLLLLRQRHSKHRTSDQRKTDFQRPAGAAETEPKDRGLLRRSSPAADVQEENLYAAVKDTQSEDRVELDSQSPHDEDPQAVTYAPVKHSSPRREMASPPSSLSGEFLDTKDRQVEEDRQMDTEAAASEASQDVTYAQLHSLTLRRKATEPPPSQEGEPPAEPSIYATLAIH

SEQ ID NO: 6953 - protein, 478 aa, Homo sapiens
MSPPLLKLGAVLSTMAMISNWMSQTLPSLVGLNTTRLSTPDTLTQISPKEGWQVYSSAQDPDGRCICTVVAPEQNLCSRDAKSRQLRQLLEKVQNMSQSIEVLNLRTQRDFQYVLKMETQMKGLKAKFRQIEDDRKTLMTKHFQELKEKMDELLPLIPVLEQYKTDAKLITQFKEEIRNLSAVLTGIQEEIGAYDYEELHQRVLSLETRLRDCMKKLTCGKLMKITGPVTVKTSGTRFGAWMTDPLASEKNNRVWYMDSYTNNKIVREYKSIADFVSGAESRTYNLPFKWAGTNHVVYNGSLYFNKYQSNIIIKYSFDMGRVLAQRSLEYAGFHNVYPYTWGGFSDIDLMADEIGLWAVYATNQNAGNIVISQLNQDTLEVMKSWSTGYPKRSAGESFMICGTLYVTNSHLTGAKVYYSYSTKTSTYEYTDIPFHNQYFHISMLDYNARDRALYAWNNGHQVLFNVTLFHIIKTEDDT

SEQ ID NO: 6954 - protein, 624 aa, Homo sapiens
MAENGESSGPPRPSRGPAAAQGSAAAPAEPKIIKVTVKTPKEKEEFAVPENSSVQQFKEAISKRFKSQTDQLVLIFAGKILKDQDTLIQHGIHDGLTVHLVIKSQNRPQGQSTQPSNAAGTNTTSASTPRSNSTPISTNSNPFGLGSLGGLAGLSSLGLSSTNFSELQSQMQQQLMASPEMMIQIMENPFVQSMLSNPDLMRQLIMANPQMQQLIQRNPEISHLLNNPDIMRQTLEIARNPAMMQEMMRNQDLALSNLESIPGGYNALRRMYTDIQEPMLNAAQEQFGGNPFASVGSSSSSGEGTQPSRTENRDPLPNPWAPPPATQSSATTSTTTSTGSGSGNSSSNATGNTVAAANYVASIFSTPGMQSLLQQITENPQLIQNMLSAPYMRSMMQSLSQNPDLAAQMMLNSPLFTANPQLQEQMRPQLPAFLQQMQNPDTLSAMSNPRAMQALMQIQQGLQTLATEAPGLIPSFTPGVGVGVLGTAIGPVGPVTPIGPIGPIVPFTPIGPIGPIGPTGPAAPPGSTGSGGPTGPTVSSAAPSETTSPTSESGPNQQFIQQMVQALAGANAPQLPNPEVRFQQQLEQLNAMGFLNREANLQALIATGGDINAAIERLLGSQPS

SEQ ID NO: 6955 - protein, 273 aa, Homo sapiens
MDPGKDKEGVPQPSGPPARKKFVIPLDEDEVPPGVAKPLFRSTQSLPTVDTSAQAAPQTYAEYAISQPLEGAGATCPTGSEPLAGETPNQALKPGAKSNSIIVSPRQRGNPVLKFVRNVPWEFGDVIPDYVLGQSTCALFLSLRYHNLHPDYIHGRLQSLGKNFALRVLLVQVDVKDPQQALKELAKMCILADCTLILAWSPEEAGRYLETYKAYEQKPADLLMEKLEQDFVSRSLEQLIAASREDLALCPGLGPQKARRLFDVLHEPFLKVP

SEQ ID NO: 6956 - protein, 737 aa, Homo sapiens
MQPRRAQAPGAQLLPALALLLLLLGAGPRGSSLANPVPAAPLSAPGPCAAQPCRNGGVCTSRPEPDPQHPAPAGEPGYSCTCPAGISGANCQLVADPCASNPCHHGNCSSSSSSSSDGYLCICNEGYEGPNCEQALPSLPATGWTESMAPRQLQPVPATQEPDKILPRSQATVTLPTWQPKTGQKVVEMKWDQVEVIPDIACGNASSNSSAGGRLVSFEVPQNTSVKIRQDATASLILLWKVTATGFQQCSLIDGRSVTPLQASGGLVLLEEMLALGNNHFIGFVNDSVTKSIVALRLTLVVKVSTCVPGESHANDLECSGKGKCTTKPSEATFSCTCEEQYVGTFCEEYDACQRKPCQNNASCIDANEKQDGSNFTCVCLPGYTGELCQSKIDYCILDPCRNGATCISSLSGFTCQCPEGYFGSACEEKVDPCASSPCQNNGTCYVDGVHFTCNCSPGFTGPTCAQLIDFCALSPCAHGTCRSVGTSYKCLCDPGYHGLYCEEEYNECLSAPCLNAATCRDLVNGYECVCLAEYKGTHCELYKDPCANVSCLNGATCDSDGLNGTCICAPGFTGEECDIDINECDSNPCHHGGSCLDQPNGYNCHCPHGWVGANCEIHLQWKSGHMAESLTNMPRHSLYIIIGALCVAFILMLIILIVGICRISRIEYQGSSRPAYEEFYNCRSIDSEFSNAIASIRHARFGKKSRPAMYDVSPIAYEDYSPDDKPLVTLIKTKDL

SEQ ID NO: 6957 - protein, 697 aa, Homo sapiens
MLLPLLLSSLLGGSQAMDGRFWIRVQESVMVPEGLCISVPCSFSYPRQDWTGSTPAYGYWFKAVTETTKGAPVATNHQSREVEMSTRGRFQLTGDPAKGNCSLVIRDAQMQDESQYFFRVERGSYVRYNFMNDGFFLKVTALTQKPDVYIPETLEPGQPVTVICVFNWAFEECPPPSFSWTGAALSSQGTKPTTSHFSVLSFTPRPQDHNTDLTCHVDFSRKGVSAQRTVRLRVAYAPRDLVISISRDNTPALEPQPQGNVPYLEAQKGQFLRLLCAADSQPPATLSWVLQNRVLSSSHPWGPRPLGLELPGVKAGDSGRYTCRAENRLGSQQRALDLSVQYPPENLRVMVSQANRTVLENLGNGTSLPVLEGQSLCLVCVTHSSPPARLSWTQRGQVLSPSQPSDPGVLELPRVQVEHEGEFTCHARHPLGSQHVSLSLSVHYSPKLLGPSCSWEAEGLHCSCSSQASPAPSLRWWLGEELLEGNSSQDSFEVTPSSAGPWANSSLSLHGGLSSGLRLRCEAWNVHGAQSGSILQLPDKKGLISTAFSNGAFLGIGITALLFLCLALIIMKILPKRRTQTETPRPRFSRHSTILDYINVVPTAGPLAQKRNQKATPNSPRTPLPPGAPSPESKKNQKKQYQLPSFPEPKSSTQAPESQESQEELHYATLNFPGVRPRPEARMPKGTQADYAEVKFQ

SEQ ID NO: 6958 - protein, 184 aa, Homo sapiens
MGNGMNKILPGLYIGNFKDARDAEQLSKNKVTHILSVHDSARPMLEGVKYLCIPAADSPSQNLTRHFKESIKFIHECRLRGESCLVHCLAGVSRSVTLVIAYIMTVTDFGWEDALHTVRAGRSCANPNVGFQRQLQEFEKHEVHQYRQWLKEEYGESPLQDAEEAKNILAAPGILKFWAFLRRL

SEQ ID NO: 6959 - protein, 523 aa, Homo sapiens
MQRAAALVRRGCGPRTPSSWGRSQSSAAAEASAVLKVRPERSRRERILTLESMNPQVKAVEYAVRGPIVLKAGEIELELQRGIKKPFTEVIRANIGDAQAMGQQPITFLRQVMALCTYPNLLDSPSFPEDAKKRARRILQACGGNSLGSYSASQGVNCIREDVAAYITRRDGGVPADPDNIYLTTGASDGISTILKILVSGGGKSRTGVMIPIPQYPLYSAVISELDAIQVNYYLDEENCWALNVNELRRAVQEAKDHCDPKVLCIINPGNPTGQVQSRKCIEDVIHFAWEEKLFLLADEVYQDNVYSPDCRFHSFKKVLYEMGPEYSSNVELASFHSTSKGYMGECGYRGGYMEVINLHPEIKGQLVKLLSVRLCPPVSGQAAMDIVVNPPVAGEESFEQFSREKESVLGNLAKKAKLTEDLFNQVPGIHCNPLQGAMYAFPRIFIPAKAVEAAQAHQMAPDMFYCMKLLEETGICVVPGSGFGQREGTYHFRMTILPPVEKLKTVLQKVKDFHINFLEKYA

SEQ ID NO: 6960 - protein, 449 aa, Homo sapiens
MAHVRHFRTLVSGFYFWEAALLLSLVATKETDSARSRSAPMSPSDFLDKLMGRTSGYDARIRPNFKGPPVNVTCNIFINSFGSIAETTMDYRVNIFLRQKWNDPRLAYSEYPDDSLDLDPSMLDSIWKPDLFFANEKGANFHEVTTDNKLLRIFKNGNVLYSIRLTLTLSCPMDLKNFPMDVQTCIMQLESFGYTMNDLIFEWQDEAPVQVAEGLTLPQFLLKEEKDLRYCTKHYNTGKFTCIEVRFHLERQMGYYLIQMYIPSLLIVILSWVSFWINMDAAPARVALGITTVLTMTTQSSGSRASLPKVSYVKAIDIWMAVCLLFVFSALLEYAAVNFVSRQHKELLRFRRKRKNKDDEVRESRFSFTAYGMGPCLQAKDGMTPKGPNHPVQVMPKSPDEMRKVFIDRAKKIDTISRACFPLAFLIFNIFYWVIYKILRHEDIHQQQD

SEQ ID NO: 6961 - protein, 352 aa, Homo sapiens
MARMGLAGAAGRWWGLALGLTAFFLPGVHSQVVQVNDSMYGFIGTDVVLHCSFANPLPSVKITQVTWQKSTNGSKQNVAIYNPSMGVSVLAPYRERVEFLRPSFTDGTIRLSRLELEDEGVYICEFATFPTGNRESQLNLTVMAKPTNWIEGTQAVLRAKKGQDDKVLVATCTSANGKPPSVVSWETRLKGEAEYQEIRNPNGTVTVISRYRLVPSREAHQQSLACIVNYHMDRFKESLTLNVQYEPEVTIEGFDGNWYLQRMDVKLTCKADANPPATEYHWTTLNGSLPKGVEAQNRTLFFKGPINYSLAGTYICEATNPIGTRSGQVEVNITAFCQLIYPGKGRTRARMF

SEQ ID NO: 6962 - protein, 375 aa, Homo sapiens
MDELQDVQLTEIKPLLNDKNGTRNFQDFDCQEHDIETTHGVVHVTIRGLPKGNRPVILTYHDIGLNHKSCFNAFFNFEDMQEITQHFAVCHVDAPGQQEGAPSFPTGYQYPTMDELAEMLPPVLTHLSLKSIIGIGVGAGAYILSRFALNHPELVEGLVLINVDPCAKGWIDWAASKLSGLTTNVVDIILAHHFGQEELQANLDLIQTYRMHIAQDINQDNLQLFLNSYNGRRDLEIERPILGQNDNKSKTLKCSTLLVVGDNSPAVEAVVECNSRLNPINTTLLKMADCGGLPQVVQPGKLTEAFKYFLQGMGYIPSASMTRLARSRTHSTSSSLGSGESPFSRSVTSNQSDGTQESCESPDVLDRHQTMEVSC

SEQ ID NO: 6963 - protein, 775 aa, Homo sapiens
MLPPLIDPWDPGLTARDLLFRGGCRYRKRPRVVLDVTEQISRFLLDHGDVAFAPLGKLMLENFKLEGAGSRTKKKTVVSVKKLLQDLGGHQPWGCPWAYLSNRQRRFSILGGPILGTSVASHLAELLHEELVLRWEQLLLDEACTGGALAWVPGRTPQFGQLVYPAGGAQDRLHFQEVVLTPGDNPQFLGKPGRIQLQGPVRQVVTCTVQGETLLAVRSDYHCAVWKFGKQWQPTLLQAMQVEKGATGISLSPHLPGELAICSRSGAVCLWSPEDGLRQIYRDPETLVFRDSSSWRWADFTAHPRVLTVGDRTGVKMLDTQGPPGCGLLLFRLGAEASCQKGERVLLTQYLGHSSPKCLPPTLHLVCTQFSLYLVDERLPLVPMLKWNHGLPSPLLLARLLPPPRPSCVQPLLLGGQGGQLQLLHLAEGASVPRLAGPPQSLPSRIDSLPAFPLLEPKIQWRLQERLKAPTIGLAAVVPPLPSAPTPGLVLFQLSAAGDVFYQQLRPQVDSSLRRDAGPPGDTQPDCHAPTASWTSQDTAGCSQWLKALLKVPLAPPVWTAPTFTHRQMLGSTELRREEEEGQRLGVLRKAMARGQLLLQRDLGSLPAAEPPPAPESGLEDKLSERLGEAWAGRGAAWWERQQGRTSEPGRQTRRPKRRTQLSSSFSLSGHVDPSEDTSSPHSPEWPPADALPLPPTTPPSQELTPDACAQGVPSEQRQMLRDYMAKLPPQRDTPGCATTPPHSQASSVRATRSQQHTPVLSSSQPLRKKPRMGF

SEQ ID NO: 6964 - protein, 983 aa, Homo sapiens
MMTSVGTNRARGNWEQPQNQNQTQHKQRPQATAEQIRLAQMISDHNDADFEEKVKQLIDITGKNQDECVIALHDCNGDVNRAINVLLEGNPDTHSWEMVGKKKGVSGQKDGGQTESNEEGKENRDRDRDYSRRRGGPPRRGRGASRGREFRGQENGLDGTKSGGPSGRGTERGRRGRGRGRGGSGRRGGRFSAQGMGTFNPADYAEPANTDDNYGNSSGNTWNNTGHFEPDDGTSAWRTATEEWGTEDWNEDLSETKIFTASNVSSVPLPAENVTITAGQRIDLAVLLGKTPSTMENDSSNLDPSQAPSLAQPLVFSNSKQTAISQPASGNTFSHHSMVSMLGKGFGDVGEAKGGSTTGSQFLEQFKTAQALAQLAAQHSQSGSTTTSSWDMGSTTQSPSLVQYDLKNPSDSAVHSPFTKRQAFTPSSTMMEVFLQEKSPAVATSTAAPPPPSSPLPSKSTSAPQMSPGSSDNQSSSPQPAQQKLKQQKKKASLTSKIPALAVEMPGSADISGLNLQFGALQFGSEPVLSDYESTPTTSASSSQAPSSLYTSTASESSSTISSNQSQESGYQSGPIQSTTYTSQNNAQGPLYEQRSTQTRRYPSSISSSPQKDLTQAKNGFSSVQATQLQTTQSVEGATGSAVKSDSPSTSSIPPLNETVSAASLLTTTNQHSSSLGGLSHSEEIPNTTTTQHSSTLSTQQNTLSSSTSSGRTSTSTLLHTSVESEANLHSSSSTFSTTSSTVSAPPPVVSVSSSLNSGSSLGLSLGSNSTVTASTRSSVATTSGKAPPNLPPGVPPLLPNPYIMAPGLLHAYPPQVYGYDDLQMLQTRFPLDYYSIPFPTPTTPLTGRDGSLASNPYSGDLTKFGRGDASSPAPATTLAQPQQNQTQTHHTTQQTFLNPALPPGYSYTSLPYYTGVPGLPSTFQYGPAVFPVAPTSSKQHGVNVSVNASATPFQQPSGYGSHGYNTGRKYPPPYKHFWTAES

SEQ ID NO: 6965 - protein, 555 aa, Homo sapiens
MADRGGVGEAAAVGASPASVPGLNPTLGWRERLRAGLAGTGASLWFVAGLGLLYALRIPLRLCENLAAVTVFLNSLTPKFYVALTGTSSLISGLIFIFEWWYFHKHGTSFIEQVSVSHLQPLMGGTESSISEPGSPSRNRENETSRQNLSECKVWRNPLNLFRGAEYRRYTWVTGKEPLTYYDMNLSAQDHQTFFTCDTDFLRPSDTVMQKAWRERNPPARIKAAYQALELNNDCATAYVLLAEEEATTIVDAERLFKQALKAGETIYRQSQQCQHQSPQHEAQLRRDTNVLVYIKRRLAMCARKLGRIREAVKIMRDLMKEFPPLTMLNIHENLLESLLELQAYPDVQAVLAKYDDISLPKSAAICYTAALLKTRTVSEKFSPETASRRGLSTAEINAVEAIHRAVEFNPHVPKYLLEMKSLILPPEHILKRGDSEAIAYAFFHLQHWKRIEGALNLLQCTWEGTFRMIPYPLEKGHLFYPYPSCTETADRELLPTFHHVSVYPKKELPLFIHFTAGFCSSTAMIAILTHQFPEIMGIFAKAVSMISRTCVDYL

SEQ ID NO: 6966 - protein, 62 aa, Homo sapiens
MKVLISSLLLLLPLMLMSMVSSSLNPGVARGHRDRGQASRRWLQEGGQECECKAMLLFQIGS

SEQ ID NO: 6967 - protein, 247 aa, Homo sapiens
MSMSPTVIILACLGFFLDQSVWAHVGLYEKPSLTARPGPTVRAGENVTLSCSSQSSFDIYHLSREGEAHELRLPAVPSINGTFQADFPLGPATHGETYRCFGSFHGSPYEWSDPSDPLPVSVTGNPSSSWPSPTEPSFKTDAAVMNQEPAGHRTVNREDSDEQDPQEVTYAQLDHCIFTQRKITGPSQRSKRPSTDTSVCIELPNAEPRALSPAHEHHSQALMGSSRETTALSQTQLASSNVPAAGI

SEQ ID NO: 6968 - protein, 149 aa, Homo sapiens
MPCCSHRRCREDPGTSESQEMEEWALLDISQRKLYKEVMLETFRNLTSVGKSWKDQNIEYEYQNPRRNFRSLIEKKVNEIKDDSHCGETFTQVPDDRLNFQEKKASPEIKSCDSFVCGEVGLGNSSFNMNIRGDIGHKAYEYQEYGPKP

SEQ ID NO: 6969 - protein, 377 aa, Homo sapiens
MDPAARVVRALWPGGCALAWRLGGRPQPLLPTQSRAGFAGAAGGPSPVAAARKGSPRLLGAAALALGGALGLYHTARWHLRAQDLHAERSAAQLSLSSRLQLTLYQYKTCPFCSKVRAFLDFHALPYQVVEVNPVRRAEIKFSSYRKVPILVAQEGESSQQLNDSSVIISALKTYLVSGQPLEEIITYYPAMKAVNEQGKEVTEFGNKYWLMLNEKEAQQVYGGKEARTEEMKWRQWADDWLVHLISPNVYRTPTEALASFDYIVREGKFGAVEGAVAKYMGAAAMYLISKRLKSRHRLQDNVREDLYEAADKWVAAVGKDRPFMGGQKPNLADLAVYGVLRVMEGLDAFDDLMQHTHIQPWYLRVERAITEASPAH

SEQ ID NO: 6970 - protein, 333 aa, Homo sapiens [sequence omitted]

SEQ ID NO: 6971 - protein, 304 aa, Homo sapiens
MATWKSPCFLYCLFILGPRLTGQNNSVDLTNEETTDSTTSKISPSEDTQQENGSMFSLITWNIDGLDLNNLSERARGVCSYLALYSPDVIFLQEVIPPYYSYLKKRSSNYEIITGHEEGYFTAIMLKKSRVKLKSQEIIPFPSTKMMRNLLCVHVNVSGNELCLMTSHLESTRGHAAERMNQLKMVLKKMQEAPESATVIFAGDTNLRDREVTRCGGLPNNIVDVWEFLGKPKHCQYTWDTQMNSNLGITAACKLRFDRIFFRAAAEEGHIIPRSLDLLGLEKLDCGRFPSDHWGLLCNLDIIL

SEQ ID NO: 6972 - protein, 1276 aa, Homo sapiens
MASDSPARSLDEIDLSALRDPAGIFELVELVGNGTYGQVYKGRHVKTGQLAAIKVMDVTGDEEEEIKQEINMLKKYSHHRNIATYYGAFIKKNPPGMDDQLWLVMEFCGAGSVTDLIKNTKGNTLKEEWIAYICREILRGLSHLHQHKVIHRDIKGQNVLLTENAEVKLVDFGVSAQLDRTVGRRNTFIGTPYWMAPEVIACDENPDATYDFKSDLWSLGITAIEMAEGAPPLCDMHPMRALFLIPRNPAPRLKSKKWSKKFQSFIESCLVKNHSQRPATEQLMKHPFIRDQPNERQVRIQLKDHIDRTKKKRGEKDETEYEYSGSEEEEEENDSGEPSSILNLPGESTLRRDFLRLQLANKERSEALRRQQLEQQQRENEEHKRQLLAERQKRIEEQKEQRRRLEEQQRREKELRKQQEREQRRHYEEQMRREEERRRAEHEQEYKRKQLEEQRQAERLQRQLKQERDYLVSLQHQRQEQRPVEKKPLYHYKEGMSPSEKPAWAKEIPHLVAVKSQGPALTASQSVHEQPTKGLSGFQEALNVTSHRVEMPRQNSDPTSENPPLPTRIEKFDRSSWLRQEEDIPPKVPQRTTSISPALARKNSPGNGSALGPRLGSQPIRASNPDLRRTEPILESPLQRTSSGSSSSSSTPSSQPSSQGGSQPGSQAGSSERTRVRANSKSEGSPVLPHEPAKVKPEESRDITRPSRPASYKKAIDEDLTALAKELRELRIEETNRPMKKVTDYSSSSEESESSEEEEEDGESETHDGTVAVSDIPRLIPTGAPGSNEQYNVGMVGTHGLETSHADSFSGSISREGTLMIRETSGEKKRSGHSDSNGFAGHINLPDLVQQSHSPAGTPTEGLGRVSTHSQEMDSGTEYGMGSSTKASFTPFVDPRVYQTSPTDEDEEDEESSAAALFTSELLRQEQAKLNEARKISVVNVNPTNIRPHSDTPEIRKYKKRFNSEILCAALWGVNLLVGTENGLMLLDRSGQGKVYNLINRRRFQQMDVLEGLNVLVTISGKKNKLRVYYLSWLRNRILHNDPEVEKKQGWITVGDLEGCIHYKVVKYERIKFLVIALKNAVEIYAWAPKPYHKFMAFKSFADLQHKPLLVDLTVEEGQRLKVIFGSHTGFHVIDVDSGNSYDIYIPSHIQGNITPHAIVILPKTDGMEMLVCYEDEGVYVNTYGRITKDVVLQWGEMPTSVAYIHSNQIMGWGEKAIEIRSVETGHLDGVFMHKRAQRLKFLCERNDKVFFASVRSGGSSQVFFMTLNRNSMMNW

SEQ ID NO: 6973 - protein, 605 aa, Homo sapiens
MGRLLRAARLPPLLSPLLLLLVGGAFLGACVAGSDEPGPEGLTSTSLLDLLLPTGLEPLDSEEPSETMGLGAGLGAPGSGFPSEENEESRILQPPQYFWEEEEELNDSSLDLGPTADYVFPDLTEKAGSIEDTSQAQELPNLPSPLPKMNLVEPPWHMPPREEEEEEEEEEEREKEEVEKQEEEEEEELLPVNGSQEEAKPQVRDFSLTSSSQTPGATKSRHEDSGDQASSGVEVESSMGPSLLLPSVTPTTVTPGDQDSTSQEAEATVLPAAGLGVEFEAPQEASEEATAGAAGLSGQHEEVPALPSFPQTTAPSGAEHPDEDPLGSRTSASSPLAPGDMELTPSSATLGQEDLNQQLLEGQAAEAQSRIPWDSTQVICKDWSNLAGKNYIILNMTENIDCEVFRQHRGPQLLALVEEVLPRHGSGHHGAWHISLSKPSEKEQHLLMTLVGEQGVVPTQDVLSMLGDIRRSLEEIGIQNYSTTSSCQARASQVRSDYGTLFVVLVVIGAICIIIIALGLLYNCWQRRLPKLKHVSHGEELRFVENGCHDNPTLDVASDSQSEMQEKHPSLNGGGALNGPGSWGALMGGKRDPEDSDVFEEDTHL

SEQ ID NO: 6974 - protein, 361 aa, Homo sapiens
MRGQRSLLLGPARLCLRLLLLLGYRRRCPPLLRGLVQRWRYGKVCLRSLLYNSFGGSDTAVDAAFEPVYWLVDNVIRWFGVVFVVLVIVLTGSIVAIAYLCVLPLILRTYSVPRLCWHFFYSHWNLILIVFHYYQAITTPPGYPPQGRNDIATVSICKKCIYPKPARTHHCSICNRCVLKMDHHCPWLNNCVGHYNHRYFFSFCFFMTLGCVYCSYGSWDLFREAYAAIETYHQTPPPTFSFRERMTHKSLVYLWFLCSSVALALGALTVWHAVLISRGETSIERHINKKERRRLQAKGRVFRNPYNYGCLDNWKVFLGVDTGRHWLTRVLLPSSHLPHGNGMSWEPPPWVTAHSASVMAV

SEQ ID NO: 6975 - protein, 164 aa, Homo sapiens
MSVDPLSSKALKIKRELSENTPHLSDEALMGLSVRELNRHLRGLSAEEVTRLKQRRRTLKNRGYAASCRVKRVCQKEELQKQKSELEREVDKLARENAAMRLELDALRGKCEALQGFARSVAAARGPATLVAPASVITIVKSTPGSGSGPAHGPDPAHGPASCS

SEQ ID NO: 6976 - protein, 1251 aa, Homo sapiens
MRLLLLVPLLLAPAPGSSAPKVRRQSDTWGPWSQWSPCSRTCGGGVSFRERPCYSQRRDGGSSCVGPARSHRSCRTESCPDGARDFRAEQCAEFDGAEFQGRRYRWLPYYSAPNKCELNCIPKGENFYYKHREAVVDGTPCEPGKRDVCVDGSCRVVGCDHELDSSKQEDKCLRCGGDGTTCYPVAGTFDANDLSRAVKNVRGEYYLNGHWTIEAARALPAASTILHYERGAEGDLAPERLHARGPTSEPLVIELISQEPNPGVHYEYHLPLRRPSPGFSWSHGSWSDCSAECGGGHQSRLVFCTIDHEAYPDHMCQRQPRPADRRSCNLHPCPETKRWKAGPWAPCSASCGGGSQSRSVYCISSDGAGIQEAVEEAECAGLPGKPPAIQACNLQRCAAWSPEPWGECSVSCGVGVRKRSVTCRGERGSLLHTAACSLEDRPPLTEPCVHEDCPLLSDQAWHVGTWGLCSKSCSSGTRRRQVICAIGPPSHCGSLQHSKPVDVEPCNTQPCHLPQEVPSMQDVHTPASNPWMPLGPQESPASDSRGQWWAAQEHPSARGDHRGERGDPRGDQGTHLSALGPAPSLQQPPYQQPLRSGSGPHDCRHSPHGCCPDGHTASLGPQWQGCPGAPCQQSRYGCCPDRVSVAEGPHHAGCTKSYGGDSTGGMPRSRAVASTVHNTHQPQAQQNEPSECRGSQFGCCYDNVATAAGPLGEGCVGQPSHAYPVRCLLPSAHGSCADWAARWYFVASVGQCNRFWYGGCHGNANNFASEQECMSSCQGSLHGPRRPQPGASGRSTHTDGGGSSPAGEQEPSQHRTGAAVQRKPWPSGGLWRQDQQPGPGEAPHTQAFGEWPWGQELGSRAPGLGGDAGSPAPPFHSSSYRISLAGVEPSLVQAALGQLVRLSCSDDTAPESQAAWQKDGQPISSDRHRLQFDGSLIIHPLQAEDAGTYSCGSTRPGRDSQKIQLRIIGGDMAVLSEAELSRFPQPRDPAQDFGQAGAAGPLGAIPSSHPQPANRLRLDQNQPRVVDASPGQRIRMTCRAEGFPPPAIEWQRDGQPVSSPRHQLQPDGSLVISRVAVEDGGFYTCVAFNGQDRDQRWVQLRVLGELTISGLPPTVTVPEGDTARLLCVVAGESVNIRWSRNGLPVQADGHRVHQSPDGTLLIYNLRARDEGSYTCSAYQGSQAVSRSTEVKVVSPAPTAQPRDPGRDCVDQPELANCDLILQAQLCGNEYYSSFCCASCSRFQPHAQPIWQ

SEQ ID NO: 6977 - protein, 1091 aa, Homo sapiens
MSAKAISEQTGKELLYKFICTTSAIQNRFKYARVTPDTDWARLLQDHPWLLSQNLVVKPDQLIKRRGKLGLVGVNLTLDGVKSWLKPRLGQEATVGKATGFLKNFLIEPFVPHSQAEEFYVCIYATREGDYVLFHHEGGVDVGDVDAKAQKLLVGVDEKLNPEDIKKHLLVHAPEDKKEILASFISGLFNFYEDLYFTYLEINPLVVTKDGVYVLDLAAKVDATADYICKVKWGDIEFPPPFGREAYPEEAYIADLDAKSGASLKLTLLNPKGRIWTMVAGGGASVVYSDTICDLGGVNELANYGEYSGAPSEQQTYDYAKTILSLMTREKHPDGKILIIGGSIANFTNVAATFKGIVRAIRDYQGPLKEHEVTIFVRRGGPNYQEGLRVMGEVGKTTGIPIHVFGTETHMTAIVGMALGHRPIPNQPPTAAHTANFLLNASGSTSTPAPSRTASFSESRADEVAPAKKAKPAMPQGKSTTLFSRHTKAIVWGMQTRAVQGMLDFDYVCSRDEPSVAAMVYPFTGDHKQKFYWGHKEILIPVFKNMADAMRKHPEVDVLINFASLRSAYDSTMETMNYAQIRTIAIIAEGIPEALTRKLIKKADQKGVTIIGPATVGGIKPGCFKIGNTGGMLDNILASKLYRPGSVAYVSRSGGMSNELNNIISRTTDGVYEGVAIGGDRYPGSTFMDHVLRYQDTPGVKMIVVLGEIGGTEEYKICRGIKEGRLTKPIVCWCIGTCATMFSSEVQFGHAGACANQASETAVAKNQALKEAGVFVPRSFDELGEIIQSVYEDLVANGVIVPAQEVPPPTVPMDYSWARELGLIRKPASFMTSICDERGQELIYAGMPITEVFKEEMGIGGVLGLLWFQKRLPKYSCQFIEMCLMVTADHGPAVSGAHNTIICARAGKDLVSSLTSGLLTIGDRFGGALDAAAKMFSKAFDSGIIPMEFVNKMKKEGKLIMGIGHRVKSINNPDMRVQILKDYVRQHFPATPLLDYALEVEKITTSKKPNLILNVDGLIGVAFVDMLRNCGSFTREEADEYIDIGALNGIFVLGRSMGFIGHYLDQKRLKQGLYRHPWDDISYVLPEHMSM

SEQ ID NO: 6978 - protein, 514 aa, Homo sapiens
MGRPESAGGGSRGPFEGGGRARRAGGIFLTLSILRTRDLPSGAMSEGVDLIDIYADEEFNQDPEFNNTDQIDLYDDVLTATSQPSDDRSSSTEPPPPVRQEPSPKPNNKTPAILYTYSGLRNRRAAVYVGSFSWWTTDQQLIQVIRSIGVYDVVELKFAENRANGQSKGYAEVVVASENSVHKLLELLPGKVLNGEKVDVRPATRQNLSQFEAQARKRECVRVPRGGIPPRAHSRDSSDSADGRATPSENLVPSSARVDKPPSVLPYFNRPPSALPLMGLPPPPIPPPPPLSSSFGVPPPPPGIHYQHLMPPPPRLPPHLAVPPPGAIPPALHLNPAFFPPPNATVGPPPDTYMKASAPYNHHGSRDSGPPPSTVSEAEFEDIMKRNRAISSSAISKAVSGASAGDYSDAIETLLTAIAVIKQSRVANDERCRVLISSLKDCLHGIEAKSYSVGASGSSSRKRHRSRERSPSRSRESSRRHRDLLHNEDRHDDYFQERNREHERHRDRERDRHH

SEQ ID NO: 6979 - protein, 873 aa, Homo sapiens
MNPGFDLSRRNPQEDFELIQRIGSGTYGDVYKARNVNTGELAAIKVIKLEPGEDFAVVQQEIIMMKDCKHPNIVAYFGSYLRRDKLWICMEFCGGGSLQDIYHVTGPLSELQIAYVSRETLQGLYYLHSKGKMHRDIKGANILLTDNGHVKLADFGVSAQITATIAKRKSFIGTPYWMAPEVAAVERKGGYNQLCDLWAVGITAIELAELQPPMFDLHPMRALFLMTKSNFQPPKLKDKMKWSNSFHHFVKMALTKNPKKRPTAEKLLQHPFVTQHLTRSLAIELLDKVNNPDHSTYHDFDDDDPEPLVAVPHRIHSTSRNVREEKTRSEITFGQVKFDPPLRKETEPHHELDLQLEYGQGHQGGYFLGANKSLLKSVEEELHQRGHVAHLEDDEGDDDESKHSTLKAKIPPPLPPKPKSIFIPQEMHSTEDENQGTIKRCPMSGSPAKPSQVPPRPPPPRLPPHKPVALGNGMSSFQLNGERDGSLCQQQNEHRGTNLSRKEKKDVPKPISNGLPPTPKVHMGACFSKVFNGCPLKIHCASSWINPDTRDQYLIFGAEEGIYTLNLNELHETSMEQLFPRRCTWLYVMNNCLLSISGKASQLYSHNLPGLFDYARQMQKLPVAIPAHKLPDRILPRKFSVSAKIPETKWCQKCCVVRNPYTGHKYLCGALQTSIVLLEWVEPMQKFMLIKHIDFPIPCPLRMFEMLVVPEQEYPLVCVGVSRGRDFNQVVRFETVNPNSTSSWFTESDTPQTNVTHVTQLERDTILVCLDCCIKIVNLQGRLKSSRKLSSELTFDFQIESIVCLQDSVLAFWKHGMQGRSFRSNEVTQEISDSTRIFRLLGSDRVVVLESRPTDNPTANSNLYILAGHENSY

SEQ ID NO: 6980 - protein, 751 aa, Homo sapiens
MAATGTAAAAATGRLLLLLLVGLTAPALALAGYIEALAANAGTGFAVAEPQIAMFCGKLNMHVNIQTGKWEPDPTGTKSCFETKEEVLQYCQEMYPELQITNVMEANQRVSIDNWCRRDKKQCKSRFVTPFKCLVGEFVSDVLLVPEKCQFFHKERMEVCENHQHWHTVVKEACLTQGMTLYSYGMLLPCGVDQFHGTEYVCCPQTKIIGSVSKEEEEEDEEEEEEEDEEEDYDVYKSEFPTEADLEDFTEAAVDEDDEDEEEGEEVVEDRDYYYDTFKGDDYNEENPTEPGSDGTMSDKEITHDVKAVCSQEAMTGPCRAVMPRWYFDLSKGKCVRFIYGGCGGNRNNFESEDYCMAVCKAMIPPTPLPTNDVDVYFETSADDNEHARFQKAKEQLEIRHRNRMDRVKKEWEEAELQAKNLPKAERQTLIQHFQAMVKALEKEAASEKQQLVETHLARVEAMLNDRRRMALENYLAALQSDPPRPHRILQALRRYVRAENKDRLHTIRHYQHVLAVDPEKAAQMKSQVMTHLHVIEERRNQSLSLLYKVPYVAQEIQEEIDELLQEQRADMDQFTASISETPVDVRVSSEESEEIPPFHPFHPFPALPENEGSGVGEQDGGLIGAEEKVINSKNKVDENMVIDETLDVKEMIFNAERVGGLEEERESVGPLREDFSLSSSALIGLLVIAVAIATVIVISLVMLRKRQYGTISHGIVEVDPMLTPEERHLNKMQNHGYENPTYKYLEQMQI

SEQ ID NO: 6981 - protein, 469 aa, Homo sapiens
MGTVHARSLEPLPSSGPDFGGLGEEAEFVEVEPEAKQEILENKDVVVQHVHFDGLGRTKDDIIICEIGDVFKAKNLIEVMRKSHEAREKLLRLGIFRQVDVLIDTCQGDDALPNGLDVTFEVTELRRLTGSYNTMVGNNEGSMVLGLKLPNLLGRAEKVTFQFSYGTKETSYGLSFFKPRPGNFERNFSVNLYKVTGQFPWSSLRETDRGMSAEYSFPIWKTSHTVKWEGVWRELGCLSRTASFAVRKESGHSLKSSLSHAMVIDSRNSSILPRRGALLKVNQELAGYTGGDVSFIKEDFELQLNKQLIFDSVFSASFWGGMLVPIGDKPSSIADRFYLGGPTSIRGFSMHSIGPQSEGDYLGGEAYWAGGLHLYTPLPFRPGQGGFGELFRTHFFLNAGNLCNLNYGEGPKAHIRKLAECIRWSYGAGIVLRLGNIARLELNYCVPMGVQTGDRICDGVQFGAGIRFL

SEQ ID NO: 6982 - protein, 578 aa, Homo sapiens
MDFLLFQFGLCTFKYDYTDSKYITKSFNFYVFPKPFNRSSPDVKFVCQSSSIDFLASQGFDFNKVFRNGIPYLNQEEERQLREQYDEKRSQANGAGALSYVSPNTSKCPVTIPEDQKKFIDQVVEKIEDLLQSEENKNLDLEPCTGFQRKLIYQTLSWKYPKGIHVETLETEKKERYIVISKVDEEERKRREQQKHAKEQEELNDAVGFSRVIHAIANSGKLVIGHNMLLDVMHTVHQFYCPLPADLSEFKEMTTCVFPRLLDTKLMASTQPFKDIINNTSLAELEKRLKETPFNPPKVESAEGFPSYDTASEQLHEAGYDAYITGLCFISMANYLGSFLSPPKIHVSARSKLIEPFFNKLFLMRVMDIPYLNLEGPDLQPKRDHVLHVTFPKEWKTSDLYQLFSAFGNIQISWIDDTSAFVSLSQPEQVKIAVNTSKYAESYRIQTYAEYMGRKQEEKQIKRKWTEDSWKEADSKRLNPQCIPYTLQNHYYRNNSFTAPSTVGKRNLSPSQEEAGLEDGVSGEISDTELEQTDSCAEPLSEGRKKAKKLKRMKKELSPAGSISKNSPATLFEVPDTW

SEQ ID NO: 6983 - protein, 695 aa, Homo sapiens
MLPGLALLLLAAWTARALEVPTDGNAGLLAEPQIAMFCGRLNMHMNVQNGKWDSDPSGTKTCIDTKEGILQYCQEVYPELQITNVVEANQPVTIQNWCKRGRKQCKTHPHFVIPYRCLVGEFVSDALLVPDKCKFLHQERMDVCETHLHWHTVAKETCSEKSTNLHDYGMLLPCGIDKFRGVEFVCCPLAEESDNVDSADAEEDDSDVWWGGADTDYADGSEDKVVEVAEEEEVAEVEEEEADDDEDDEDGDEVEEEAEEPYEEATERTTSIATTTTTTTESVEEVVRVPTTAASTPDAVDKYLETPGDENEHAHFQKAKERLEAKHRERMSQVMREWEEAERQAKNLPKADKKAVIQHFQEKVESLEQEAANERQQLVETHMARVEAMLNDRRRLALENYITALQAVPPRPRHVFNMLKKYVRAEQKDRQHTLKHFEHVRMVDPKKAAQIRSQVMTHLRVIYERMNQSLSLLYNVPAVAEEIQDEVDELLQKEQNYSDDVLANMISEPRISYGNDALMPSLTETKTTVELLPVNGEFSLDDLQPWHSFGADSVPANTENEVEPVDARPAADRGLTTRPGSGLTNIKTEEISEVKMDAEFRHDSGYEVHHQKLVFFAEDVGSNKGAIIGLMVGGVVIATVIVITLVMLKKKQYTSIHHGVVEVDAAVTPEERHLSKMQQNGYENPTYKFFEQMQN

SEQ ID NO: 6984 - protein, 136 aa, Homo sapiens
MVRPYPLIYFLFLPLGACFPLLDRREPTDAMGGLGAGERWADLAMGPRPHSVWGSSRWLRASQPQALLVIARGLQTSGREHAGCRFRFGRQDEGSEATGFLPAAGEKTSGPLGNLAEELNGYSRKKGGFSFRFGRR

SEQ ID NO: 6985 - protein, 798 aa, Homo sapiens
MEASGKLICRQRQVLFSFLLLGLSLAGAAEPRSYSVVEETEGSSFVTNLAKDLGLEQREFSRRGVRVVSRGNKLHLQLNQETADLLLNEKLDREDLCGHTEPCVLRFQVLLESPFEFFQAELQVIDINDHSPVFLDKQMLVKVSESSPPGTTFPLKNAEDLDVGQNNIENYIISPNSYFRVLTRKRSDGRKYPELVLDKALDREEEAELRLTLTALDGGSPPRSGTAQVYIEVLDVNDNAPEFEQPFYRVQISEDSPVGFLVVKVSATDVDTGVNGEISYSLFQASEEIGKTFKINPLTGEIELKKQLDFEKLQSYEVNIEARDAGTFSGKCTVLIQVIDVNDHAPEVTMSAFTSPIPENAPETVVALFSVSDLDSGENGKISCSIQEDLPFLLKSAENFYTLLTERPLDRESRAEYNITITVTDLGTPMLITQLNMTVLIADVNDNAPAFTQTSYTLFVRENNSPALHIRSVSATDRDSGTNAQVTYSLLPPQDPHLPLTSLVSINADNGHLFALRSLDYEALQGFQFRVGASDHGSPALSSEALVRVVVLDANDNSPFVLYPLQNGSAPCTELVPRAAEPGYLVTKVVAVDGDSGQNAWLSYQLLKATELGLFGVWAHNGEVRTARLLSERDAAKHRLVVLVKDNGEPPRSATATLHVLLVDGFSQPYLPLPEAAPTQAQADLLTVYLVVALASVSSLFLFSVLLFVAVRLCRRSRAASVGRCLVPEGPLPGHLVDMSGTRTLSQSYQYEVCLAGGSGTNEFKFLKPIIPNFPPQCPGKEIQGNSTFPNNFGFNIQ

SEQ ID NO: 6986 - protein, 318 aa, Homo sapiens
MDKQNSQMNASHPETNLPVGYPPQYPPTAFQGPPGYSGYPGPQVSYPPPPAGHSGPGPAGFPVPNQPVYNQPVYNQPVGAAGVPWMPAPQPPLNCPPGLEYLSQIDQILIHQQIELLEVLTGFETNNKYEIKNSFGQRVYFAAEDTDCCTRNCCGPSRPFTLRIIDNMGQEVITLERPLRCSSCCCPCCLQEIEIQAPPGVPIGYVIQTWHPCLPKFTIQNEKREDVLKISGPCVVCSCCGDVDFEIKSLDEQCVVGKISKHWTGILREAFTDADNFGIQFPLDLDVKMKAVMIGACFLIDFMFFESTGSQEQKSGVW

SEQ ID NO: 6987 - protein, 798 aa, Homo sapiens
MASEARGGLGAPPLQSARSLPGPAPCLKHFPLDLRTSMDGKCKEIAEELFTRSLAESELRSAPYEFPEESPIEQLEERRQRLERQISQDVKLEPDILLRAKQDFLKTDSDSDLQLYKEQGEGQGDRSLRERDVLEREFQRVTISGEEKCGVPFTDLLDAAKSVVRALFIREKYMALSLQSFCPTTRRYLQQLAEKPLETRTYEQGPDTPVSADAPVHPPALEQHPYEHCEPSTMPGDLGLGLRMVRGVVHVYTRREPDEHCSEVELPYPDLQEFVADVNVLMALIINGPIKSFCYRRLQYLSSKFQMHVLLNEMKELAAQKKVPHRDFYNIRKVDTHIHASSCMNQKHLLRFIKRAMKRHLEEIVHVEQGREQTLREVFESMNLTAYDLSVDTLDVHADRNTFHRFDKFNAKYNPIGESVLREIFIKTDNRVSGKYFAHIIKEVMSDLEESKYQNAELRLSIYGRSRDEWDKLARWAVMHRVHSPNVRWLVQVPRLFDVYRTKGQLANFQEMLENIFLPLFEATVHPASHPELHLFLEHVDGFDSVDDESKPENHVFNLESPLPEAWVEEDNPPYAYYLYYTFANMAMLNHLRRQRGFHTFVLRPHCGEAGPIHHLVSAFMLAENISHGLLLRKAPVLQYLYYLAQIGIAMSPLSNNSLFLSYHRNPLPEYLSRGLMVSLSTDDPLQFHFTKEPLMEEYSIATQVWKLSSCDMCELARNSVLMSGFSHKVKSHWLGPNYTKEGPEGNDIRRTNVPDIRVGYRYETLCQELALITQAVQSEMLETIPEEAGITMSPGPQ

SEQ ID NO: 6988 - protein, 1030 aa, Homo sapiens
MRSEALLLYFTLLHFAGAGFPEDSEPISISHGNYTKQYPVFVGHKPGRNTTQRHRLDIQMIMIMNGTLYIAARDHIYTVDIDTSHTEEIYCSKKLTWKSRQADVDTCRMKGKHKDECHNFIKVLLKKNDDALFVCGTNAFNPSCRNYKMDTLEPFGDEFSGMARCPYDAKHANVALFADGKLYSATVTDFLAIDAVIYRSLGESPTLRTVKHDSKWLKEPYFVQAVDYGDYIYFFFREIAVEYNTMGKVVFPRVAQVCKNDMGGSQRVLEKQWTSFLKARLNCSVPGDSHFYFNILQAVTDVIRINGRDVVLATFSTPYNSIPGSAVCAYDMLDIASVFTGRFKEQKSPDSTWTPVPDERVPKPRPGCCAGSSSLERYATSNEFPDDTLNFIKTHPLMDEAVPSIFNRPWFLRTMVRYRLTKIAVDTAAGPYQNHTVVFLGSEKGIILKFLARIGNSGFLNDSLFLEEMSVYNSEKCSYDGVEDKRIMGMQLDRASSSLYVAFSTCVIKVPLGRCERHGKCKKTCIASRDPYCGWIKEGGACSHLSPNSRLTFEQDIERGNTDGLGDCHNSFVALNGHSSSLLPSTTTSDSTAQEGYESRGGMLDWKHLLDSPDSTDPLGAVSSHNHQDKKGVIRESYLKGHDQLVPVTLLAIAVILAFVMGAVFSGITVYCVCDHRRKDVAVVQRKEKELTHSRRGSMSSVTKLSGLFGDTQSKDPKPEAILTPLMHNGKLATPGNTAKMLIKADQHHLDLTALPTPESTPTLQQKRKPSRGSREWERNQNLINACTKDMPPMGSPVIPTDLPLRASPSHIPSVVVLPITQQGYQHEYVDQPKMSEVAQMALEDQAATLEYKTIKEHLSSKSPNHGVNLVENLDSLPPKVPQREASLGPPGASLSQTGLSKRLEMHHSSSYGVDYKRSYPTNSLTRSHQATTLKRNNTNSSNSSHLSRNQSFGRGDNPPPAPQRVDSIQVHSSQPSGQAVTVSRQPSLNAYNSLTRSGLKRTPSLKPDVPPKPSFAPLSTSMKPNDACT

SEQ ID NO: 6989 - protein, 436 aa, Homo sapiens
MAALSKSIPHNCYEIGHTWHPSCRVSFLQITGGALEESLKIYAPLYLIAAILRKRKLDYYLHKLLPEILQSASFLTANGALYMAFFCILRKILGKFYSWTPGFGAALPASYVAILIERKSRRGLLTIYMANLVLLFCITAAMYMFFFRCKDGLKGFTFSALRFIVGKEEIPTHSFSPEAAYAKVEQKREQHEEKPGRMNMIGLVRKFVDSICKHGPRHRCCKHYEDNCISYCIKGFIRMFSVGYLIQCCLRIPSAFRHLFTQPSRLLSLFYNKENFQLGAFLGSFVSIYKGTSCFLRWIRNLDDELHAIIAGFLAGISMMFYKSTTISMYLASKLVETMYFKGIEAGKVPYFPHADTIIYSISTAICFQAAVMEVQTLRPSYWKFLLRLTKGKFAVMNRKVLDVFGTGASKHFQDFIPRLDPRYTTVTPELPTEFS

SEQ ID NO: 6990 - protein, 263 aa, Homo sapiens
MAETLFWTPLLVVLLAGLGDTEAQQTTLHPLVGRVFVHTLDHETFLSLPEHVAVPPAVHITYHAHLQGHPDLPRWLRYTQRSPHHPGFLYGSATPEDRGLQVIEVTAYNRDSFDTTRQRLVLEIGDPEGPLLPYQAEFLVRSHDAEEVLPSTPASRFLSALGGLWEPGELQLLNVTSALDRGGRVPLPIEGRKEGLKRDLATSDIQMVHHCTIHGNTEELRQMAASREVPRPLSTLPMFNVHTGERLPPRVDSAQVPLILDQH

SEQ ID NO: 6991 - protein, 371 aa, Homo sapiens
MAWTKYQLFLAGLMLVTGSINTLSAKWADNFMAEGCGGSKEHSFQHPFLQAVGMFLGEFSCLAAFYLLRCRAAGQSDSSVDPQQPFNPLLFLPPALCDMTGTSLMYVALNMTSASSFQMLRGAVIIFTGLFSVAFLGRRLVLSQWLGILATIAGLVVVGLADLLSKHDSQHKLSEVITGDLLIIMAQIIVAIQMVLEEKFVYKHNVHPLRAVGTEGLFGFVILSLLLVPMYYIPAGSFSGNPRGTLEDALDAFCQVGQQPLIAVALLGNISSIAFFNFAGISVTKELSATTRMVLDSLRTVVIWALSLALGWEAFHALQILGFLILLIGTALYNGLHRPLLGRLSRGRPLAEESEQERLLGGTRTPINDAS

SEQ ID NO: 6992 - protein, 287 aa, Homo sapiens
MAAEARVSRWYFGGLASCGAACCTHPLDLLKVHLQTQQEVKLRMTGMALRVVRTDGILALYSGLSASLCRQMTYSLTRFAIYETVRDRVAKGSQGPLPFHEKVLLGSVSGLAGGFVGTPADLVNVRMQNDVKLPQGQRRNYAHALDGLYRVAREEGLRRLFSGATMASSRGALVTVGQLSCYDQAKQLVLSTGYLSDNIFTHFVASFIAGGCATFLCQPLDVLKTRLMNSKGEYQGVFHCAVETAKLGPLAFYKGLVPAGIRLIPHTVLTFVFLEQLRKNFGIKVPS

SEQ ID NO: 6993 - protein, 233 aa, Homo sapiens [sequence omitted]

SEQ ID NO: 6994 - protein, 294 aa, Homo sapiens
MASASGAMAKHEQILVLDPPTDLKFKGPFTDVVTTNLKLRNPSDRKVCFKVKTTAPRRYCVRPNSGIIDPGSTVTVSVMLQPFDYDPNEKSKHKFMVQTIFAPPNTSDMEAVWKEAKPDELMDSKLRCVFEMPNENDKLGITPPGNAPTVTSMSSINNTVATPASYHTKDDPRGLSVLKQEKQKNDMEPSKAVPLNASKQDGPMPKPHSVSLNDTETRKLMEECKRLQGEMMKLSEENRHLRDEGLRLRKVAHSDKPGSTSTASFRDNVTSPLPSLLVVIAAIFIGFFLGKFIL

SEQ ID NO: 6995 - protein, 546 aa, Homo sapiens
MAWPKLPAPWLLLCTWLPAGCLSLLVTVQHTERYVTLFASIILKCDYTTSAQLQDVVVTWRFKSFCKDPIFDYYSASYQAALSLGQDPSNDCNDNQREVRIVAQRRGQNEPVLGVDYRQRKITIQNRADLVINEVMWWDHGVYYCTIEAPGDTSGDPDKEVKLIVLHWLTVIFIILGALLLLLLIGVCWCQCCPQYCCCYIRCPCCPAHCCCPEEALARHRYMKQAQALGPQMMGKPLYWGADRSSQVSSYPMHPLLQRDLSLPSSLPQMPMTQTTNQPPIANGVLEYLEKELRNLNLAQPLPPDLKGRFGHPCSMLSSLGSEVVERRIIHLPPLIRDLSSSRRTSDSLHQQWLTPIPSRPWDLREGRSHHHYPDFHQELQDRGPKSWALERRELDPSWSGRHRSSRLNGSPIHWSDRDSLSDVPSSSEARWRPSHPPFRSRCQERPRRPSPRESTQRHGRRRRHRSYSPPLPSGLSSWSSEEDKERQPQSWRAHRRGSHSPHWPEEKPPSYRSLDITPGKNSRKKGSVERRSEKDSSHSGRSVVI

SEQ ID NO: 6996 - protein, 480 aa, Homo sapiens
MEVAPEQPRWMAHPAVLNAQHPDSHHPGLAHNYMEPAQLLPPDEVDVFFNHLDSQGNPYYANPAHARARVSYSPAHARLTGGQMCRPHLLHSPGLPWLDGGKAALSAAAAHHHNPWTVSPFSKTPLHPSAAGGPGGPLSVYPGAGGGSGGGSGSSVASLTPTAAHSGSHLFGFPPTPPKEVSPDPSTTGAASPASSSAGGSAARGEDKDGVKYQVSLTESMKMESGSPLRPGLATMGTQPATHHPIPTYPSYVPAAAHDYSSGLFHPGGFLGGPASSFTPKQRSKARSCSEGRECVNCGATATPLWRRDGTGHYLCNACGLYHKMNGQNRPLIKPKRRLSAARRAGTCCANCQTTTTTLWRRNANGDPVCNACGLYYKLHNVNRPLTMKKEGIQTRNRKMSNKSKKSKKGAECFEELSKCMQEKSSPFSAAALAGHMAPVGHLPPFSHSGHILPTPTPIHPSSSLSFGHPHPSSMVTAMG

SEQ ID NO: 6997 - protein, 3458 aa, Homo sapiens
MERSGWARQTFLLALLLGATLRARAAAGYYPRFSPFFFLCTHHGELEGDGEQGEVLISLHIAGNPTYYVPGQEYHVTISTSTFFDGLLVTGLYTSTSVQASQSIGGSSAFGFGIMSDHQFGNQFMCSVVASHVSHLPTTNLSFIWIAPPAGTGCVNFMATATHRGQVIFKDALAQQLCEQGAPTDVTVHPHLAEIHSDSIILRDDFDSYHQLQLNPNIWVECNNCETGEQCGAIMHGNAVTFCEPYGPRELITTGLNTTTASVLQFSIGSGSCRFSYSDPSIIVLYAKNNSADWIQLEKIRAPSNVSTIIHILYLPEDAKGENVQFQWKQENLRVGEVYEACWALDNILIINSAHRQVVLEDSLDPVDTGNWLFFPGATVKHSCQSDGNSIYFHGNEGSEFNFATTRDVDLSTEDIQEQWSEEFESQPTGWDVLGAVIGTECGTIESGLSMVFLKDGERKLCTPSMDTTGYGNLRFYFVMGGICDPGNSHENDIILYAKIEGRKEHITLDTLSYSSYKVPSLVSVVINPELQTPATKFCLRQKNHQGHNRNVWAVDFFHVLPVLPSTMSHMIQFSINLGCGTHQPGNSVSLEFSTNHGRSWSLLHTECLPEICAGPHLPHSTVYSSENYSGWNRITIPLPNAALTRNTRIRWRQTGPILGNMWAIDNVYIGPSCLKFCSGRGQCTRHGCKCDPGFSGPACEMASQTFPMFISESFGSSRLSSYHNFYSIRGAEVSFGCGVLASGKALVFNKDGRRQLITSFLDSSQSRFLQFTLRLGSKSVLSTCRAPDQPGEGVLLHYSYDNGITWKLLEHYSYLSYHEPRIISVELPGDAKQFGIQFRWWQPYHSSQREDVWAIDEIIMTSVLFNSISLDFTNLVEVTQSLGFYLGNVQPYCGHDWTLCFTGDSKLASSMRYVETQSMQIGASYMIQFSLVMGCGQKYTPHMDNQVKLEYSTNHGLTWHLVQEECLPSMPSCQEFTSASIYHASEFTQWRRVIVLLPQKTWSSATRFRWSQSYYTAQDEWALDSIYIGQQCPNMCSGHGSCDHGICRCDQGYQGTECHPEAALPSTIMSDFENQNGWESDWQEVIGGEIVKPEQGCGVISSGSSLYFSKAGKRQLVSWDLDTSWVDFVQFYIQIGGESASCNKPDSREEGVLLQYSNNGGIQWHLLAEMYFSDFSKPRFVYLELPAAAKTPCTRFRWWQPVFSGEDYDQWAVDDIIILSEKQKQIIPVINPTLPQNFYEKPAFDYPMNQMSVWLMLANEGMVKNETFCAATPSAMIFGKSDGDRFAVTRDLTLKPGYVLQFKLNIGCANQFSSTAPVLLQYSHDAGMSWFLVKEGCYPASAGKGCEGNSRELSEPTMYHTGDFEEWTRITIVIPRSLASSKTRFRWIQESSSQKNVPPFGLDGVYISEPCPSYCSGHGDCISGVCFCDLGYTAAQGTCVSNVPNHNEMFDRFEGKLSPLWYKITGAQVGTGCGTLNDGKSLYFNGPGKREARTVPLDTRNIRLVQFYIQIGSKTSGITCIKPRTRNEGLIVQYSNDNGILWHLLRELDFMSFLEPQIISIDLPQDAKTPATAFRWWQPQHGKHSAQWALDDVLIGMNDSSQTGFQDKFDGSIDLQANWYRIQGGQVDIDCLSMDTALIFTENIGKPRYAETWDFHVSASTFLQFEMSMGCSKPFSNSHSVQLQYSLNNGKDWHLVTEECVPPTIGCLHYTESSIYTSERFQNWKRITVYLPLSTISPRTRFRWIQANYTVGADSWAIDNVVLASGCPWMCSGRGICDAGRCVCDRGFGGPYCVPVVPLPSILKDDFNGNLHPDLWPEVYGAERGNLNGETIKSGTSLIFKGEGLRMLISRDLDCTNTMYVQFSLRFIAKSTPERSHSILLQFSISGGITWHLMDEFYFPQTTNILFINVPLPYTAQTNATRFRLWQPYNNGKKEEIWIVDDFIIDGNNVNNPVMLLDTFDFGPREDNWFFYPGGNIGLYCPYSSKGAPEEDSAMVFVSNEVGEHSITTRDLNVNENTIIQFEINVGCSTDSSSADPVRLEFSRDFGATWHLLLPLCYHSSSHVSSLCSTEHHPSSTYYAGTMQGWRREVVHFGKLHLCGSVRFRWYQGFYPAGSQPVTWAIDNVYIGPQCEEMCNGQGSCINGTKCICDPGYSGPTCKISTKNPDFLKDDFEGQLESDRFLLMSGGKPSRKCGILSSGNNLFFNEDGLRMLMTRDLDLSHARFVQFFMRLGCGKGVPDPRSQPVLLQYSLNGGLSWSLLQEFLFSNSSNVGRYIALEIPLKARSGSTRLRWWQPSENGHFYSPWVIDQILIGGNISGNTVLEDDFTTLDSRKWLLHPGGTKMPVCGSTGDALVFIEKASTRYVVSTDVAVNEDSFLQIDFAASCSVTDSCYAIELEYSVDLGLSWHPLVRDCLPTNVECSRYHLQRILVSDTFNKWTRITLPLPPYTRSQATRFRWHQPAPFDKQQTWAIDNVYIGDGCIDMCSGHGRCIQGNCVCDEQWGGLYCDDPETSLPTQLKDNFNRAPSSQNWLTVNGGKLSTVCGAVASGMALHFSGGCSRLLVTVDLNLTNAEFIQFYFMYGCLITPNNRNQGVLLEYSVNGGITWNLLMEIFYDQYSKPGFVNILLPPDAKEIATRFRWWQPRHDGLDQNDWAIDNVLISGSADQRTVMLDTFSSAPVPQHERSPADAGPVGRIAFDMFMEDKTSVNEHWLFHDDCTVERFCDSPDGVMLCGSHDGREVYAVTHDLTPTEGWIMQFKISVGCKVSEKIAQNQIHVQYSTDFGVSWNYLVPQCLPADPKCSGSVSQPSVFFPTKGWKRITYPLPESLVGNPVRFRFYQKYSDMQWAIDNFYLGPGCLDNCRGHGDCLREQCICDPGYSGPNCYLTHTLKTFLKERFDSEEIKPDLWMSLEGGSTCTECGILAEDTALYFGGSTVRQAVTQDLDLRGAKFLQYWGRIGSENNMTSCHRPICRKEGVLLDYSTDGGITWTLLHEMDYQKYISVRHDYILLPEDALTNTTRLRWWQPFVISNGIVVSGVERAQWALDNILIGGAEINPSQLVDTFDDEGTSHEENWSFYPNAVRTAGFCGNPSFHLYWPNKKKDKTHNALSSRELIIQPGYMMQFKIVVGCEATSCGDLHSVMLEYTKDARSDSWQLVQTQCLPSSSNSIGCSPFQFHEATIYNSVNSSSWKRITIQLPDHVSSSATQFRWIQKGEETEKQSWAIDHVYIGEACPKLCSGHGYCTTGAICICDESFQGDDCSVFSHDLPSYIKDNFESARVTEANWETIQGGVIGSGCGQLAPYAHGDSLYFNGCQIRQAATKPLDLTRASKIMFVLQIGSMSQTDSCNSDLSGPHAVDKAVLLQYSVNNGITWHVIAQHQPKDFTQAQRVSYNVPLEARMKGVLLRWWQPRHNGTGHDQWALDHVEVVLTRKQNYMMNFSRQHGLRHFYNRRRRSLRRYP

SEQ ID NO: 6998 - protein, 453 aa, Homo sapiens
MALCLELLKQCSSCLVAYKKTPPPVPPRTTSKPFISVTVQSSTESAQDTYLDSQDHKSEVTSQSGLSNSSDSLDSSTRPPSVTRGGVAPAPEAPEPPPKHAALKSEQGTLTSSESHPEAAPKRKLSSIGIQVDCIQPVPKEEPSPATKFQSIGVQVEDDWRSSVPSHSMSSRRDTDSDTQDANDSSCKSSERSLPDCTPHPNSISIDAGPRQAPKIAQIKRNLSYGDNSDPALEASSLPPPDPWLETSSSSPAEPAQPGACRRDGYWFLKLLQAETERLEGWCCQMDKETKENNLSEEVLGKVLSAVGSAQLLMSQKFQQFRGLCEQNLNPDANPRPTAQDLAGFWDLLQLSIEDISMKFDELYHLKANSWQLVETPEKRKEEKKPPPPVPKKPAKSKPAVSRDKASDASDKQRQEARKRLLAAKRAASVRQNSATESADSIEIYVPEAQTRL

SEQ ID NO: 6999 - protein, 347 aa, Homo sapiens
MEQYTANSNSSTEQIVVQAGQIQQQQQGGVTAVQLQTEAQVASASGQQVQTLQVVQGQPLMVQVSGGQLITSTGQPIMVQAVPGGQGQTIMQVPVSGTQGLQQIQLVPPGQIQIQGGQAVQVQGQQGQTQQIIIQQPQTAVTAGQTQTQQQIAVQGQQVAQTAEGQTIVYQPVNADGTILQQVTVPVSGMITIPAASLAGAQIVQTGANTNTTSSGQGTVTVTLPVAGNVVNSGGMVMMVPGAGSVPAIQRIPLPGAEMLEEEPLYVNAKQYHRILKRRQARAKLEAEGKIPKERRKYLHESRHRHAMARKRGEGGRFFSPKEKDSPHMQDPNQADEEAMTQIIRVS

SEQ ID NO: 7000 - protein, 332 aa, Homo sapiens
MKLGRAVLGLLLLAPSVVQAVEPISLGLALAGVLTGYIYPRLYCLFAECCGQKRSLSREALQKDLDDNLFGQHLAKKIILNAVFGFINNPKPKKPLTLSLHGWTGTGKNFVSKIIAENIYEGGLNSDYVHLFVATLHFPHASNITLYKDQLQLWIRGNVSACARSIFIFDEMDKMHAGLIDAIKPFLDYYDLVDGVSYQKAMFIFLSNAGAERITDVALDFWRSGKQREDIKLKDIEHALSVSVFNNKNSGFWHSSLIDRNLIDYFVPFLPLEYKHLKMCIRVEMQSRGYEIDEDIVSRVAEEMTFFPKEERVFSDKGCKTVFTKLDYYYDD

SEQ ID NO: 7001 - protein, 651 aa, Homo sapiens
MGSWALLWPPLLFTGLLVRPPGTMAQAQYCSVNKDIFEVEENTNVTEPLVDIHVPEGQEVTLGALSTPFAFRIQGNQLFLNVTPDYEEKSLLEAQLLCQSGGTLVTQLRVFVSVLDVNDNAPEFPFKTKEIRVEEDTKVNSTVIPETQLQAEDRDKDDILFYTLQEMTAGASDYFSLVSVNRPALRLDRPLDFYERPNMTFWLLVRDTPGENVEPSHTATATLVLNVVPADLRPPWFLPCTFSDGYVCIQAQYHGAVPTGHILPSPLVLRPGPIYAEDGDRGINQPIIYSIFRGNVNGTFIIHPDSGNLTVARSVPSPMTFLLLVKGQQADLARYSVTQVTVEAVAAAGSPPRFPQRLYRGTVARGAGAGVVVKDAAAPSQPLRIQAQDPEFSDLNSAITYRITNHSHFRMEGEVVLTTTTLAQAGAFYAEVEAHNTVTSGTATTVIEIQVSEQEPPSTGGGPSEDKRFSVVDMAALGGVLGALLLLALLGLAVLVHKHYGPRLKCCCGKAPEPQPQGFDNQAFLPDHKANWAPVPSPTHDPKPAEAPMPAEPAPPGPASPGGAPEPPAAARAGGSPTAVRSILTKERRPEGGYKAVWFGEDIGTEADVVVLNAPTLDVDGASDSGSGDEGEGAGRGGGPYDAPGGDDSYI

SEQ ID NO: 7002 - protein, 1500 aa, Homo sapiens
MDPSMGVNSVTISVEGMTCNSCVWTIEQQIGKVNGVHHIKVSLEEKNATIIYDPKLQTPKTLQEAIDDMGFDAVIHNPDPLPVLTDTLFLTVTASLTLPWDHIQSTLLKTKGVTDIKIYPQKRTVAVTIIPSIVNANQIKELVPELSLDTGTLEKKSGACEDHSMAQAGEVVLKMKVEGMTCHSCTSTIEGKIGKLQGVQRIKVSLDNQEATIVYQPHLISVEEMKKQIEAMGFPAFVKKQPKYLKLGAIDVERLKNTPVKSSEGSQQRSPSYTNDSTATFIIDGMHCKSCVSNIESTLSALQYVSSIVVSLENRSAIVKYNASSVTPESLRKAIEAVSPGLYRVSITSEVESTSNSPSSSSLQKIPLNVVSQPLTQETVINIDGMTCNSCVQSIEGVISKKPGVKSIRVSLANSNGTVEYDPLLTSPETLRGAIEDMGFDATLSDTNEPLVVIAQPSSEMPLLTSTNEFYTKGMTPVQDKEEGKNSSKCYIQVTGMTCASCVANIERNLRREEGIYSILVALMAGKAEVRYNPAVIQPPMIAEFIRELGFGATVIENADEGDGVLELVVRGMTCASCVHKIESSLTKHRGILYCSVALATNKAHIKYDPEIIGPRDIIHTIESLGFEASLVKKDRSASHLDHKREIRQWRRSFLVSLFFCIPVMGLMIYMMVMDHHFATLHHNQNMSKEEMINLHSSMFLERQILPGLSVMNLLSFLLCVPVQFFGGWYFYIQAYKALKHKTANMDVLIVLATTIAFAYSLIILLVAMYERAKVNPITFFDTPPMLFVFIALGRWLEHIAKGKTSEALAKLISLQATEATIVTLDSDNILLSEEQVDVELVQRGDIIKVVPGGKFPVDGRVIEGHSMVDESLITGEAMPVAKKPGSTVIAGSINQNGSLLICATHVGADTTLSQIVKLVEEAQTSKAPIQQFADKLSGYFVPFIVFVSIATLLVWIVIGFLNFEIVETYFPGYNRSISRTETIIRFAFQASITVLCIACPCSLGLATPTAVMVGTGVGAQNGILIKGGEPLEMAHKVKVVVFDKTGTITHGTPVVNQVKVLTESNRISHHKILAIVGTAESNSEHPLGTAITKYCKQELDTETLGTCIDFQVVPGCGISCKVTNIEGLLHKNNWNIEDNNIKNASLVQIDASNEQSSTSSSMIIDAQISNALNAQQYKVLIGNREWMIRNGLVINNDVNDFMTEHERKGRTAVLVAVDDELCGLIAIADTVKPEAELAIHILKSMGLEVVLMTGDNSKTARSIASQVGITKVFAEVLPSHKVAKVKQLQEEGKRVAMVGDGINDSPALAMANVGIAIGTGTDVAIEAADVVLIRNDLLDVVASIDLSRKTVKRIRINFVFALIYNLVGIPIAAGVFMPIGLVLQPWMGSAAMAASSVSVVLSSLFLKLYRKPTYESYELPARSQIGQKSPSEISVHVGIDDTSRNSPKLGLLDRIVNYSRASINSLLSDKRSLNSVVTSEPDKHSLLVGDFREDDDTAL

SEQ ID NO: 7003 - protein, 926 aa, Homo sapiens
MPVRKQDTQRALHLLEEYRSKLSQTEDRQLRSSIERVINIFQSNLFQALIDIQEFYEVTLLDNPKCIDRSKPSEPIQPVNTWEISSLPSSTVTSETLPSSLSPSVEKYRYQDEDTPPQEHISPQITNEVIGPELVHVSEKNLSEIENVHGFVSHSHISPIKPTEAVLPSPPTVPVIPVLPVPAENTVILPTIPQANPPPVLVNTDSLETPTYVNGTDADYEYEEITLERGNSGLGFSIAGGTDNPHIGDDSSIFITKIITGGAAAQDGRLRVNDCILRVNEVDVRDVTHSKAVEALKEAGSIVRLYVKRRKPVSEKIMEIKLIKGPKGLGFSIAGGVGNQHIPGDNSIYVTKIIEGGAAHKDGKLQIGDKLLAVNNVCLEEVTHEEAVTALKNTSDFVYLKVAKPTSMYMNDGYAPPDITNSSSQPVDNHVSPSSFLGQTPASPARYSPVSKAVLGDDEITREPRKVVLHRGSTGLGFNIVGGEDGEGIFISFILAGGPADLSGELRKGDRIISVNSVDLRAASHEQAAAALKNAGQAVTIVAQYRPEEYSRFEAKIHDLREQMMNSSISSGSGSLRTSQKRSLYVRALFDYDKTKDSGLPSQGLNFKFGDILHVINASDDEWWQARQVTPDGESDEVGVIPSKRRVEKKERARLKTVKFNSKTRDKGQSFNDKRKKNLFSRKFPFYKNKDQSEQETSDADQHVTSNASDSESSYRGQEEYVLSYEPVNQQEVNYTRPVIILGPMKDRINDDLISEFPDKFGSCVPHTTRPKRDYEVDGRDYHFVTSREQMEKDIQEHKFIEAGQYNNHLYGTSVQSVREVAEKGKHCILDVSGNAIKRLQIAQLYPISIFIKPKSMENIMEMNKRLTEEQARKTFERAMKLEQEFTEHFTAIVQGDTLEDIYNQVKQIIEEQSGSYIWVPAKEKL

SEQ ID NO: 7004 - protein, 1616 aa, Homo sapiens
MPARTAPARVPTLAVPAISLPDDVRRRLKDLERDSLTEKECVKEKLNLLHEFLQTEIKNQLCDLETKLRKEELSEEGYLAKVKSLLNKDLSLENGAHAYNREVNGRLENGNQARSEARRVGMADANSPPKPLSKPRTPRRSKSDGEAKPEPSPSPRITRKSTRQTTITSHFAKGPAKRKPQEESERAKSDESIKEEDKDQDEKRRRVTSRERVARPLPAEEPERAKSGTRTEKEEERDEKEEKRLRSQTKEPTPKQKLKEEPDREARAGVQADEDEDGDEKDEKKHRSQPKDLAAKRRPEEKEPEKVNPQISDEKDEDEKEEKRRKTTPKEPTEKKMARAKTVMNSKTHPPKCIQCGQYLDDPDLKYGQHPPDAVDEPQMLTNEKLSIFDANESGFESYEALPQHKLTCFSVYCKHGHLCPIDTGLIEKNIELFFSGSAKPIYDDDPSLEGGVNGKNLGPINEWWITGFDGGEKALIGFSTSFAEYILMDPSPEYAPIFGLMQEKIYISKIVVEFLQSNSDSTYEDLINKIETTVPPSGLNLNRFTEDSLLRHAQFVVEQVESYDEAGDSDEQPIFLTPCMRDLIKLAGVTLGQRRAQARRQTIRHSTREKDRGPTKATTTKLVYQIFDTFFAEQIEKDDREDKENAFKRRRCGVCEVCQQPECGKCKACKDMVKFGGSGRSKQACQERRCPNMAMKEADDDEEVDDNIPEMPSPKKMHQGKKKKQNKNRISWVGEAVKTDGKKSYYKKVCIDAETLEVGDCVSVIPDDSSKPLYLARVTALWEDSSNGQMFHAHWFCAGTDTVLGATSDPLELFLVDECEDMQLSYIHSKVKVIYKAPSENWAMEGGMDPESLLEGDDGKTYFYQLWYDQDYARFESPPKTQPTEDNKFKFCVSCARLAEMRQKEIPRVLEQLEDLDSRVLYYSATKNGILYRVGDGVYLPPEAFTFNIKLSSPVKRPRKEPVDEDLYPEHYRKYSDYIKGSNLDAPEPYRIGRIKEIFCPKKSNGRPNETDIKIRVNKFYRPENTHKSTPASYHADINLLYWSDEEAVVDFKAVQGRCTVEYGEDLPECVQVYSMGGPNRFYFLEAYNAKSKSFEDPPNHARSPGNKGKGKGKGKGKPKSQACEPSEPEIEIKLPKLRTLDVFSGCGGLSEGFHQAGISDTLWAIEMWDPAAQAFRLNNPGSTVFTEDCNILLKLVMAGETTNSRGQRLPQKGDVEMLCGGPPCQGFSGMNRFNSRTYSKFKNSLVVSFLSYCDYYRPRFFLLENVRNFVSFKRSMVLKLTLRCLVRMGYQCTFGVLQAGQYGVAQTRRRAIILAAAPGEKLPLFPEPLHVFAPRACQLSVVVDDKKFVSNITRLSSGPFRTITVRDTMSDLPEVRNGASALEISYNGEPQSWFQRQLRGAQYQPILRDHICKDMSALVAARMRHIPLAPGSDWRDLPNIEVRLSDGTMARKLRYTHHDRKNGRSSSGALRGVCSCVEAGKACDPAARQFNTLIPWCLPHTGNRHNHWAGLYGRLEWDGFFSTTVTNPEPMGKQGRVLHPEQHRVVSVRECARSQGFPDTYRLFGNILDKHRQVGNAVPPPLAKAIGLEIKLCMLAKARESASAKIKEEEAAKD

SEQ ID NO: 7005 - protein, 643 aa, Homo sapiens
MEKSSSCESLGSQPAAARPPSVDSLSSASTSHSENSVHTKSASVVSSDSISTSADNFSPDLRVLRESNKLAEMEEPPLLPGENIKDMAKDVTYICPFTGAVRGTLTVTNYRLYFKSMERDPPFVLDASLGVINRVEKIGGASSRGENSYGLETVCKDIRNLRFAHKPEGRTRRSIFENLMKYAFPVSNNLPLFAFEYKEVFPENGWKLYDPLLEYRRQGIPNESWRITKINERYELCDTYPALLVVPANIPDEELKRVASFRSRGRIPVLSWIHPESQATITRCSQPMVGVSGKRSKEDEKYLQAIMDSNAQSHKIFIFDARPSVNAVANKAKGGGYESEDAYQNAELVFLDIHNIHVMRESLRKLKEIVYPNIEETHWLSNLESTHWLEHIKLILAGALRIADKVESGKTSVVVHCSDGWDRTAQLTSLAMLMLDGYYRTIRGFEVLVEKEWLSFGHRFQLRVGHGDKNHADADRSPVFLQFIDCVWQMTRQFPTAFEFNEYFLITILDHLYSCLFGTFLCNSEQQRGKENLPKRTVSLWSYINSQLEDFTNPLYGSYSNHVLYPVASMRHLELWVGYYIRWNPRMKPQEPIHNRYKELLAKRAELQKKVEELQREISNRSTSSSERASSPAQCVTPVQTVV

SEQ ID NO: 7006 - protein, 43 aa, Homo sapiens
MKLLYLFLAILLAIEEPVISALVRTVGCCLDTARQTPHPSMHG

SEQ ID NO: 7007 - protein, 591 aa, Homo sapiens
MAVAPLRGALLLWQLLAAGGAALEIGRFDPERGRGAAPCQAVEIPMCRGIGYNLTRMPNLLGHTSQGEAAAELAEFAPLVQYGCHSHLRFFLCSLYAPMCTDQVSTPIPACRPMCEQARLRCAPIMEQFNFGWPDSLDCARLPTRNDPHALCMEAPENATAGPAEPHKGLGMLPVAPRPARPPGDLGPGAGGSGTCENPEKFQYVEKSRSCAPRCGPGVEVFWSRRDKDFALVWMAVWSALCFFSTAFTVLTFLLEPHRFQYPERPIIFLSMCYNVYSLAFLIRAVAGAQSVACDQEAGALYVIQEGLENTGCTLVFLLLYYFGMASSLWWVVLTLTWFLAAGKKWGHEAIEAHGSYFHMAAWGLPALKTIVILTLRKVAGDELTGLCYVASTDAAALTGFVLVPLSGYLVLGSSFLLTGFVALFHIRKIMKTGGTNTEKLEKLMVKIGVFSILYTVPATCVIVCYVYERLNMDFWRLRATEQPCAAAAGPGGRRDCSLPGGSVPTVAVFMLKIFMSLVVGITSGVWVWSSKTFQTWQSLCYRKIAAGRARAKACRAPGSYGRGTHCHYKAPTVVLHMTKTDPSLENPTHL

SEQ ID NO: 7008 - protein, 977 aa, Homo sapiens
MERQKRKADIEKGLQFIQSTLPLKQEEYEAFLLKLVQNLFAEGNDLFREKDYKQALVQYMEGLNVADYAASDQVALPRELLCKLHVNRAACYFTMGLYEKALEDSEKALGLDSESIRALFRKARALNELGRHKEAYECSSRCSLALPHDESVTQLGQELAQKLGLRVRKAYKRPQELETFSLLSNGTAAGVADQGTSNGLGSIDDIETDCYVDPRGSPALLPSTPTMPLFPHVLDLLAPLDSSRTLPSTDSLDDFSDGDVFGPELDTLLDSLSLVQGGLSGSGVPSELPQLIPVFPGGTPLLPPVVGGSIPVSSPLPPASFGLVMDPSKKLAASVLDALDPPGPTLDPLDLLPYSETRLDALDSFGSTRGSLDKPDSFMEETNSQDHRPPSGAQKPAPSPEPCMPNTALLIKNPLAATHEFKQACQLCYPKTGPRAGDYTYREGLEHKCKRDILLGRLRSSEDQTWKRIRPRPTKTSFVGSYYLCKDMINKQDCKYGDNCTFAYHQEEIDVWTEERKGTLNRDLLFDPLGGVKRGSLTIAKLLKEHQGIFTFLCEICFDSKPRIISKGTKDSPSVCSNLAAKHSFYNNKCLVHIVRSTSLKYSKIRQFQEHFQFDVCRHEVRYGCLREDSCHFAHSFIELKVWLLQQYSGMTHEDIVQESKKYWQQMEAHAGKASSSMGAPRTHGPSTFDLQMKFVCGQCWRNGQVVEPDKDLKYCSAKARHCWTKERRVLLVMSKAKRKWVSVRPLPSIRNFPQQYDLCIHAQNGRKCQYVGNCSFAHSPEERDMWTFMKENKILDMQQTYDMWLKKHNPGKPGEGTPISSREGEKQIQMPTDYADIMMGYHCWLCGKNSNSKKQWQQHIQSEKHKEKVFTSDSDASGWAFRFPMGEFRLCDRLQKGKACPDGDKCRCAHGQEELNEWLDRREVLKQKLAKARKDMLLCPRDDDFGKYNFLLQEDGDLAGATPEAPAAAATATTGE

SEQ ID NO: 7009 - protein, 1029 aa, Homo sapiens
MTRENVAHNALRQEGLVKGKDDTWKWGTSFQGSSSSVWETSHLHFRQLRYHETSGPQEALSRLRELCRRWLRPEARTKAQILELLVLEQFLSILPGEIRTWVQLHHPGSGEEAVALVEELQKDLDGPAIQVPVLVKDQDTLQKVVSAPGTTLPPVLPGSHIAAEICPHPPTDLVAFNLQDPQHDSPAPEASALSQEENPRNQLMALMLLTAQPQELVMFEEVSVCFTSEEWACLGPIQRALYWDVMLENYGNVTSLEWETMTENEEVTSKPSSSQRADSHKGTSKRLQGSVPQVLDFEEECEWQVLASQWGNETDERADTVKKVSLCERDKKKRTPPEKQGQKWKELGDSLTFGSAISESLIGTEGKKFYKCDMCCKHFNKISHLINHRRIHTGEKPHKCKECGKGFIQRSSLLMHLRNHSGEKPYKCNECGKAFSQSAYLLNHQRIHTGEKPYKCKECGKGFYRHSGLIIHLRRHSGERPYKCNECGKVFSQNAYLIDHQRLHKGEEPYKCNKCQKAFILKKSLILHQRIHSGEKPYKCDECGKTFAQTTYLIDHQRLHSAENPYKCKECGKVFIRSKSLLLHQRVHTEKKTFGCKKCGKIFSSKSNFIDHKRMHSREKPYKCTECGKAFTQSAYLFDHQRLHNGEKPYECNECGKVFILKKSLILHQRFHTGENLYECKDCGKVFGSNRNLIDHERLHNGEKPYECRECGKTFIMSKSFMVHQKLHTQEKAYKCEDCGKAFSYNSSLLVHRRIHTGEKPFECSECGRAFSSNRNLIEHKRIHSGEKPYECDECGKCFILKKSLIGHQRIHTREKSYKCNDCGKVFSYRSNLIAHQRIHTGEKPYACSECGKGFTYNRNLIEHQRIHSGEKTYECHVCRKVLTSSRNLMVHQRIHTGEKPYKCNECGKDFSQNKNLVVHQRMHTGEKPYECDKCRKSFTSKRNLVGHQRIHTGEKPYGCNDCSKVFRQRKNLTVHQKIHTDEKPCECDVSEKEFSQTSNLHLQQKIHTIEEFSWLQNTNESKIEIQKI

SEQ ID NO: 7010 - protein, 595 aa, Homo sapiens
MVGVPGAAAFQLGPEKRVPAMPGSPVEVKIQSRSSPPTMPPLPPINPGGPRPVSFTPTALSNGINHSPPTLNGAPSPPQRFSNGPASSTSSALTNQQLPATCGARQLSKLKRFLTTLQQFGNDISPEIGEKVRTLVLALVNSTVTIEEFHCKLQEATNFPLRPFVIPFLKANLPLLQRELLHCARAAKQTPSQYLAQHEHLLLNTSIASPADSSELLMEVHGNGKRPSPERREENSFDRDTIAPEPPAKRVCTISPAPRHSPALTVPLMNPGGQFHPTPPPLQHYTLEDIATSHLYREPNKMLEHREVRDRHHSLGLNGGYQDELVDHRLTEREWADEWKHLDHALNCIMEMVEKTRRSMAVLRRCQESDREELNYWKRRYNENTELRKTGTELVSRQHSPGSADSLSNDSQREFNSRPGTGYVPVEFWKKTEEAVNKVKIQAMSEVQKAVAEAEQKAFEVIATERARMEQTIADVKRQAAEDAFLVINEQEESTENCWNCGRKASETCSGCNIARYCGSFCQHKDWERHHRLCGQNLHGQSPHGQGRPLLPVGRGSSARSADCSVPSPALDKTSATTSRSSTPASVTAIDTNGL

SEQ ID NO: 7011 - protein, 346 aa, Homo sapiens
MTLLWCVVSLYFYGILQSDASERCDDWGLDTMRQIQVFEDEPARIKCPLFEHFLKFNYSTAHSAGLTLIWYWTRQDRDLEEPINFRLPENRISKEKDVLWFRPTLLNDTGNYTCMLRNTTYCSKVAFPLEVVQKDSCFNSPMKLPVHKLYIEYGIQRITCPNVDGYFPSSVKPTITWYMGCYKIQNFNNVIPEGMNLSFLIALISNNGNYTCVVTYPENGRTFHLTRTLTVKVVGSPKNAVPPVIHSPNDHVVYEKEPGEELLIPCTVYFSFLMDSRNEVWWTIDGKKPDDITIDVTINESASSKIHSGTGLWFWSHSPASGDSHCCLPCLLARDGPILPGSFWNR

SEQ ID NO: 7012 - protein, 251 aa, Homo sapiens
MDMKRRIHLELRNRTPAAVRELVLDNCKSNDGKIEGLTAEFVNLEFLSLINVGLISVSNLPKLPKLKKLELSENRIFGGLDMLAEKLPNLTHLNLSGNKLKDISTLEPLKKLECLKSLDLFNCEVTNLNDYRESVFKLLPQLTYLDGYDREDQEAPDSDAEVDGVDEEEEDEEGEDEEDEDDEDGEEEEFDEEDDEDEDVEGDEDDDEVSEEEEEFGLDEEDEDEDEDEEEEEGGKGEKRKRETDDEGEDD

SEQ ID NO: 7013 - protein, 785 aa, Homo sapiens
MDSVPATVPSIAATPGDPELVGPLSVLYAAFIAKLLELVATLPDDVQPGPDFYGLPWKPVFITAFLGIASFAIFLWRTVLVVKDRVYQVTEQQISEKLKTIMKENTELVQKLSNYEQKIKESKKHVQETRKQNMILSDEAIKYKDKIKTLEKNQEILDDTAKNLRVMLESEREQNVKNQDLISENKKSIEKLKDVISMNASEFSEVQIALNEAKLSEEKVKSECHRVQEENARLKKKKEQLQQEIEDWSKLHAELSEQIKSFEKSQKDLEVALTHKDDNINALTNCITQLNLLECESESEGQNKGGNDSDELANGEVGGDRNEKMKNQIKQMMDVSRTQTAISVVEEDLKLLQLKLRASVSTKCNLEDQVKKLEDDRNSLQAAKAGLEDECKTLRQKVEILNELYQQKEMALQKKLSQEEYERQEREHRLSAADEKAVSAAEEVKTYKRRIEEMEDELQKTERSFKNQIATHEKKAHENWLKARAAERAIAEEKREAANLRHKLLELTQKMAMLQEEPVIVKPMPGKPNTQNPPRRGPLSQNGSFGPSPVSGGECSPPLTVEPPVRPLSATLNRRDMPRSEFGSVDGPLPHPRWSAEASGKPSPSDPGSGTATMMNSSSRGSSPTRVLDEGKVNMAPKGPPPFPGVPLMSTPMGGPVPPPIRYGPPPQLCGPFGPRPLPPPFGPGMRPPLGLREFAPGVPPGRRDLPLHPRGFLPGHAPFRPLGSLGPREYFIPGTRLPPPTHGPQEYPPPPAVRDLLPSGSRDEPPPASQSTSQDCSQALKQSP

SEQ ID NO: 7014 - protein, 709 aa, Homo sapiens
MTSGSVFFYILIFGKYFSHGGGQDVKCSLGYFPCGNITKCLPQLLHCNGVDDCGNQADEDNCGDNNGWSLQFDKYFASYYKMTSQYPFEAETPECLVGSVPVQCLCQGLELDCDETNLRAVPSVSSNVTAMSLQWNLIRKLPPDCFKNYHDLQKLYLQNNKITSISIYAFRGLNSLTKLYLSHNRITFLKPGVFEDLHRLEWLIIEDNHLSRISPPTFYGLNSLILLVLMNNVLTRLPDKPLCQHMPRLHWLDLEGNHIHNLRNLTFISCSNLTVLVMRKNKINHLNENTFAPLQKLDEFSLEGIEISNIQQRMFRPLMNLSHIYFKKFQYCGYAPHVRSCKPNTDGISSLENLLASIIQRVFVWVVSAVTCFGNIFVICMRPYIRSENKLYAMSIISLCCADCLMGIYLFVIGGFDLKFRGEYNKHAQLWMESTHCQLVGSLAILSTEVSVLLLTFLTLEKYICIVYPFRCVRPGKCRTITVLILIWITGFIVAFIPLSNKEFFKNYYGTNGVCFPLHSEDTESIGAQIYSVAIFLGINLAAFIIIVFSYGSMFYSVHQSAITATEIRNQVKKEMILAKRFFFIVFTDALCWIPIFVVKFLSLLQVEIPGTITSWVVIFILPINSALNPILYTLTTRPFKEMIHRFWYNYRQRKSMDSKGQKTYAPSFIWVEMWPLQEMPPELMKPDLFTYPCEMSLISQSTRLNSYS

SEQ ID NO: 7015 - protein, 353 aa, Homo sapiens
MQGAQEASASEMLPLLLPLLWAGALAQERRFQLEGPESLTVQEGLCVLVPCRLPTTLPASYYGYGYWFLEGADVPVATNDPDEEVQEETRGRFHLLWDPRRKNCSLSIRDARRRDNAAYFFRLKSKWMKYGYTSSKLSVRVMALTHRPNISIPGTLESGHPSNLTCSVPWVCEQGTPPIFSWMSAAPTSLGPRTTQSSVLTITPRPQDHSTNLTCQVTFPGAGVTMERTIQLNVSYAPQKVAISIFQGNSAAFKILQNTSSLPVLEGQALRLLCDADGNPPAHLSWFQGFPALNATPISNTGVLELPQVGSAEEGDFTCRAQHPLGSLQISLSLFVHWSSAPVPDRHSFRPPC

SEQ ID NO: 7016 - protein, 379 aa, Homo sapiens
MVFFTCNACGESVKKIQVEKHVSVCRNCECLSCIDCGKDFWGDDYKNHVKCISEDQKYGGKGYEGKTHKGDIKQQAWIQKISELIKRPNVSPKVRELLEQISAFDNVPRKKAKFQNWMKNSLKVHNESILDQVWNIFSEASNSEPVNKEQDQRPLHPVANPHAEISTKVPASKVKDAVEQQGEVKKNKRERKEERQKKRKREKKELKLENHQENSRNQKPKKRKKGQEADLEAGGEEVPEANGSAGKRSKKKKQRKDSASEEEARVGAGKRKRRHSEVETDSKKKKMKLPEHPEGGEPEDDEAPAKGKFNWKGTIKAILKQAPDNEITIKKLRKKVLAQYYTVTDEHHRSEEELLVIFNKKISKNPTFKLLKDKVKLVK

SEQ ID NO: 7017 - protein, 1721 aa, Homo sapiens
MLSATPLYGNVHSWMNSERVRMCGASEDRKILVNDGDASKARLELREENPLNHNVVDASTAHRIDGLAALSMDRTGLIREGLRVPGNIVYSSLCGLGSEKGREAATSTLGGLGFSSERNPEMQFKPNTPETVEASAVSGKPPNGFSAIYKTPPGIQKSAVATAEALGLDRPASDKQSPLNINGASYLRLPWVNPYMEGATPAIYPFLDSPNKYSLNMYKALLPQQSYSLAQPLYSPVCTNGERFLYLPPPHYVGPHIPSSLASPMRLSTPSASPAIPPLVHCADKSLPWKMGVSPGNPVDSHAYPHIQNSKQPRVPSAKAVTSGLPGDTALLLPPSPRPSPRVHLPTQPAADTYSEFHKHYARISTSPSVALSKPYMTVSSEFPAARLSNGKYPKAPEGGEGAQPVPGHARKTAVQDRKDGSSPPLLEKQTVTKDVTDKPLDLSSKVVDVDASKADHMKKMAPTVLVHSRAGSGLVLSGSEIPKETLSPPGNGCAIYRSEIISTAPSSWVVPGPSPNEENNGKSMSLKNKALDWAIPQQRSSSCPRMGGTDAVITNVSGSVSSAGRPASASPAPNANADGTKTSRSSVETTPSVIQHVGQPPATPAKHSSSTSSKGAKASNPEPSFKANENGLPPSSIFLSPNEAFRSPPIPYPRSYLPYPAPEGIAVSPLSLHGKGPVYPHPVLLPNGSLFPGHLAPKPGLPYGLPTGRPEFVTYQDALGLGMVHPMLIPHTPIEITKEEKPERRSRSHERARYEDPTLRNRFSEILETSSTKLHPDVPTDKNLKPNPNWNQGKTVVKSDKLVYVDLLREEPDAKTDTNVSKPSFAAESVGQSAEPPKPSVEPALQQHRDFIALREELGRISDFHETYTFKQPVFTVSKDSVLAGTNKENLGLPVSTPFLEPPLGSDGPAVTFGKTQEDPKPFCVGSAPPSVDVTPTYTKDGADEAESNDGKVLKPKPSKLAKRIANSAGYVGDRFKCVTTELYADSSQLSREQRALQMEGLQEDSILCLPAAYCERAMMRFSELEMKEREGGHPATKDSEMCKFSPADWERLKGNQDKKPKSVTLEEAIAEQNESERCEYSVGNKHRDPFEAPEDKDLPVEKYFVERQPVSEPPADQVASDMPHSPTLRVDRKRKVSGDSSHTETTAEEVPEDPLLKAKRRRVSKGLHPKKQRHLLHLRERWEQQVSAADGKPGRQSRKEVTQATQPEAIPQGTNITEEKPGRKRAEAKGNRSWSEESLKPSDNEQGLPVFSGSPPMKSLSSTSAGGKKQAQPSCAPASRPPAKQQKIKENQKTDVLCADEEEDCQAASLLQKYTDNSEKPSGKRLCKTKHLIPQESRRGLPLTGEYYVENADGKVTVRRFRKRPEPSSDYDLSPAKQEPKPFDRLQQLLPASQSTQLPCSSSPQETTQSRPMPPEARRLIVNKNAGETLLQRAARLGYEEVVLYCLENKICDVNHRDNAGYCALHEACARGWLNIVRHLLEYGADVNCSAQDGTRPLHDAVENDHLEIVRLLLSYGADPTLATYSGRTIMKMTHSELMEKFLTDYLNDLQGRNDDDASGTWDFYGSSVCEPDDESGYDVLANPPGPEDQDDDDDAYSDVFEFEFSETPLLPCYNIQVSVAQGPRNWLLLSDVLKKLKMSSRIFRCNFPNVEIVTIAEAEFYRQVSASLLFSCSKDLEAFNPESKELLDLVEFTNEIQTLLGSSVEWLHPSDLASDNYW

SEQ ID NO: 7018 - protein, 83 aa, Homo sapiens
MQNDAGEFVDLYVPRKCSASNRIIGAKDHASIQMNVAEVDKVTGRFNGQFKTYAICGAIRRMGESDDSILRLAKADGIVSKNF

SEQ ID NO: 7019 - protein, 576 aa, Homo sapiens
MAQGVLWILLGLLLWSDPGTASLPLLMDSVIQALAELEQKVPAAKTRHTASAWLMSAPNSGPHNRLYHFLLGAWSLNATELDPCPLSPELLGLTKEVARHDVREGKEYGVVLAPDGSTVAVEPLLAGLEAGLQGRRVINLPLDSMAAPWETGDTFPDVVAIAPDVRATSSPGLRDGSPDVTTADIGANTPDATKGCPDVQASLPDAKAKSPPTMVDSLLAVTLAGNLGLTFLRGSQTQSHPDLGTEGCWDQLSAPRTFTLLDPKASLLTMAFLNGALDGVILGDYLSRTPEPRPSLSHLLSQYYGAGVARDPGFRSNFRRQNGAALTSASILAQQVWGTLVLLQRLEPVHLQLQCMSQEQLAQVAANATKEFTEAFLGCPAIHPRCRWGAAPYRGRPKLLQLPLGFLYVHHTYVPAPPCTDFTRCAANMRSMQRYHQDTQGWGDIGYSFVVGSDGYVYEGRGWHWVGAHTLGHNSRGFGVAIVGNYTAALPTEAALRTVRDTLPSCAVRAGLLRPDYALLGHRQLVRTDCPGDALFDLLRTWPHFTATVKPRPARSVSKRSRREPPPRTLPATDLQ

SEQ ID NO: 7020 - protein, 705 aa, Homo sapiens
MRPSGTAGAALLALLAALCPASRALEEKKVCQGTSNKLTQLGTFEDHFLSLQRMFNNCEVVLGNLEITYVQRNYDLSFLKTIQEVAGYVLIALNTVERIPLENLQIIRGNMYYENSYALAVLSNYDANKTGLKELPMRNLQEILHGAVRFSNNPALCNVESIQWRDIVSSDFLSNMSMDFQNHLGSCQKCDPSCPNGSCWGAGEENCQKLTKIICAQQCSGRCRGKSPSDCCHNQCAAGCTGPRESDCLVCRKFRDEATCKDTCPPLMLYNPTTYQMDVNPEGKYSFGATCVKKCPRNYVVTDHGSCVRACGADSYEMEEDGVRKCKKCEGPCRKVCNGIGIGEFKDSLSINATNIKHFKNCTSISGDLHILPVAFRGDSFTHTPPLDPQELDILKTVKEITGFLLIQAWPENRTDLHAFENLEIIRGRTKQHGQFSLAVVSLNITSLGLRSLKEISDGDVIISGNKNLCYANTINWKKLFGTSGQKTKIISNRGENSCKATGQVCHALCSPEGCWGPEPRDCVSCRNVSRGRECVDKCNLLEGEPREFVENSECIQCHPECLPQAMNITCTGRGPDNCIQCAHYIDGPHCVKTCPAGVMGENNTLVWKYADAGHVCHLCHPNCTYGPGNESLKAMLFCLFKLSSCNQSNDGSVSHQSGSPAAQESCLGWIPSLLPSEFQLGWGGCSHLHAWPSASVIITASSCH

SEQ ID NO: 7021 - protein, 574 aa, Homo sapiens
MPPQLQETRMNRSIPVEVDESEPYPSQLLKPIPEYSPEEESEPPAPNIRNMAPNSLSAPTMLHNSSGDFSQAHSTLKLANHQRPVSRQVTCLRTQVLEDSEDSFCRRHPGLGKAFPSGCSAVSEPASESVVGALPAEHQFSFMEKRNQWLVSQLSAASPDTGHDSDKSDQSLPNASADSLGGSQEMVQRPQPHRNRAGLDLPTIDTGYDSQPQDVLGIRQLERPLPLTSVCYPQDLPRPLRSREFPQFEPQRYPACAQMLPPNLSPHAPWNYHYHCPGSPDHQVPYGHDYPRAAYQQVIQPALPGQPLPGASVRGLHPVQKVILNYPSPWDHEERPAQRDCSFPGLPRHQDQPHHQPPNRAGAPGESLECPAELRPQVPQPPSPAAVPRPPSNPPARGTLKTSNLPEELRKVFITYSMDTAMEVVKFVNFLLVNGFQTAIDIFEDRIRGIDIIKWMERYLRDKTVMIIVAISPKYKQDVEGAESQLDEDEHGLHTKYIHRMMQIEFIKQGSMNFRFIPVLFPNAKKEHVPTWLQNTHVYSWPKNKKNILLRLLREEEYVAPPRGPLPTLQVVPL

SEQ ID NO: 7022 - protein, 789 aa, Homo sapiens
METLLGGLLAFGMAFAVVDACPKYCVCQNLSESLGTLCPSKGLLFVPPDIDRRTVELRLGGNFIIHISRQDFANMTGLVDLTLSRNTISHIQPFSFLDLESLRSLHLDSNRLPSLGEDTLRGLVNLQHLIVNNNQLGGIADEAFEDFLLTLEDLDLSYNNLHGLPWDSVRRMVNLHQLSLDHNLLDHIAEGTFADLQKLARLDLTSNRLQKLPPDPIFARSQASALTATPFAPPLSFSFGGNPLHCNCELLWLRRLERDDDLETCGSPGGLKGRYFWHVREEEFVCEPPLITQHTHKLLVLEGQAATLKCKAIGDPSPLIHWVAPDDRLVGNSSRTAVYDNGTLDIFITTSQDSGAFTCIAANAAGEATAMVEVSIVQLPHLSNSTSRTAPPKSRLSDITGSSKTSRGGGGSGGGEPPKSPPERAVLVSEVTTTSALVKWSVSKSAPRVKMYQLQYNCSDDEVLIYRMIPASNKAFVVNNLVSGTGYDLCVLAMWDDTATTLTATNIVGCAQFFTKADYPQCQSMHSQILGGTMILVIGGIIVATLLVFIVILMVRYKVCNHEAPSKMAAAVSNVYSQTNGAQPPPPSSAPAGAPPQGPPKVVVRNELLDFTASLARASDSSSSSSLGSGEAAGLGRAPWRIPPSAPRPKPSLDRLMGAFASLDLKSQRKEELLDSRTPAGRGAGTSARGHHSDREPLLGPPAARARSLLPLPLEGKAKRSHSFDMGDFAAAAAGGVVPGGYSPPRKVSNIWTKRSLSVNGMLLPFEESDLVGARGTFGSSEWVMESTV

SEQ ID NO: 7023 - protein, 403 aa, Homo sapiens
MSHRKFSAPRHGSLGFLPRKRSSRHRGKVKSFPKDDPSKPVHLTAFLGYKAGMTHIVREVDRPGSKVNKKEVVEAVTIVETPPMVVVGIVGYVETPRGLRTFKTVFAEHISDECKRRFYKNWHKSKKKAFTKYCKKWQDEDGKKQLEKDFSSMKKYCQVIRVIAHTQMRLLPLRQKKAHLMEIQVNGGTVAEKLDWARERLEQQVPVNQVFGQDEMIDVIGVTKGKGYKGVTSRWHTKKLPRKTHRGLRKVACIGAWHPARVAFSVARAGQKGYHHRTEINKKIYKIGQGYLIKDGKLIKNNASTDYDLSDKSINPLGGFVHYGEVTNDFVMLKGCVVGTKKRVLTLRKSLLVQTKRRALEKIDLKFIDTTSKFGHGRFQTMEEKKAFMGPLKKDRIAKEEGA

SEQ ID NO: 7024 - protein, 106 aa, Homo sapiens
MVNVPKTRRTFCKKCGKHQPHKVTQYKKGKDSLYAQGRRRYDRKQSGYGGQTKPIFRKKAKTTKKIVLRLECVEPNCRSKRMLAIKRCKHFELGGDKKRKGQVIQF

SEQ ID NO: 7025 - protein, 148 aa, Homo sapiens [sequence omitted]

SEQ ID NO: 7026 - protein, 127 aa, Homo sapiens
MGFRKFSPFLALSILVLYQAGSLQAAPFRSALESSPDPATLSKEDARLLLAALVQDYVQMKASELKQEQETQGSSSAAQKRACNTATCVTHRLAGLLSRSGGMVKSNFVPTNVGSKAFGRRRRDLQA

SEQ ID NO: 7027 - protein, 192 aa, Homo sapiens [sequence omitted]

SEQ ID NO: 7028 - protein, 114 aa, Homo sapiens
MASVSELACIYSALILHDDEVTVTEDKINALIKAAGVNVEPFWPGLFAKALANVNIGSLICNVGAGGPAPAAGAAPAGGPAPSTAAAPAEEKKVEAKKEESEESDDDMGFGLFD

SEQ ID NO: 7029 - protein, 264 aa, Homo sapiens [sequence omitted]

SEQ ID NO: 7030 - protein, 122 aa, Homo sapiens
MAPQKDRKPKRSTWRFNLDLTHPVEDGIFDSGNFEQFLREKVKVNGKTGNLGNVVHIERFKNKITVVSEKQFSKRYLKYLTKKYLKKNNLRDWLRVVASDKETYELRYFQISQDEDESESED

SEQ ID NO: 7031 - protein, 128 aa, Homo sapiens [sequence omitted]

SEQ ID NO: 7032 - protein, 197 aa, Homo sapiens
MSLGRLCRLLKPALLCGALAAPGLAGTMCASRDDWRCARSMHEFSAKDIDGHMVNLDKYRGFVCIVTNVASQUGKTEVNYTQLVDLHARYAECGLRILAFPCNQFGKQEPGSNEEIKEFAAGYNVKFDMFSKICVNGDDAHPLWKWMKIQPKGKGILGNAIKWNFTKFLIDKNGCVVKRYGPMEEPLVIEKDLPHYF

SEQ ID NO: 7033 - protein, 1150 aa, Homo sapiens
MHPPETTTKMASVRFMVTPTKIDDIPGLSDTSPDLSSRSSSRVRFSSRESVPETSRSEPMSEMSGATTSLATVALDPPSDRTSHPQDVIEDLSQNSITGEHSQLLDDGHKKARNAYLNNSNYEEGDEYFDKNLALFEEEMDTRPKVSSLLNRMANYTNLTQGAKEHEEAENITEGKKKPTKTPQMGTFMGVYLPCLQNIFGVILFLRLTWVVGTAGVLQAFAIVLICCCCTMLTAISMSAIATNGVVPAGGSYFMISRALGPEFGGAVGLCFYLGTTFAAAMYILGAIEIFLVYIVPRAAIFHSDDALKESAAMLNNMRVYGTAFLVLMVLVVFIGVRYVNKFASLFLACVIVSILAIYAGAIKSSFAPPHFPVCMLGNRTLSSRHIDVCSKTKEINNMTVPSKLWGFFCNSSQFFNATCDEYFVHNNVTSIQGIPGLASGIITENLWSNYLPKGEIIEKPSAKSSDVLGSLNHEYVLVDITTSFTLLVGIFFPSVTGIMAGSNRSGDLKDAQKSIPIGTILAILTTSFVYLSNVVLFGACIEGVVLRDKFGDAVKGNLVVGTLSWPSPWVIVIGSFFSTCGAGLQSLTGAPRLLQAIAKDNIIPFLRVFGHSKANGEPTWALLLTAAIAELGILIASLDLVAPILSMFFLMCYLFVNLACALQTLLRTPNWRPRFRYYHWALSFMGMSICLALMFISSWYYAIVAMVIAGMIYKYIEYQGAEKEWGDGIRGLSLSAARFALLRLEEGPPHTKNWRPQLLVLLKLDEDLHVKHPRLLTFASQLKAGKGLTIVGSVIVGNFLENYGEALAAEQTIKHLMEAEKVKGFCQLVVAAKLREGISHLIQSCGLGGMKHNTVVMGWPNGWRQSEDARAWKTFIGTVRVTTAAHLALLVAKNISFFPSNVEQFSEGNIDVWWIVHDGGMLMLLPFLLKQHKVWRKCSIRIFTVAQLEDNSIQMKKDLATFLYHLRIEAEVEVVEMHDSDISAYTYERTLMMEQRSQMLRHMRLSKTERDREAQLVKDRNSMLRLTSIGSDEDEETETYQEKVHMTWTKDKYMASRGQKAKSMEGFQDLLNMRPDQSNVRRMHTAVKLNEVIVNKSHEAKLVLLNMPGPPRNPEGDENYMEFLEVLTEGLERVLLVRGGGSEVITIYS

SEQ ID NO: 7034 - protein, 783 aa, Homo sapiens
MPGKLRSDAGLESDTAMKKGETLRKQTEEKEKKEKPKSDKTEEIAEEEETVFPKAKQVKKKAEPSEVDMNSPKSKKAKKKEEPSQNDISPKTKSLRKKKEPIEKKVVSSKTKKVTKNEEPSEEEIDAPKPKKMKKEKEMNGETREKSPKLKNGFPHPEPDCNPSEAASEESNSEIEQEIPVEQKEGAFSNFPISEETIKLLKGRGVTFLFPIQAKTFHHVYSGKDLIAQARTGTGKTFSFAIPLIEKLHGELQDRKRGRAPQVLVLAPTRELANQVSKDFSDITKKLSVACFYGGTPYGGQFERMRNGIDILVGTPGRIKDHIQNGKLDLTKLKHVVLDEVDQMLDMGFADQVEEILSVAYKKDSEDNPQTLLFSATCPHWVFNVAKKYMKSTYEQVDLIGKKTQKTAITVEHLAIKCHWTQRAAVIGDVIRVYSGHQGRTIIFCETKKEAQELSQNSAIKQDAQSLHGDIPQKQREITLKGFRNGSFGVLVATNVAARGLDIPEVDLVIQSSPPKDVESYIHRSGRTGRAGRTGVCICFYQHKEEYQLVQVEQKAGIKFKRIGVPSATEIIKASSKDAIRLLDSVPPTAISHFKQSAEKLIEEKGAVEALAAALAHISGATSVDQRSLINSNVGFVTMILQCSIEMPNISYAWKELKEQLGEEIDSKVKGMVFLKGKLGVCFDVPTASVTEIQEKWHDSRRWQLSVATEQPELEGPREGYGGFRGQREGSRGFRGQRDGNRRFRGQREGSRGPRGQRSGGGNKSNRSQNKGQKRSFSKAFGQ

SEQ ID NO: 7035 - protein, 639 aa, Homo sapiens
MLPGLALLLLAAWTARALEVYPELQITNVVEANQPVTIQNWCKRGRKQCKTHPHFVIPYRCLVGEFVSDALLVPDKCKFLHQERMDVCETHLHWHTVAKETCSEKSTNLHDYGMLLPCGIDKFRGVEFVCCPLAEESDNVDSADAEEDDSDVWWGGADTDYADGSEDKVVEVAEEEEVAEVEEEEADDDEDDEDGDEVEEEAEEPYEEATERTTSIATTTTTTTESVEEVVRVPTTAASTPDAVDKYLETPGDENEHAHFQKAKERLEAKHRERMSQVMREWEEAERQAKNLPKADKKAVIQHFQEKVESLEQEAANERQQLVETHMARVEAMLNDRRRLALENYITALQAVPPRPRHVFNMLKKYVRAEQKDRQHTLKHFEHVRMVDPKKAAQIRSQVMTHLRVIYERMNQSLSLLYNVPAVAEEIQDEVDELLQKEQNYSDDVLANMISEPRISYGNDALMPSLTETKTTVELLPVNGEFSLDDLQPWHSFGADSVPANTENEVEPVDARPAADRGLTTRPGSGLTNIKTEEISEVKMDAEFRHDSGYEVHHQKLVFFAEDVGSNKGAIIGLMVGGVVIATVIVITLVMLKKKQYTSIHHGVVEVDAAVTPEERHLSKMQQNGYENPTYKFFEQMQN

SEQ ID NO: 7036 - protein, 70 aa, Homo sapiens
MERGAGAKLLPLLLLLRATGFTCAQTDGRNGYTAVIEVTSGGPWGDWAWPEMCPDGFFASGFSLKLGRME

SEQ ID NO: 7037 - protein, 403 aa, Homo sapiens
MALRSAQGDGPTSGHWDGGAEKADFNAKRKKKVAEIHQALNSDPTDVAALRRMAISEGGLLTDEIRRKVWPKLLNVNANDPPPISGKNLRQMSKDYQQVLLDVRRSLRRFPPGMPEEQREGLQEELIDIILLILERNPQLHYYQGYHDIVVTFLLVVGERLATSLVEKLSTHHLRDFMDPTMDNTKHILNYLMPIIDQVNPELHDFMQSAEVGTIFALSWLITWFGHVLSDFRHVVRLYDFFLACHPLMPIYFAAVIVLYREQEVLDCDCDMASVHHLLSQIPQDLPYETLISRAGDLFVQFPPSELAREAAAQQQAERTAASTFKDFELASAQQRPDMVLRQRFRGLLRPEDRTKDVLTKPRTNRFVKLAVMGLTVALGAAALAVVKSALEWAPKFQLQLFP

SEQ ID NO: 7038 - protein, 408 aa, Homo sapiens
MWAFSELPMPLLINLIVSLLGFVATVTLIPAFRGHFIAARLCGQDLNKTSRQQIPESQGVISGAVFLIILFCFIPFPFLNCFVKEQCKAFPHHEFVALIGALLAICCMIFLGFADDVLNLRWRHKLLLPTAASLPLLMVYFTNFGNTTIVVPKPFRPILGLHLDLGILYYVYMGLLAVFCTNAINILAGINGLEAGQSLVISASIIVFNLVELEGDCRDDHVFSLYFMIPFFFTTLGLLYHNWYPSRVFVGDTFCYFAGMTFAVVGILGHFSKTMLLFFMPQVFNFLYSLPQLLHIIPCPRHRIPRLNIKTGKLEMSYSKFKTKSLSFLGTFILKVAESLQLVTVHQSETEDGEFTECNNMTLINLLLKVLGPIHERNLTLLLLLLQILGSAITFSIRYQLVRLFYDV

SEQ ID NO: 7039 - protein, 548 aa, Homo sapiens
MAAPPARADADPSPTSPPTARDTPGRQAEKSETACEDRSNAESLDRLLPPVGTGRSPRKRTTSQCKSEPPLLRTSKRTIYTAGRPPWYNEHGTQSKEAFAIGLGGGSASGKTTVARMIIEALDVPWVVLLSMDSFYKVLTEQQQEQAAHNNFNFDHPDAFDFDLIISTLKKLKQGKSVKVPIYDFTTHSRKKDWKTLYGANVIIFEGIMAFADKTLLELLDMKIFVDTDSDIRLVRRLRRDISERGRDIEGVIKQYNKFVKPSFDQYIQPTMRLADIVVPRGSGNTVAIDLIVQHVHSQLEERELSVRAALASAHQCHPLPRTLSVLKSTPQVRGMHTIIRDKETSRDEFIFYSKRLMRLLIEHALSFLPFQDCVVQTPQGQDYAGKCYAGKQITGVSILRAGETMEPALRAVCKDVRIGTILIQTNQLTGEPELHYLRLPKDISDDHVILMDCTVSTGAAAMMAVRVLLDHDVPEDKIFLLSLLMAEMGVHSVAYAFPRVRIITTAVDKRVNDLFRIIPGIGNFGDRYFGTDAVPDGSDEEEVAYTG

SEQ ID NO: 7040 - protein, 184 aa, Homo sapiens
MWVTKLLPALLLQHVLLHLLLLPIAIPYAEGQRKRRNTIHEFKKSAKTTLIKIDPALKIKTKKVNTADQCANRCTRNKGLPFTCKAFVFDKARKQCLWFPFNSMSSGVKKEFGHEFDLYENKDYIRNCIIGKGRSYKGTVSITKSGIKCQPWSSMIPHEHSGGDDCLVESTFYSIPFWGHNSAR

SEQ ID NO: 7041 - protein, 294 aa, Homo sapiens
MEAEDIQEELTCPICLDYFQDPVSIECGHNFCRGCLHRNWAPGGGPFPCPECRHPSAPAALRPNWALARLTEKTQRRRLGPVPPGLCGRHWEPLRLFCEDDQRPVCLVCRESQEHQTHAMAPIDEAFESYREKLLKSQRNLVAKMKKVMHLQDVEVKNATQWKDKIKSQRMRISTEFSKLHNFLVEEEDLFLQRLNKEEEETKKKLNENTLKLNQTIASLKKLILEVGEKSQAPTLELLQNPKEVLTRSEIQDVNYSLEAVKVKTVCQIPLMKEMLKRFQATKIKTQKQNRHNM

SEQ ID NO: 7042 - protein, 473 aa, Homo sapiens
MAAPCLLRQGRAGALKTMLQEAQVFRGLASTVSLSAESGKSEKGQPQNSKKQSPPKNVVEPKERGKLLATQTAAELSKNLSSPSSYPPAVNKGRKVASPSPSGSVLFTDEGVPKFLSRKTLVEFPQKVLSPFRKQGSDSEARQVGRKVTSPSSSSSSSSSDSESDDEADVSEVTPRVVSKGRGGLRKPEASHSFENRAPRVTVSAKEKTLLQKPHVDITDPEKPHQPKKKGSPAKPSEGRENARPKTTMPRSQVDEEFLKQSLKEKQLQKTFRLNEIDKESQKPFEVKGPLPVHTKSGLSAPPKGSPAPAVLAEEARAEGQLQASPPGAAEGHLEKPVPEPQRKAAPPLPRKETSGTQGIEGHLKGGQAIVEDQIPPSNLETVPVENNHGFHEKTAALKLEAEGEAMEDAAAPGDDRGGTQEPAPVPAEPFDNTTYKNLQHHDYSTYTFLDLNLELSKFRMPQPSSGRESPRH

SEQ ID NO: 7043 - protein, 808 aa, Homo sapiens
MAELLASAGSACSWDFPRAPPSFPPPAASRGGLGGTRSFRPHRGAESPRPGRDRDGVRVPMASSRCPAPRGCRCLPGASLAWLGTVLLLLADWVLLRTALPRIFSLLVPTALPLLRVWAVGLSRWAVLWLGACGVLRATVGSKSENAGAQGWLAALKPLAAALGLALPGLALFRELISWGAPGSADSTRLLHWGSHPTAFVVSYAAALPAAALWHKLGSLWVPGGQGGSGNPVRRLLGCLGSETRRLSLFLVLVVLSSLGEMAIPFFTGRLTDWILQDGSADTFTRNLTLMSILTIASAVLEFVGDGIYNNTMGHVHSHLQGEVFGAVLRQETEFFQQNQTGNIMSRVTEDTSTLSDSLSENLSLFLWYLVRGLCLLGIMLWGSVSLTMVTLITLPLLFLLPKKVGKWYQLLEVQVRESLAKSSQVAIEALSAMPTVRSFANEEGEAQKFREKLQEIKTLNQKEAVAYAVNSWTTSISGMLLKVGILYIGGQLVTSGAVSSGNLVTFVLYQMQFTQAVEVLLSIYPRVQKAVGSSEKIFEYLDRTPRCPPSGLLTPLHLEGLVQFQDVSFAYPNRPDVLVLQGLTFTLRPGEVTALVGPNGSGKSTVAALLQNLYQPTGGQLLLDGKPLPQYEHRYLHRQVAAVGQEPQVFGRSLQENIAYGLTQKPTMEEITAAAVKSGAHSFISGLPQGYDTEVDEAGSQLSGGQRQAVALARALIRKPCVLILDDATSALDANSQLQVEQLLYESPERYSRSVLLITQHLSLVEQADHILFLEGGAIREGGTHQQLMEKKGCYWAMVQAPADAPE

SEQ ID NO: 7044 - protein, 597 aa, Homo sapiens
MSLVSEEFPEEVPPRAEEITIPADVTPERVPTHIVDYSEAEQSDEQLHQEISQANVICIVYAVNNKHSIDKVTSRWIPLINERTDKDSRLPLILVGNKSDLVEYSSMETILPIMNQYTEIETCVECSAKNLKNISELFYYAQKAVLHPTGPLYCPEEKEMKPACIKALTRIFKISDQDNDGTLNDAELNFFQRICFNTPLAPQALEDVKNVVRKHISDGVADSGLTLKGFLFLHTLFIQRGRHETTWTVLRRFGYDDDLDLTPEYLFPLLKIPPDCTTELNHHAYLFLQSTFDKHDLDRDCALSPDELKDLFKVFPYIPWGPDVNNTVCTNERGWITYQGFLSQWTLTTYLDVQRCLEYLGYLGYSILTEQESQASAVTVTRDKKIDLQKKQTQRNVFRCNVIGVKNCGKSGVLQALLGRNLMRQKKIREDHKSYYAINTVYVYGQEKYLLLHDISESEFLTEAEIICDVVCLVYDVSNPKSFEYCARIFKQHFMDSRIPCLIVAAKSDLHEVKQEYSISPTDFCRKHKMPPPQAFTCNTADAPSKDIFVKLTTMAMYPHVTQADLKSSTFWLRASFGATVFAVLGFAMYKALLKQR

SEQ ID NO: 7045 - protein, 223 aa, Homo sapiens
MSVRTLPLLFLNLGGEMLYILDQRLRAQNIPGDKARKVLNDIISTMFNRKFMEELFKPQELYSKKALRTVYERLAHASIMKLNQASMDKLYDLMTMAFKYQVLLCPRPKDVLLVTFNHLDTIKGFIRDSPTILQQVDETLRQLTEIYGGLSAGEFQLIRQTLLIFFQDLHIRRECFWKHMQETVHSAQCCLPGVGNYMEDRRRRLTFHYVYPFENFEFCTWAK

SEQ ID NO: 7046 - protein, 683 aa, Homo sapiens
MLFIFNFLFSPLPTPALICILTFGAAIFLWLITRPQPVLPLLDLNNQSVGIEGGARKGVSQKNNDLTSCCFSDAKTMYEVFQRGLAVSDNGPCLGYRKPNQPYRWLSYKQVSDRAEYLGSCLLHKGYKSSPDQFVGIFAQNRPEWIISELACYTYSMVAVPLYDTLGPEAIVHIVNKADIAMVICDTPQKALVLIGNVEKGFTPSLKVIILMDPFDDDLKQRGEKSGIEILSLYDAENLGKEHFRKPVPPSPEDLSVICFTSGTTGDPKGAMITHQNIVSNAAAFLKCVEHAYEPTPDDVAISYLPLAHMFERIVQAVVYSCGARVGFFQGDIRLLADDMKTLKPTLFPAVPRLLNRIYDKVQNEAKTPLKKFLLKLAVSSKFKELQKGIIRHDSFWDKLIFAKIQDSLGGRVRVIVTGAAPMSTSVMTFFRAAMGCQVYEAYGQTECTGGCTFTLPGDWTSGHVGVPLACNYVKLEDVADMNYFTVNNEGEVCIKGTNVFKGYLKDPEKTQEALDSDGWLHTGDIGRWLPNGTLKIIDRKKNIFKLAQGEYIAPEKIENIYNRSQPVLQIFVHGESLRSSLVGVVVPDTDVLPSFAAKLGVKGSFEELCQNQVVREAILEDLQKIGKESGLKTFEQVKAIFLHPEPFSIENGLLTPTLKAKRGELSKYFRTQIDSLYEHIQD

SEQ ID NO: 7047 - protein, 1031 aa, Homo sapiens
MGRESRHYRKRSASRGRSGSRSRSRSPSDKRSKRGDDRRSRSRDRDRRRERSRSRDKRRSRSRDRKRLRRSRSRERDRSRERRRSRSRDRRRSRSRSRGRRSRSSSPGNKSKKTENRSRSKEKTDGGESSKEKKKDKDDKEDEKEKDAGNFDQNKLEEEMRKRKERVEKWREEQRKKAMENIGELKKEIEEMKQGKKWSLEDDDDDEDDPAEAEKEGNEMEGEELDPLDAYMEEVKEEVKKFNMRSVKGGGGNEKKSGPTVTKVVTVVTTKKAVVDSDKKKGELMENDQDAMEYSSEEEEVDLQTALTGYQTKQRKLLEPVDHGKIEYEPFRKNFYVEVPELAKMSQEEVNVFRLEMEGITVKGKGCPKPIKSWVQCGISMKILNSLKKHGYEKPTPIQTQAIPAIMSGRDLIGIAKTGSGKTIAFLLPMFRHIMDQRSLEEGEGPIAVIMTPTRELALQITKECKKFSKTLGLRVVCVYGGTGISEQIAELKRGAEIIVCTPGRMIDMLAANSGRVTNLRRVTYVVLDEADRMFDMGFEPQVMRIVDNVRPDRQTVMFSATFPRAMEALARRILSKPIEVQVGGRSVVCSDVEQQVIVIEEEKKFLKLLELLGHYQESGSVIIFVDKQEHADGLLKDLMRASYPCMSLHGGIDQYDRDSIINDFKNGTCKLLVATSVAARGLDVKHLILVVNYSCPNHYEDYVHRAGRTGRAGNKGYAYTFITEDQARYAGDIIKALELSGTAVPPDLEKLWSDFKDQQKAEGKIIKKSSGFSGKGFKFDETEQALANERKKLQKAALGLQDSDDEDAAVDIDEQIESMFNSKKRVKDMAAPGTSSVPAPTAGNAEKLEIAKRLALRINAQKNLGIESQDVMQQATNAILRGGTILAPTVSAKTIAEQLAEKINAKLNYVPLEKQEEERQDGGQNESFKRYEEELEINDFPQTARWKVTSKEALQRISEYSEAAITIRGTYFPPGKEPKEGERKIYLAIESANELAVQKAKAEITRLIKEELIRLQNSYQPTNKGRYKVL

SEQ ID NO: 7048 - protein, 351 aa, Homo sapiens
MALPPGPAALRHTLLLLPALLSSGWGELEPQIDGQTWAERALRENERHAFTCRVAGGPGTPRLAWYLDGQLQEASTSRLLSVGGEAFSGGTSTFTVTAHRAQHELNCSLQDPRSGRSANASVILNVQFKPEIAQVGAKYQEAQGPGLLVVLFALVRANPPANVTWIDQDGPVTVNTSDFLVLDAQNYPWLTNHTVQLQLRSLAHNLSVVATNDVGVTSASLPAPGLLATRVEVPLLGIVVAAGLALGTLVGFSTLVACLVCRKEKKTKGPSRHPSLISSDSNNLKLNNVRLPRENMSLPSNLQLNDLTPDSRAVKPADRQMAQNNSRPELLDPEPGGLLTSQGRRNQDKDA

SEQ ID NO: 7049 - protein, 738 aa, Homo sapiens
MSGSCAAPGPGSGSSPAACRFAHYFVLCGIDADSGLEPDELAVLYQWLEADRHGKSQGAANTTSGENFDQSPLRRTFKSKVLAHYPQNIEWNPFDQDAVNMLCMPKGLSFRTQTDNKDPQFHSFIITREDGSRTYGFVLTFYEEVTSKQICTAMQTLYQMHNAEHYSSVYASSSCSMDSLASSLDEGDTTSLLKLQRYNSYDISRDTLYVSKSICLITPLPFMQACKKFLIQLYKAVTSQQPPPLPLESYIHNILYEVPLPPPGRSLKFYGVYEPVICQRPGPSELPLSDYPLREAFELLGLENLVQVFTCVLLEMQILLYSQDYQRLMTVAEGITTLLFPFQWQHVYVPILPASLLHFLDAPVPYLMGLQSKEGTDRSKLELPQEANLCFVDIDNHFIELPEEFPQFPNKVDFIQELSEVLVQFGIPPEGSLHCSESTSKLKNMVLKDLVNDKKNGNVCTNNISMYELLKGNETIARLQALAKRTGVAVEKMDLSASLGEKDKDLKLHCEEAELRDYQLNVQLREVFANRFTQMFADYEAFVIQTAQDMESWLTNREQMQNFDKASFLSDQPEPYLPFLSRFIETQMFATFIDNKIMSQWEEKDPLLRVFDTRIDKIRLYNVRAPTLRTSIYQKCSTLKEAAQSIEQRLMKMDHTAIHPHLLDMKIGQGKYEQGFFPKLQSDVLATGPTSNNRWVSRSATAQRRKERLRQHSEHVGLDNDLREVCGLPSWGASQQAP

SEQ ID NO: 7050 - protein, 184 aa, Homo sapiens
MASERLPNRPACLLVASGAAEGVSAQSFLHCFTMASTAFNLQVATPGGKAMEFVDVTESNARWVQDFRLKAYASPAKLESIDEPICAVGHGVAALCCATNEDRSWVFDSYSLTGPSVCELVRAPGFARLPLVVEDFVKDSGACFSASEPDAVHVVLDRHLVTGQNASSTVPAVQNLLFLCGSRK

SEQ ID NO: 7051 - protein, 368 aa, Homo sapiens
MNPAAEAEFNILLATDSYKVTHYKQYPPNTSKVYSYFECREKKTENSKLRKVKYEETVFYGLQYILNKYLKGKVVTKEKIQEAKDVYKEHFQDDVFNEKGWNYILEKYDGHLPIEIKAVPEGFVIPRGNVLFTVENTDPECYWLTNWIETILVQSWYPITVATNSREQKKILAKYLLETSGNLDGLEYKLHDFGYRGVSSQETAGIGASAHLVNFKGTDTVAGLALIKKYYGTKDPVPGYSVPAAEHSTITAWGKDHEKDAFEHIVTQFSSVPVSVVSDSYDIYNACEKIWGEDLRHLIVSRSTQAPLIIRPDSGNPLDTVLKVLEILGKKFPVTENSKGYKLLPPYLRVIQGDGVDINTLQEVCVLY

SEQ ID NO: 7052 - protein, 955 aa, Homo sapiens
MPAVSKGDGMRGLAVFISDIRNCKSKEAEIKRINKELANIRSKFKGDKALDGYSKKKYVCKLLFIFLLGHDIDFGHMEAVNLLSSNKYTEKQIGYLFISVLVNSNSELIRLINNAIKNDLASRNPTFMCLALHCIANVGSREMGEAFAADIPRILVAGDSMDSVKQSAALCLLRLYKASPDLVPMGEWTARVVHLLNDQHMGVVTAAVSLITCLCKKNPDDFKTCVSLAVSRLSRIVSSASTDLQDYTYYFVPAPWLSVKLLRLLQCYPPPEDAAVKGRLVECLETVLNKAQEPPKSKKVQHSNAKNAILFETISLIIHYDSEPNLLVRACNQLGQFLQHRETNLRYLALESMCTLASSEFSHEAVKTHIDTVINALKTERDVSVRQRAADLLYAMCDRSNAKQIVSEMLRYLETADYAIREEIVLKVAILAEKYAVDYSWYVDTILNLIRIAGDYVSEEVWYRVLQIVTNRDDVQGYAAKTVFEALQAPACHENMVKVGGYILGEFGNLIAGDPRSSPPVQFSLLHSKFHLCSVATRALLLSTYIKFINLFPETKATIQGVLRAGSQLRNADVELQQRAVEYLTLSSVASTDVLATVLEEMPPFPERESSILAKLKRKKGPGAGSALDDGRRDPSSNDINGGMEPTPSTVSTPSPSADLLGLRAAPPPAAPPASAGAGNLLVDVFDGPAAQPSLGPTPEEAFLSPGPEDIGPPIPEADELLNKFVCKNNGVLFENQLLQIGVKSEFRQNLGRMYLFYGNKTSVQFQNFSPTVVHPGDLQTQLAVQTKRVAAQVDGGAQVQQVLNIECLRDFLTPPLLSVRFRYGGAPQALTLKLPVTINKFFQPTEMAAQDFFQRWKQLSLPQQEAQKIFKANHPMDAEVTKAKLLGFGSALLDNVDPNPENFVGAGIIQTKALQVGCLLRLEPNAQAQMYRLTLRTSKEPVSRHLCELLAQQF

SEQ ID NO: 7053 - protein, 304 aa, Homo sapiens
MFSVLSYGRLVARAVLGGLSQTDPRAGGGGGGDYGLVTAGCGFGKDFRKGLLKKGACYGDDACFVARHRSADVLGVADGVGGWRDYGVDPSQFSGTLMRTCERLVKEGRFVPSNPIGILTTSYCELLQNKVPLLGSSTACIVVLDRTSHRLHTANLGDSGFLVVRGGEVVHRSDEQQHYFNTPFQLSIAPPEAEGVVLSDSPDAADSTSFDVQLGDIILTATDGLFDNMPDYMILQELKKLKNSNYESIQQTARSIAEQAHELAYDPNYMSPFAQFACDNGLNVRGGKPDDITVLLSIVAEYTD

SEQ ID NO: 7054 - protein, 101 aa, Homo sapiens
MACPLEKALDVMVSTFHKYSGKEGDKFKLNKSELKELLTRELPSFLGKRTDEAAFQKLMSNLDSNRDNEVDFQEYCVFLSCIAMMCNEFFEGFPDKQPRKK

SEQ ID NO: 7055 - protein, 303 aa, Homo sapiens
MSSARFDSSDRSAWYMGPVSRQEAQTRLQGQRHGMFLVRDSSTCPGDYVLSVSENSRVSHYIINSLPNRRFKIGDQEFDHLPALLEFYKIHYLDTTTLIEPAPRYPSPPMGSVSAPNLPTAEDNLEYVRTLYDFPGNDAEDLPFKKGEILVIIEKPEEQWWSARNKDGRVGMIPVPYVEKLVRSSPHGKHGNRNSNSYGIPEPAHAYAQPQTTTPLPAVSGSPGAAITPLPSTQNGPVFAKAIQKRVPCAYDKTALALEVGDIVKVTRMNINGQWEGEVNGRKGLFPFTHVKIFDPQNPDENE

SEQ ID NO: 7056 - protein, 395 aa, Homo sapiens
MGCLGNSKTEDQRNEEKAQREANKKIEKQLQKDKQVYRATHRLLLLGAGESGKSTIVKQMRILHVNGFNGEGGEEDPQAARSNSDGSEKATKVQDIKNNLKEAIETIVAAMSNLVPPVELANPENQFRVDYILSVMNVPDFDFPPEFYEHAKALWEDEGVRACYERSNEYQLIDCAQYFLDKIDVIKQADYVPSDQDLLRCRVLTSGIFETKFQVDKVNFHMFDVGGQRDERRKWIQCFNDVTAIIFVVASSSYNMVIREDNQTNRLQEALNLFKSIWNNRWLRTISVILFLNKQDLLAEKVLAGKSKIEDYFPEFARYTTPEDATPEPGEDPRVTRAKYFIRDEFLRISTASGDGRHYCYPHFTCAVDTENIRRVFNDCRDIIQRMHLRQYELL

SEQ ID NO: 7057 - protein, 1164 aa, Homo sapiens
MALFPAFAGLSEAPDGGSSRKELDWLSNPSFCVGSITSLSQQTEAAPAHVSEGLPLTRSHLKSESSDESDTNKKLKQTSRKKKKEKKKKRKHQHHKKTKRKHGPSSSSRSETDTDSEKDKPSRGVGGSKKESEEPNQGNNAAADTGHRFVWLEDIQAVTGETFRTDKKPDPANWEYKSLYRGDIARYKRKGDSCLGINPKKQCISWEGTSTEKKHSRKQVERYFTKKSVGLMNIDGVAISSKTEPPSSEPISFIPVKDLEDAAPVTTWLNPLGIYDQSTTHWLQGQGPPEQESKQPDAQPDSESAALKAKVEEFNRRVRENPRDTQLWMAFVAFQDEVMKSPGLYAIEEGEQEKRKRSLKLILEKKLAILERAIESNQSSVDLKLAKLKLCTEFWEPSTLVKEWQKLIFLHPNNTALWQKYLLFCQSQFSTFSISKIHSLYGKCLSTLSAVKDGSILSHPALPGTEEAMFALFLQQCHFLRQAGHSEKAISLFQAMVDFTFFKPDSVKDLPTKGQVEFFEPFWDSGEPRAGEKGARGWKAWMHQQERGGWVVINPDEDDDEPEEDDQEIKDKTLPRWQIWLAAERSRDQRHWRPWRPDKTKKQTEEDCEDPERQVLFDDIGQSLIRLSSHDLQFQLVEAFLQFLGVPSGFTPPASCLYLAMDENSIFDNGLYDEKPLTFFNPLFSGASCVGRMDRLGYPRWTRGQNREGEEFIRNVFHLVMPLFSGKEKSQLCFSWLQYEIAKVIWCLHTKNKKRLKSQGKNCKKLAKNLLKEPENCNNFCLWKQYAHLEWLLGNTEDARKVFDTALGMAGSRELKDSDLCELSLLYAELEVELSPEVRRAATARAVHILTKLTESSPYGPYTGQVLAVHILKARKAYEHALQDCLGDSCVSNPAPTDSCSRLISLAKCFMLFQYLTIGIDAAVQIYEQVFAKLNSSVFPEGSGEGDSASSQSWTSVLEAITLMHTSLLRFHMKVSVYPLAPLREALSQALKLYPGNQVLWRSYVQIQNKSHSASKTRRFFDTITRSAKPLEPWLFAIEAEKLRKRLVETVQRLDGREIHATIPETGLMHRIQALFENAMRSDSGSQCPLLWRMYLNFLVSLGNKERSKGVFYKALQNCPWAKVLYLDAVEYFPDEMQEILDLMTEKELRVRLPLEELELLLED

SEQ ID NO: 7058 - protein, 209 aa, Homo sapiens
MPVAVMAESAFSFKKLLDQCENQELEAPGGIATPPVYGQLLALYLLHNDMNNARYLWKRIPPAIKSANSELGGIWSVGQRIWQRDFPGIYTTINAHQWSETVQPIMEALRDATRRRAFALVSQAYTSIIADDFAAFVGLPVEEAVKGILEQGWQADSTTRMVLPRKPVAGALDVSFNKFIPLSEPAPVPPIPNEQQLARLTDYVAFLEN

SEQ ID NO: 7059 - protein, 431 aa, Homo sapiens
MAATDIARQVGEGCRTVPLAGHVGFDSLPDQLVNKSVSQGFCFNILCVGETGLGKSTLMDTLFNTKFEGEPATHTQPGVQLQSNTYDLQESNVRLKLTIVSTVGFGDQINKEDSYKPIVEFIDAQFEAYLQEELKIRRVLHTYHDSRIHVCLYFIAPTGHSLKSLDLVTMKKLDSKVNIIPIIAKADAISKSELTKFKIKITSELVSNGVQIYQFPTDDESVAEINGTMNAHLPFAVIGSTEELKIGNKMMRARQYPWGTVQVENEAHCDFVKLREMLIRVNMEDLREQTHTRHYELYRRCKLEEMGFKDTDPDSKPFSLQETYEAKRNEFLGELQKKEEEMRQMFVQRVKEKEAELKEAEKELHEKFDRLKKLHQDEKKKLEDKKKSLDDEVNAFKQRKTAAELLQSQGSQAGGSQTLKRDKEKKNLGFL

SEQ ID NO: 7060 - protein, 461 aa, Homo sapiens [sequence omitted]

SEQ ID NO: 7061 - protein, 316 aa, Homo sapiens
MTPSEGARAGTGRELEMLDSLLALGGLVLLRDSVEWEGRSLLKALVKKSALCGEQVHILGCEVSEEEFREGFDSDINNRLVYHDFFRDPLNWSKTEEAFPGGPLGALRAMCKRTDPVPVTIALDSLSWLLLRLPCTTLCQVLHAVSHQDSCPGDSSSVGKVSVLGLLHEELHGPGPVGALSSLAQTEVTLGGTMGQASAHILCRRPRQRPTDQTQWFSILPDFSLDLQEGPSVESQPYSDPHIPPVDPTTHLTFNLHLSKKEREARDSLILPFQFSSEKQQALLRPRPGQATSHIFYEPDAYDDLDQEDPDDDLDI

SEQ ID NO: 7062 - protein, 1531 aa, Homo sapiens
MPSDFISLLSADLDLESPKSLYSRESVYDLLPKELQLPPSRETSVASMSQTSGGEAGSPPPAVVAADASSAPSSSSMGGACSSFTTSSSPTIYSTSVTDSKAMQVESCSSAVGVSNRGVSEKQLTSNTVQQHPSTPKRHTVLYISPPPEDLLDNSRMSCQDEGCGLESEQSCSMWMEDSPSNFSNMSTSSYNDNTEVPRKSRKRNPKQRPGVKRRDCEESNMDIFDADSAKAPHYVLSQLTTDNKGNSKAGNGTLENQKGTGVKKSPMLCGQYPVKSEGKELKIVVQPETQHRARYLTEGSRGSVKDRTQQGFPTVKLEGHNEPVVLQVFVGNDSGRVKPHGFYQACRVTGRNTTPCKEVDIEGTTVIEVGLDPSNNMTLAVDCVGILKLRNADVEARIGIAGSKKKSTRARLVFRVNIMRKDGSTLTLQTPSSPILCTQPAGVPEILKKSLHSCSVKGEEEVFLIGKNFLKGTKVIFQENVSDENSWKSEAEIDMELFHQNHLIVKVPPYHDQHITLPVSVGIYVVTNAGRSHDVQPFTYTPDPAAAGALNVNVKKEISSPARPCSFEEAMKAMKTTGCNLDKVNIIPNALMTPLIPSSMIKSEDVTPMEVTAEKRSSTIFKTTKSVGSTQQTLENISNIAGNGSFSSPSSSHLPSENEKQQQIQPKAYNPETLTTIQTQDISQPGTFPAVSASSQLPNSDALLQQATQFQTRETQSREILQSDGTVVNLSQLTEASQQQQQSPLQEQAQTLQQQISSNIFPSPNSVSQLQNTIQQLQAGSFTGSTASGSSGSVDLVQQVLEAQQQLSSVLFSAPDGNENVQEQLSADIFQQVSQIQSGVSPGMFSSTEPTVHTRPDNLLPGRAESVHPQSENTLSNQQQQQQQQQQVMESSAAMVMEMQQSICQAAAQIQSELFPSTASANGNLQQSPVYQQTSHMMSALSTNEDMQMQCELFSSPPAVSGNETSTTTTQQVATPGTTMFQTSSSGDGEETGTQAKQIQNSVFQTMVQMQHSGDNQPQVNLFSSTKSMMSVQNSGTQQQGNGLFQQGNEMMSLQSGNFLQQSSHSQAQLFHPQNPIADAQNLSQETQGSLFHSPNPIVHSQTSTTSSEQMQPPMFHSQSTIAVLQGSSVPQDQQSTNIFLSQSPMNNLQTNTVAQEAFFAAPNSISPLQSTSNSEQQAAFQQQAPISHIQTPMLSQEQAQPPQQGLFQPQVALGSLPPNPMPQSQQGTMFQSQHSIVAMQSNSPSQEQQQQQQQQQQQQQQQQQSILFSNQNTMATMASPKQPPPNMIFNPNQNPMANQEQQNQSIFHQQSNMAPMNQEQQPMQFQSQSTVSSLQNPGPTQSESSQTPLFHSSPQIQLVQGSPSSQEQQVTLFLSPASMSALQTSINQQDMQQSPLYSPQNNMPGIQGATSSPQPQATLFHNTAGGTMNQLQNSPGSSQQTSGMFLFGIQNNCSQLLTSGPATLPDQLMAISQPGQPQNEGQPPVTTLLSQQMPENSPLASSINTNQNIEKIDLLVSLQNQGNNLTGSF

SEQ ID NO: 7063 - protein, 703 aa, Homo sapiens
MAAATGDPGLSKLQFAPFSSALDVGFWHELTQKKLNEYRLDEAPKDIKGYYYNGDSAGLPARLTLEFSAFDMSAPTPARCCPAIGTLYNTNTLESFKTADKKLLLEQAANEIWESIKSGTALENPVLLNKFLLLTFADLKKYHFYYWFCYPALCLPESLPLIQGPVGLDQRFSLKQIEALECAYDNLCQTEGVTALPYFLIKYDENMVLVSLLKHYSDFFQGQRTKITIGVYDPCNLAQYPGWPLRNFLVLAAHRWSSSFQSVEVVCFRDRTMQGARDVAHSIIFEVKLPEMAFSPDCPKAVGWEKNQKGGMGPRMVNLSECMDPKRLAESSVDLNLKLMCWRLVPTLDLDKVVSVKCLLLGAGTLGCNVARTLMGWGVRHITFVDNAKISYSNPVRQPLYEFEDCLGGGKPKALAAADRLQKIFPGVNARGFNMSIPMPGHPVNFSSVTLEQARRDVEQLEQLIESHDVVFLLMDTRESRWLPAVIAASKRKLVINAALGFDTFVVMRHGLKKPKQQGAGDLCPNHPVASADLLGSSLFANIPGYKLGCYFCNDVVAPGDSTRDRTLDQQCTVSRPGLAVIAGALAVELMVSVLQHPEGGYAIASSSDDRMNEPPTSLGLVPHQIRGFLSRFDNVLPVSLAFDKCTACSSKVLDQYEREGFNFLAKVFNSSHSFLEDLTGLTLLHQETQAAEIWDMSDDETI

SEQ ID NO: 7064 - protein, 671 aa, Homo sapiens
MHHQQRMAALGTDKELSDLLDFSAMFSPPVSSGKNGPTSLASGHFTGSNVEDRSSSGSWGNGGHPSPSRNYGDGTPYDHMTSRDLGSHDNLSPPFVNSRIQSKTERGSYSSYGRESNLQGCHQQSLLGGDMDMGNPGTLSPTKPGSQYYQYSSNNPRRRPLHSSAMEVQTKKVRKVPPGLPSSVYAPSASTADYNRDSPGYPSSKPATSTFPSSFFMQDGHHSSDPWSSSSGMNQPGYAGMLGNSSHIPQSSSYCSLHPHERLSYPSHSSADINSSLPPMSTFHRSGTNHYSTSSCTPPANGTDSIMANRGSGAAGSSQTGDALGKALASIYSPDHTNNSFSSNPSTPVGSPPSLSAGTAVWSRNGGQASSSPNYEGPLHSLQSRIEDRLERLDDAIHVLRNHAVGPSTAMPGGHGDMHGIIGPSHNGAMGGLGSGYGTGLLSANRHSLMVGTHREDGVALRGSHSLLPNQVPVPQLPVQSATSPDLNPPQDPYRGMPPGLQGQSVSSGSSEIKSDDEGDENLQDTKSSEDKKLDDDKKDIKSITRSRSSNNDDEDLTPEQKAEREKERRMANNARERLRVRDINEAFKELGRMVQLHLKSDKPQTKLLILHQAVAVILSLEQQVRERNLNPKAACLKRREEEKVSSEPPPLSLAGPHPGMGDASNHMGQM

SEQ ID NO: 7065 - protein, 1081 aa, Homo sapiens
MESAGLEQLLRELLLPDTERIRRATEQLQIVLRAPAALPALCDLLASAADPQIRQFAAVLTRRRLNTRWRRLAAEQRESLKSLILTALQRETEHCVSLSLAQLSATIFRKEGLEAWPQLLQLLQHSTHSPHSPEREMGLLLLSVVVTSRPEAFQPHHRELLRLLNETLGEVGSPGLLFYSLRTLTTMAPYLSTEDVPLARMLVPKLIMAMQTLIPIDEAKACEALEALDELLESEVPVITPYLSEVLTFCLEVARNVALGNAIRIRILCCLTFLVKVKSKALLKNRLLPPLLHTLFPIVAAEPPPGQLDPEDQDSEEEELEIELMGETPKHFAVQVVDMLALHLPPEKLCPQLMPMLEEALRSESPYQRKAGLLVLAVLSDGAGDHIRQRLLPPLLQIVCKGLEDPSQVVRNAALFALGQFSENLQPHISSYSREVMPLLLAYLKSVPLGHTHHLAKACYALENFVENLGPKVQPYLPELMECMLQLLRNPSSPRAKELAVSALGAIATAAQASLLPYFPAIMEHLREFLLTGREDLQPVQIQSLETLGVLARAVGEPMRPLAEECCQLGLGLCDQVDDPDLRRCTYSLFAALSGLMGEGLAPHLEQITTLMLLSLRSTEGIVPQYDGSSSFLLFDDESDGEEEEELMDEDVEEEDDSEISGYSVENAFFDEKEDTCAAVGEISVNTSVAFLPYMESVFEEVFKLLECPHLNVRKAAHEALGQFCCALHKACQSCPSEPNTAALQAALARVVPSYMQAVNRERERQVVMAVLEALTGVLRSCGTLTLKPPGRLAELCGVLKAVLQRKTACQDTDEEEEEEDDDQAEYDAMLLEHAGEAIPALAAAAGGDSFAPFFAGFLPLLVCKTKQGCTVAEKSFAVGTLAETIQGLGAASAQFVSRLLPVLLSTAQEADPEVRSNAIFGMGVLAEHGGHPAQEHFPKLLGLLFPLLARERHDRVRDNICGALARLLMASPTRKPEPQVLAALLHALPLKEDLEEWVTIGRLFSFLYQSSPDQVIDVAPELLRICSLILADNKIPPDTKAALLLLLTFLAKQHTDSFQAALGSLPVDKAQELQAVLGLS

SEQ ID NO: 7066 - protein, 747 aa, Homo sapiens
MAEAVERTDELVREYLLFRGFTHTLRQLDAEIKADKEKGFRVDKIVDQLQQLMQVYDLAALRDYWSYLERRLFSRLEDIYRPTIHKLKTSLFRFYLVYTIQTNRNDKAQEFFAKQATELQNQAEWKDWFVLPFLPSPDTNPTFATYFSRQWADTFIVSLHNFLSVLFQCMPVPVILNFDAECQRTNQVQEENEVLRQKLFALQAEIHRLKKEEQQPEEEEALVQHKLPPYVSNMDRLGDSELAMVCSQRNASLSQSPRVGFLSSLLPQSKKSPSRLSPAQGPPQPQSSAKKESFGGQGTKGKDPTSGAKDGKSLLSGLATGESGWSQHRQRRLQDHGKERKELFSTTTSQCAEKKPEASGPEAEPCPELHTEPVEPLTRASSAGPEGGGVRPEQPFIVLGQEEYGEHHSSIMHCRVDCSGRRVASLDVDGVIKVWSFNPIMQTKASSISKSPLLSLEWATKRDRLLLLGSGVGTVRLYDTEAKKNLCEININDNMPRILSLACSPNGASFVCSAAAPSLTSQVDFSAPDIGSKGMNQVPGRLLLWDTKTMKQQLQFSLDPEPIAINCTAFNHNGNLLVTGAADGVIRLFDMQQHECAMSWRAHYGEVYSVEFSYDENTVYSIGEDGKFIQWNIHKSGLKVSEYSLPSDATGPFVLSGYSGYKQVQVPRGRLFAFDSEGNYMLTCSATGGVIYKLGGDEKVLESCLSLGGHRAPVVTVDWSTAMDCGTCLTASMDGKIKLTTLLAHKA

SEQ ID NO: 7067 - protein, 951 aa, Homo sapiens
MDGRWQCSCWAWFLLVLAVVAGDTVSTGSTDNSPTSNSLEGGTDATAFWWGEWTKWTACSRSCGGGVTSQERHCLQQRRKSVPGPGNRTCTGTSKRYQLCRVQECPPDGRSFREEQCVSFNSHVYNGRTHQWKPLYPDDYVHISSKPCDLHCTTVDGQRQLMVPARDGTSCKLTDLRGVCVSGKCEPIGCDGVLFSTHTLDKCGICQGDGSSCTHVTGNYRKGNAHLGYSLVTHIPAGARDIQIVERKKSADVLALADEAGYYFFNGNYKVDSPKNFNIAGTVVKYRRPMDVYETGIEYIVAQGPTNQGLNVMVWNQNGKSPSITFEYTLLQPPHESRPQPIYYGFSESAESQGLDGAGLMGFVPHNGSLYGQASSERLGLDNRLFGHPGLDMELGPSQGQETNEVCEQAGGGACEGPPRGKGFRDRNVTGTPLTGDKDDEEVDTHFASQEFFSANAISDQLLGAGSDLKDFTLNETVNSIFAQGAPRSSLAESFFVDYEENEGAGPYLLNGSYLELSSDRVANSSSEAPFPNVSTSLLTSAGNRTHKARTRPKARKQGVSPADMYRWKLSSHEPCSATCTTGVMSAYAMCVRYDGVEVDDSYCDALTRPEPVHEFCAGRECQPRWETSSWSECSRTCGEGYQFRVVRCWKMLSPGFDSSVYSDLCEAAEAVRPEERKTCRNPACGPQWEMSEWSECTAKCGERSVVTRDIRCSEDEKLCDPNTRPVGEKNCTGPPCDRQWTVSDWGPCSGSCGQGRTIRHVYCKTSDGRVVPESQCQMETKPLAIHPCGDKNCPAHWLAQDWERCNTTCGRGVKKRLVLCMELANGKPQTRSGPECGLAKKPPEESTCFERPCFKWYTSPWSECTKTCGVGVRMRDVKCYQGTDIVRGCDPLVKPVGRQACDLQPCPTEPPDDSCQDQPGTNCALAIKVNLCGHWYYSKACCRSCRPPHS

SEQ ID NO: 7068 - protein, 314 aa, Homo sapiens
MVAPVWYLVAAALLVGFILFLTRSRGRAASAGQEPLHNEELAGAGRVAQPGPLEPEEPRAGGRPRRRRDLGSRLQAQRRAQRVAWAEADENEEEAVILAQEEEGVEKPAETHLSGKIGAKKLRKLEEKQARKAQREAEEAEREERKRLESQREAEWKKEEERLRLEEEQKEEEERKAREEQAQREHEEYLKLKEAFVVEEEGVGETMTEEQSQSFLTEFINYIKQSKVVLLEDLASQVGLRTQDTINRIQDLLAEGTITGVIDDRGKFIYITPEELAAVANFIRQRGRVSIAELAQASNSLIAWGRESPAQAPA

SEQ ID NO: 7069 - protein, 218 aa, Homo sapiens
MAEISRIQYEMEYTEGISQRMRVPEKLKVAPPNADLEQGFQEGVPNASVIMQVPERIVVAGNNEDVSFSRPADLDLIQSTPFKPLALKTPPRVLTLSERPLDFLDLERPPTTPQNEEIRAVGRLKRERSMSENAVRQNGQLVRNDSLYGISNIDTTIEGTSDDLTVVDAASLRRQIIKLNRRLQLLEEENKERAKREMVMYSITVAFWLLNSWLWFRR

SEQ ID NO: 7070 - protein, 211 aa, Homo sapiens [sequence omitted]

SEQ ID NO: 7071 - protein, 912 aa, Homo sapiens
MEDFARGAASPGPSRPGLVPVSIIGAEDEDFENELETNSEEQNSQFQSLEQVKRRPAHLMALLQHVALQFEPGPLLCCLHADMLGSLGPKEAKKAFLDFYHSFLEKTAVLRVPVPPNVAFELDRTRADLISEDVQRRFVQEVVQSQQVAVGRQLEDFRSKRLMGMTPWEQELAQLEAWVGRDRASYEARERHVAERLLMHLEEMQHTISTDEEKSAAVVNAIGLYMRHLGVRTKSGDKKSGRNFFRKKVMGNRRSDEPAKTKKGLSSILDAARWNRGEPQVPDFRHLKAEVDAEKPGATDRKGGVGMPSRDRNIGAPGQDTPGVSLHPLSLDSPDREPGADAPLELGDSSPQGPMSLESLAPPESTDEGAETESPEPGDEGEPGRSGLELEPEEPPGWRELVPPDTLHSLPKSQVKRQEVISELLVTEAAHVRMLRVLHDLFFQPMAECLFFPLEELQNIFPSLDELIEVHSLFLDRLMKRRQESGYLIEEIGDVLLARFDGAEGSWFQKISSRFCSRQSFALEQLKAKQRKDPRFCAFVQEAESRPRCRRLQLKDMIPTEMQRLTKYPLLLQSIGQNTEEPTEREKVELAAECCREILHHVNQAVRDMEDLLRLKDYQRRLDLSHLRQSSDPMLSEFKNLDITKKKLVHEGPLTWRVTKDKAVEVHVLLLDDLLLLLQRQDERLLLKSHSRTLTPTPDGKTMLRPVLRLTSAMTREVATDHKAFYVLFTWDQEAQIYELVAQTVSERKNWCALITETAGSLKVPAPASRPKPRPSPSSTREPLLSSSENGNGGRETSPADARTERILSDLLPFCRPGPEGQLAATALRKVLSLKQLLFPAEEDNGAGPPRDGDGVPGGGPLSPARTQEIQENLLSLEETMKQLEELEEEFCRLRPLLSQLGGNSVPQPGCT

SEQ ID NO: 7072 - protein, 457 aa, Homo sapiens
MLLPQLCWLPLLAGLLPPVPAQKFSALTFLRVDQDKDKDCSLDCAGSPQKPLCASDGRTFLSRCEFQRAKCKDPQLEIAYRGNCKDVSRCVAERKYTQEQARKEFQQVFIPECNDDGTYSQVQCHSYTGYCWCVTPNGRPISGTAVAHKTPRCPGSVNEKLPQREGTGKTVSLQIFSVLNSDDAAAPALETQPQGDEEDIASRYPTLWTEQVKSRQNKTNKNSVSSCDQEHQSALEEAKQPKNDNVVIPECAHGGLYKPVQCHPSTGYCWCVLVDTGRPIPGTSTRYEQPKCDNTARAHPAKARDLYKGRQLQGCPGAKKHEFLTSVLDALSTDMVHAASDPSSSSGRLSEPDPSHTLEERVVHWYFKLLDKNSSGDIGKKEIKPFKRFLRKKSKPKKCVKKFVEYCDVNNDKSISVQELMGCLGVAKEDGKADTKKRHTPRGHAESTSNRQPRKQG

SEQ ID NO: 7073 - protein, 410 aa, Homo sapiens
MPYSTNKELILGIMVGTAGISLLLLWYHKVRKPGIAMKLPEFLSLGNTFNSITLQDEIHDDQGTTVIFQERQLQILEKLNELLTNMEELKEEIRFLKEAIPKLEEYIQDELGGKITVHKISPQHRARKRRLPTIQSSATSNSSEEAESEGGYITANTDTEEQSFPVPKAFNTRVEELNLDVLLQKVDHLRMSESGKSESFELLRDHKEKFRDEIEFMWRFARAYGDMYELSTNTQEKKHYANIGKTLSERAINRAPMNGHCHLWYAVLCGYVSEFEGLQNKINYGHLFKEHLDIAIKLLPEEPFLYYLKGRYCYTVSKLSWIEKKMAATLFGKIPSSTVQEALHNFLKAEELCPGYSNPNYMYLAKCYTDLEENQNALKFCNLALLLPTVTKEDKEAQKEMQKIMTSLKR

SEQ ID NO: 7074 - protein, 673 aa, Homo sapiens
MAKPAQGAKYRGSIHDFPGFDPNQDAEALYTAMKGFGSDKEAILDIITSRSNRQRQEVCQSYKSLYGKDLIADLKYELTGKFERLIVGLMRPPAYCDAKEIKDAISGIGTDEKCLIEILASRTNEQMHQLVAAYKDAYERDLEADIIGDTSGHFQKMLVVLLQGTREEDDVVSEDLVQQDVQDLYEAGELKWGTDEAQFIYILGNRSKQHLRLVFDEYLKTTGKPIEASIRGELSGDFEKLMLAVVKCIRSTPEYFAERLFKAMKGLGTRDNTLIRIMVSRSELDMLDIREIFRTKYEKSLYSMIKNDTSGEYKKTLLKLSGGDDDAAGQFFPEAAQVAYQMWELSAVARVELKGTVRPANDFNPDADAKALRKAMKGLGTDEDTIIDIITHRSNVQRQQIRQTFKSHFGRDLMTDLKSEISGDLARLILGLMMPPAHYDAKQLKKAMEGAGTDEKALIEILATRTNAEIRAINEAYKEDYHKSLEDALSSDTSGHFRRILISLATGHREEGGENLDQAREDAQVAAEILEIADTPSGDKTSLETRFMTILCTRSYPHLRRVFQEFIKMTNYDVEHTIKKEMSGDVRDAFVAIVQSVKNKPLFFADKLYKSMKGAGTDEKTLTRIMVSRSEIDLLNIRREFIEKYDKSLHQAIEGDTSGDFLKALLALCGGED

SEQ ID NO: 7075 - protein, 695 aa, Homo sapiens
MVAERTHKAAATGARGPGELGAPGTVALVAARAERGARLPSPGSCGLLTLALCSLALSLLAHFRTAELQARVLRLEAERGEQQMETAILGRVNQLLDEKWKLHSRRRREAPKTSPGCNCPPGPPGPTGRPGLPGDKGAIGMPGRVGSPGDAGLSIIGPRGPPGQPGTRGFPGFPGPIGLDGKPGHPGPKGDMGLTGPPGQPGPQGQKGEKGQCGEYPHRECLSSMPAALRSSQIIALKGEQSQASIQGPPGPPGPPGPSGPLGHPGLPGPMGPPGLPGPPGPKGDPGIQGYHGRKGERGMPGMPGKHGAKGAPGIAVAGMKGEPGIPGTKGEKGAEGSPGLPGLLGQKGEKGDAGNSIGGGRGEPGPPGLPGPPGPKGEAGVDGQVGPPGQPGDKGERGAAGEQGPDGPKGSKGEPGKGEMVDYNGNINEALQEIRTLALMGPPGLPGQIGPPGAPGIPGQKGEIGLPGPPGHDGEKGPRGKPGDMGPPGPQGPPGKDGPPGVKGENGHPGSPGEKGEKGETGQAGSPGEKGEAGEKGNPGAEVPGLPGPEGPPGPPGLQGVPGPKGEAGLDGAKGEKGFQGEKGDRGPLGLPGASGLDGRPGPPGTPGPIGVPGPAGPKGERGSKGDPGMTGPTGAAGLPGLHGPPGDKGNRGERGKKGSRGPKGDKGDQGAPGLDAPCPLGEDGLPVQGCWNK

SEQ ID NO: 7076 - protein, 562 aa, Homo sapiens
MNTNDAKEYLARREIPQLFESLLNGLMCSKPEDPVEYLESCLQKVKELGGCDKVKWDTFVSQEKKTLPPLNGGQSRRSFLRNVMPENSNFPYRRYDRLPPIHQFSIESDTDLSETAELIEEYEVFDPTRPRPKIILVIGGPGSGKGTQSLKIAERYGFQYISVGELLRKKIHSTSSNRKWSLIAKIITTGELAPQETTITEIKQKLMQIPDEEGIVIDGFPRDVAQALSFEDQICTPDLVVFLACANQRLKERLLKRAEQQGRPDDNVKATQRRLMNFKQNAAPLVKYFQEKGLIMTFDADRDEDEVFYDISMAVDNKLFPNKEAAAGSSDLDPSMILDTGEIIDTGSDYEDQGDDQLNVFGEDTMGGFMEDLRKCKIIFIIGGPGSGKGTQCEKLVEKYGFTHLSTGELLREELASESERSKLIRDIMERGDLVPSGIVLELLKEAMVASLGDTRGFLIDGYPREVKQGEEFGRRIGDPQLVICMDCSADTMTNRLLQRSRSSLPVDDTTKTIAKRLEAYYRASIPVIAYYETKTQLHKINAEGTPEDVFLQLCTAIDSIF

SEQ ID NO: 7077 - protein, 223 aa, Homo sapiens
MEDVKLEFPSLPQCKEDAEEWTYPMRREMQEILPGLFLGPYSSAMKSKLPVLQKHGITHIICIRQNIEANFIKPNFQQLFRYLVLDIADNPVENIIRFFPMTKEFIDGSLQMGGKVLVHGNAGISRSAAFVIAYIMETFGMKYRDAFAYVQERRFCINPNAGFVHQLQEYEAIYLAKLTIQMMSPLQIERSLSVHSGTTGSLKRTHEEEDDFGTMQVATAQNG

SEQ ID NO: 7078 - protein, 4547 aa, Homo sapiens
MEPSGSLFPSLVVVGHVVTLAAVWHWRRGRRWAQDEQDERDRVQKKTFTKWVNKHLIKAQRHISDLYEDLRDGHNLISLLEVLSGDSLPREKGRMRFHKLQNVQIALDYLRHRQVKLVNIRNDDIADGNPKLTLGLIWTIILHFQISDIQVSGQSEDMTAKEKLLLWSQRMVEGYQGLRCDNFTSSWRDGRLFNAIIHRHKPLLIDMNKVYRQTNLENLDQAFSVAERDLGVTRLLDPEDVDVPQPDEKSIITYVSSLYDAMPRVPDVQDGVRANELQLRWQEYRELVLLLLQWMRHHTAAFEERRFPSSFEEIEILWSQFLKFKEMELPAKEADKNRSKGIYQSLEGAVQAGQLKVPPGYHPLDVEKEWGKLHVAILEREKQLRSEFERLECLQRIVTKLQMEAGLCEEQLNQADALLQSDVRLLAAGKVPQRAGEVERDLDKADSMIRLLFNDVQTLKDGRHPQGEQMYRRVYRLHERLVAIRTEYNLRLKAGVAAPATQVAQVTLQSVQRRPELEDSTLRYLQDLLAWVEENQHRVDGAEWGVDLPSVEAQLGSHRGLHQSIEEFRAKIERARSDEGQLSPATRGAYRDCLGRLDLQYAKLLNSSKARLRSLESLHSFVAAATKELMWLNEKEEEEVGFDWSDRNTNMTAKKESYSALMRELELKEKKIKELQNAGDRLLREDHPARPTVESFQAALQTQWSWMLQLCCCIEAHLKENAAYFQFFSDVREAEGQLQKLQEALRRKYSCDRSATVTRLEDLLQDAQDEKEQLNEYKGHLSGLAKRAKAVVQLKPRHPAHPMRGRLPLLAVCDYKQVEVTVHKGDECQLVGPAQPSHWKVLSSSGSEAAVPSVCFLVPPPNQEAQEAVTRLEAQHQALVTLWHQLHVDMKSLLAWQSLRRDVQLIRSWSLATFRTLKPEEQRQALHSLELHYQAFLRDSQDAGGFGPEDRLMAEREYGSCSHHYQQLLQSLEQGAQEESRCQRCISELKDIRLQLEACETRTVHRLRLPLDKEPARECAQRIAEQQKAQAEVEGLGKGVARLSAEAEKVLALPEPSPAAPTLRSELELTLGKLEQVRSLSAIYLEKLKTISLVIRGTQGAEEVLRAHEEQLKEAQAVPATLPELEATKASLKKLRAQAEAQQPTFDALRDELRGAQEVGERLQQRHGERDVEVERWRERVAQLLERWQAVLAQTDVRQRELEQLGRQLRYYRESADPLGAWLQDARRRQEQIQAMPLADSQAVREQLRQEQALLEEIERHGEKVEECQRFAKQYINAIKDYELQLVTYKAQLEPVASPAKKPKVQSGSESVIQEYVDLRTHYSELTTLTSQYIKFISETLRRMEEEERLAEQQRAEERERLAEVEAALEKQRQLAEAHAQAKAQAEREAKELQQRMQEEVVRREEAAVDAQQQKRSIQEELQQLRQSSEAEIQAKARQAEAAERSRLRIEEEIRVVRLQLEATERQRGGAEGELQALRARAEEAEAQKRQAQEEAERLRRQVQDESQRKRQAEVELASRVKAEAEAAREKQRALQALEELRLQAEEAERRLRQAEVERARQVQVALETAQRSAEAELQSKRASFAEKTAQLERSLQEEHVAVAQLREEAERRAQQQAEAERAREEAERELERWQLKANEALRLRLQAEEVAQQKSLAQAEAEKQKEEAEREARRRGKAEEQAVRQRELAEQELEKQRQLAEGTAQQRLAAEQELIRLRAETEQGEQQRQLLEEELARLQREAAAATQKRQELEAELAKVRAEMEVLLASKARAEEESRSTSEKSKQRLEAEAGRFRELAEEAARLRALAEEAKRQRQLAEEDAARQRAEAERVLAEKLAAIGEATRLKTEAEIALKEKEAENERLRRLAEDEAFQRRRLEEQAAQHKADIEERLAQLRKASDSELERQKGLVEDTLRQRRQVEEEILALKASFEKAAAGKAELELELGRIRSNAEDTLRSKEQAELEAARQRQLAAEEERRRREAEERVQKSLAAEEEAARQRKAALEEVERLKAKVEEARRLRERAEQESARQLQLAQEAAQKRLQAEEKAHAFAVQQKEQELQQTLQQEQSVLDQLRGEAEAARRAAEEAEEARVQAEREAAQSRRQVEEAERLKQSAEEQAQARAQAQAAAEKLRKEAEQEAARRAQAEQAALRQKQAADAEMEKHKKFAEQTLRQKAQVEQELTTLRLQLEETDHQKNLLDEELQRLKAEATEAARQRSQVEEELFSVRVQMEELSKLKARIEAENRALILRDKDNTQRFLQEEAEKMKQVAEEAARLSVAAQEAARLRQLAEEDLAQQRALAEKMLKEKMQAVQEATRLKAEAELLQQQKELAQEQARRLQEDKEQMAQQLAEETQGFQRTLEAERQRQLEMSAEAERLKLRVAEMSRAQARAEEDAQRFRKQAEEIGEKLHRTELATQEKVTLVQTLEIQRQQSDHDAERLREAIAELEREKEKLQQEAKLLQLKSEEMQTVQQEQLLQETQALQQSFLSEKDSLLQRERFIEQEKAKLEQLFQDEVAKAQQLREEQQRQQQQMEQERQRLVASMEEARRRQHEAEEGVRRKQEELQQLEQQRRQQEELLAEENQRLREQLQLLEEQHRAALAHSEEVTASQVAATKTLPNGRDALDGPAAEAEPEHSFDGLRRKVSAQRLQEAGILSAEELQRLAQGHTTVDELARREDVRHYLQGRSSIAGLLLKATNEKLSVYAALQRQLLSPGTALILLEAQAASGFLLDPVRNRRLTVNEAVKEGVVGPELHHKLLSAERAVTGYKDPYTGQQISLFQAMQKGLIVREHGIRLLEAQIATGGVIDPVHSHRVPVDVAYRRGYFDEEMNRVLADPSDDTKGFFDPNTHENLTYLQLLERCVEDPETGLCLLPLTDKAAKGGELVYTDSEARDVFEKATVSAPFGKFQGKTVTIWEIINSEYFTAEQRRDLLRQFRTGRITVEKIIKIIITVVEEQEQKGRLCFEGLRSLVPAAELLESRVIDRELYQQLQRGERSVRDVAEVDTVRRALRGANVIAGVWLEEAGQKLSIYNALKKDLLPSDMAVALLEAQAGTGHIIDPATSARLTVDEAVRAGLVGPEFHEKLLSAEKAVTGYRDPYTGQSVSLFQALKKGLIPREQGLRLLDAQLSTGGIVDPSKSHRVPLDVACARGCLDEETSRALSAPRADAKAYSDPSTGEPATYGELQQRCRPDQLTGLSLLPLSEKAARARQEELYSELQARETFEKTPVEVPVGGFKGRTVTVWELISSEYFTAEQRQELLRQFRTGKVTVEKVIKILITIVEEVETLRQERLSFSGLRAPVPASELLASGVLSRAQFEQLKDGKTTVKDLSELGSVRTLLQGSGCLAGIYLEDTKEKVSIYEAMRRGLLRATTAALLLEAQAATGFLVDPVRNQRLYVHEAVKAGVVGPELHEQLLSAEKAVTGYRDPYSGSTISLFQAMQKGLVLRQHGIRLLEAQIATGGIIDPVHSHRVPVDVAYQRGYFSEEMNRVLADPSDDTKGFFDPNTHENLTYRQLLERCVEDPETGLRLLPLKGAEKAEVVETTQVYTEEETRRAFEETQIDIPGGGSHGGSTMSLWEVMQSDLIPEEQRAQLMADFQAGRVTKERMIIIIIEIIEKTEIIRQQGLASYDYVRRRLTAEDLFEARIISLETYNLLREGTRSLREALEAESAWCYLYGTGSVAGVYLPGSRQTLSIYQALKKGLLSAEVARLLLEAQAATGFLLDPVKGERLTVDEAVRKGLVGPELHDRLLSAERAVTGYRDPYTEQTISLFQAMKKELIPTEEALRLLDAQLATGGIVDPRLGFHLPLEVAYQRGYLNKDTHDQLSEPSEVRSYVDPSTDERLSYTQLLRRCRRDDGTGQLLLPLSDARKLTFRGLRKQITMEELVRSQVMDEATALQLREGLTSIEEVTKNLQKFLEGTSCIAGVFVDATKERLSVYQAMKKGIIRPGTAFELLEAQAATGYVIDPIKGLKLTVEEAVRMGIVGPEFKDKLLSAERAVTGYKDPYSGKLISLFQAMKKGLILKDHGIRLLEAQIATGGIIDPEESHRLPVEVAYKRGLFDEEMNEILTDPSDDTKGFFDPNTEENLTYLQLMERCITDPQTGLCLLPLKEKKRERKTSSKSSVRKRRVVIVDPETGKEMSVYEAYRKGLIDHQTYLELSEQECEWEEITISSSDGVVKSMIIDRRSGRQYDIDDAIAKNLIDRSALDQYRAGTLSITEFADMLSGNAGGFRSRSSSVGSSSSYPISPAVSRTQLASWSDPTEETGPVAGILDTETLEKVSITEAMHRNLVDNITGQRLLEAQACTGGIIDPSTGERFPVTDAVNKGLVDKIMVDRINLAQKAFCGFEDPRTKTKMSAAQALKKGWLYYEAGQRFLEVQYLTGGLIEPDTPGRVPLDEALQRGTVDARTAQKLRDVGAYSKYLTCPKTKLKISYKDALDRSMVEEGTGLRLLEAAAQSTKGYYSPYSVSGSGSTAGSRTGSRTGSRAGSRRGSFDATGSGFSMTFSSSSYSSSGYGRRYASGSSASLGGPESAVA

SEQ ID NO: 7079 - protein, 511 aa, Homo sapiens
MAAAEAVHHIHLQNFSRSLLETLNGQRLGGHFCDVTVRIREASLRAHRCVLAAGSPFFQDKLLLGHSEIRVPPVVPAQTVRQLVEFLYSGSLVVAQGEALQVLTAASVLRIQTVIDECTQIIARARAPGTSAPTPLPTPVPPPLAPAQLRHRLRHLLAARPPGHPGAAHSRKQRQPARLQLPAPPTPAKAEGPDADPSLSAAPDDRGDEDDEESDDETDGEDGEGGGPGEGQAPPSFPDCAAGFLTAAADSACEEPPAPTGLADYSGAGRDFLRGAGSAEDVFPDSYVSTWHDEDGAVPEGCPTETPVQPDCILSGSRPPGVKTPGPPVALFPFHLGAPGPPAPPPSAPSGPAPAPPPAFYPTLQPEAAPSTQLGEVPAPSAAPTTAPSGTPARTPGAEPPTYECSHCRKTFSSRKNYTKHMFIHSGEKPHQCAVCWRSFSLRDYLLKHMVTHTGVRAFQCAVCAKRFTQKSSLNVHMRTHRPERAPCPACGKVFSHRALLERHLAAHPAP

SEQ ID NO: 7080 - protein, 955 aa, Homo sapiens
MSKTNKSKSGSRSSRSRSASRSRSRSFSKSRSRSRSLSRSRKRRLSSRSRSRSYSPAHNRERNHPRVYQNRDFRGHNRGYRRPYYFRGRNRGFYPWGQYNRGGYGNYRSNWQNYRQAYSPRRGRSRSRSPKRRSPSPRSRSHSRNSDKSSSDRSRRSSSSRSSSNHSRVESSKRKSAKEKKSSSKDSRPSQAAGDNQGDEAKEQTFSGGTSQDTKASESSKPWPDATYGTGSASRASAVSELSPRERSPALKSPLQSVVVRRRSPRPSPVPKPSPPLSSTSQMGSTLPSGAGYQSGTHQGQFDHGSGSLSPSKKSPVGKSPPSTGSTYGSSQKEESAASGGAAYTKRYLEEQKTENGKDKEQKQTNTDKEKIKEKGSFSDTGLGDGKMKSDSFAPKTDSEKPFRGSQSPKRYKLRDDFEKKMADFHKEEMDDQDKDKAKGRKESEFDDEPKFMSKVIGANKNQEEEKSGKWEGLVYAPPGKEKQRKTEELEEESFPERSKKEDRGKRSEGGHRGFVPEKNFRVTAYKAVQEKSSSPPPRKTSESRDKLGAKGDFPTGKSSFSITREAQVNVRMDSFDEDLARPSGLLAQERKLCRDLVHSNKKEQEFRSIFQHIQSAQSQRSPSELFAQHIVTIVHHVKEHHFGSSGMTLHERFTKYLKRGTEQEAAKNKKSPEIHRRIDISPSTFRKHGLAHDEMKSPREPGYKAEGKYKDDPVDLRLDIERRKKHKERDLKRGKSRESVDSRDSSHSRERSAEKTEKTHKGSKKQKKHRRARDRSRSSSSSSQSSHSYKAEEYTEETEEREESTTGFDKSRLGTKDFVGPSERGGGRARGTFQFRARGRGWGRGNYSGNNNNNSNNDFQKRNREEEWDPEYTPKSKKYYLHDDREGEGSDKWVSRGRGRGAFPRGRGRFMFRKSSTSPKWAHDKFSGEEGEIEDDESGTENREEKDNIQPTTE

SEQ ID NO: 7081 - protein, 467 aa, Homo sapiens
MSQGVRRAGAGQGVAAAVQLLVTLSFLRSVVEAQVTGVLDDCLCDIDSIDNFNTYKIFPKIKKLQERDYFRYYKVNLKRPCPFWAEDGHCSIKDCHVEPCPESKIPVGIKAGHSNKYLKMANNTKELEDCEQANKLGAINSTLSNQSKEAFIDWARYDDSRDHFCELDDERSPAAQYVDLLLNPERYTGYKGTSAWRVWNSIYEENCFKPRSVYRPLNPLAPSRGEDDGESFYTWLEGLCLEKRVFYKLISGLHASINLHLCANYLLEETWGKPSWGPNIKEFKHRFDPVETKGEGPRRLKNLYFLYLIELRALSKVAPYFERSIVDLYTGNAEEDADTKTLLLNIFQDTKSFPMHFDEKSMFAGDKKGAKSLKEEFRLHFKNISRIMDCVGCDKCRLWGKLQTQGLGTALKILFSEKEIQKLPENSPSKGFQLTRQEIVALLNAFGRLSTSIRDLQNFKVLLQHSR

SEQ ID NO: 7082 - protein, 537 aa, Homo sapiens
MGCVQCKDKEATKLTEERDGSLNQSSGYRYGTDPTPQHYPSFGVTSIPNYNNFHAAGGQGLTVFGGVNSSSHTGTLRTRGGTGVTLFVALYDYEARTEDDLSFHKGEKFQILNSSEGDWWEARSLTTGETGYIPSNYVAPVDSIQAEEWYFGKLGRKDAERQLLSFGNPRGTFLIRESETTKGAYSLSIRDWDDMKGDHVKHYKIRKLDNGGYYITTRAQFETLQQLVQHYSERAAGLCCRLVVPCHKGMPRLTDLSVKTKDVWEIPRESLQLIKRLGNGQFGEVWMGTWNGNTKVAIKTLKPGTMSPESFLEEAQIMKKLKHDKLVQLYAVVSEEPIYIVTEYMNKGSLLDFLKDGEGRALKLPNLVDMAAQVAAGMAYIERMNYIHRDLRSANILVGNGLICKIADFGLARLIEDNEYTARQGAKFPIKWTAPEAALYGRFTIKSDVWSFGILLTELVTKGRVPYPGMNNREVLEQVERGYRMPCPQDCPISLHELMIHCWKKDPEERPTFEYLQSFLEDYFTATEPQYQPGENL

SEQ ID NO: 7083 - protein, 562 aa, Homo sapiens
MDDKGDPSNEEAPKAIKPTSKEFRKTWGFRRTTIAKREGAGDAEADPLEPPPPQQQLGLSLRRSGRQPKRTERVEQFLTIARRRGRRSMPVSLEDSGEPTSCPATDAETASEGSVESASETRSGPQSASTAVKERPASSEKVKGGDDHDDTSDSDSDGLTLKELQNRLRRKREQEPTERPLKGIQSRLRKKRREEGPAETVGSEASDTVEGVLPSKQEPENDQGVVSQAGKDDRESKLEGKAAQDIKDEEPGDLGRPKPECEGYDPNALYCICRQPHNNRFMICCDRCEEWFHGDCVGISEARGRLLERNGEDYICPNCTILQVQDETHSETADQQEAKWRPGDADGTDCTSIGTIEQKSSEDQGIKGRIEKAANPSGKKKLKIFQPVIEAPGASKCIGPGCCHVAQPDSVYCSNDCILKHAAATMKFLSSGKEQKPKPKEKMKMKPEKPSLPKCGAQAGIKISSVHKRPAPEKKETTVKKAVVVPARSEALGKEAACESSTPSWASDHNYNAVKPEKTAAPSPSLLYKCMYHLGVGLLDPSRSFWIAIPWACPGLGVAALC

SEQ ID NO: 7084 - protein, 353 aa, Homo sapiens
MEKTLETVPLERKKREKEQFRKLFIGGLSFETTEESLRNYYEQWGKLTDCVVMRDPASKRSRGFGFVTFSSMAEVDAAMAARPHSIDGRVVEPKRAVAREESGKPGAHVTVKKLFVGGIKEDTEEHHLRDYFEEYGKIDTIEIITDRQSGKKRGFGFVTFDDHDPVDKIVLQKYHTINGHNAEVRKALSRQEMQEVQSSRSGRGGNFGFGDSRGGGGNFGPGPGSNFRGGSDGYGSGRGFGDGYNGYGGGPGGGNFGGSPGYGGGRGGYGGGGPGYGNQGGGYGGGYDNYGGGNYGSGNYNDFGNYNQQPSNYGPMKSGNFGGSRNMGGPYGGGNYGPGGSGGSGGYGGRSRY

SEQ ID NO: 7085 - protein, 430 aa, Homo sapiens
MSLVELLLWWNCFSRTGVAASLEVSESPGSIQVARGQPAVLPCTFTTSAALINLNVIWMVTPLSNANQPEQVILYQGGQMFDGAPRFHGRVGFTGTMPATNVSIFINNTQLSDTGTYQCLVNNLPDIGGRNIGVTGLTVLVPPSAPHCQIQGSQDIGSDVILLCSSEEGIPRPTYLWEKLDNTLKLPPTATQDQVQGTVTIRNISALSSGLYQCVASNAIGTSTCLLDLQVISPQPRNIGLIAGAIGTGAVIIIFCIALILGAFFYWRSKNKEEEEEEIPNEIREDDLPPKCSSAKAFHTEISSSDNNTLTSSNAYNSRYWSNNPKVHRNTESVSHFSDLGQSFSFHSGNANIPSIYANGTHLVPGQHKTLVVTANRGSSPQVMSRSNGSVSRKPRPPHTHSYTISHATLERIGAVPVMVPAQSRAGSLV

SEQ ID NO: 7086 - protein, 1684 aa, Homo sapiens
MLGTITITVGQRDSEDVSKRDSDKEMATKSAVVHDITDDGQEETPEIIEQIPSSESNLEELTQPTESQANDIGFKKVFKFVGFKFTVKKDKTEKPDTVQLLTVKKDEGEGAAGAGDHKDPSLGAGEAASKESEPKQSTEKPEETLKREQSHAEISPPAESGQAVEECKEEGEEKQEKEPSKSAESPTSPVTSETGSTFKKFFTQGWAGWRKKTSFRKPKEDEVEASEKKKEQEPEKVDTEEDGKAEVASEKLTASEQAHPQEPAESAHEPRLSAEYEKVELPSEEQVSGSQGPSEEKPAPLATEVFDEKIEVHQEEVVAEVHVSTVEERTEEQKTEVEETAGSVPAEELVEMDAEPQEAEPAKELVKLKETCVSGEDPTQGADLSPDEKVLSKPPEGVVSEVEMLSSQERMKVQGSPLKKLFTSTGLKKLSGKKQKGKRGGGDEESGEHTQVPADSPDSQEEQKGESSASSPEEPEEITCLEKGLAEVQQDGEAEEGATSDGEKKREGVTPWASFKKMVTPKKRVRRPSESDKEDELDKVKSATLSSTESTASEMQEEMKGSVEEPKPEEPKRKVDTSVSWEALICVGSSKKRARRGSSSDEEGGPKAMGGDHQKADEAGKDKETGTDGILAGSQEHDPGQGSSSPEQAGSPTEGEGVSTWESFKRLVTPRKKSKSKLEEKSEDSIAGSGVEHSTPDTEPGKEESWVSIKKFIPGRRKKRPDGKQEQAPVEDAGPTGANEDDSDVPAVVPLSEYDAVEREKMEAQQAQKSAEQPEQKAATEVSKELSESQVHMMAAAVADGTRAATIIEERSPSWISASVTEPLEQVEAEAALLTEEVLEREVIAEEEPPTVTEPLPENREARGDTVVSEAELTPEAVTAAETAGPLGAEEGTEASAAEETTEMVSAVSQLTDSPDTTEEATPVQEVEGGVPDIEEQERRTQEVLQAVAEKVKEESQLPGTGGPEDVLQPVQRAEAERPEEQAEASGLKKETDVVLKVDAQEAKTEPFTQGKVVGQTTPESFEKAPQVTESIESSELVTTCQAETLAGVKSQEMVMEQAIPPDSVETPTDSETDGSTPVADFDAPGTTQKDEIVEIHEENEVASGTQSGGTEAEAVPAQKERPPAPSSFVFQEETKEQSKMEDTLEHTDKEVSVETVSILSKTEGTQEADQYADEKTKDVPFFEGLEGSIDTGITVSREKVTEVALKGEGTEEAECKKDDALELQSHAKSPPSPVEREMVVQVEREKTEAEPTHVNEEKLEHETAVTVSEEVSKQLLQTVNVPIIDGAKEVSSLEGSPPPCLGQEEAVCTKIQVQSSEASFTLTAAAEEEKVLGETANILETGETLEPAGAHLVLEEKSSEKNEDFAAHPGEDAVPTGPDCQAKSTPVIVSATTKKGLSSDLEGEKTTSLKWKSDEVDEQVACQEVKVSVAIEDLEPENGILELETKSSKLVQNIIQTAVDQFVRTEETATEMLTSELQTQAHVIKADSQDAGQETEKEGEEPQASAQDETPITSAKEESESTAVGQAHSDISKDMSEASEKTMTVEVEGSTVNDQQLEEVVLPSEEEGGGAGTKSVPEDDGHALLAERIEKSLVEPKEDEKGDDVDDPENQNSALADTDASGGLTKESPDTNGPKQKEKEDAQEVELQEGKVHSESDKAITPQAQEELQKQERESAKSELTES

SEQ ID NO: 7087 - protein, 136 aa, Homo sapiens
MILQQPLQRGPQGGAQRLPRAALGVTWGLDARLPPVSVSQPASLPSLPREPLRKQFLSEENMATHFSQLSLHNDHPYCSPPMTFSPALPPLRSPCSELLLWRYPGSLIPEALRLLRLGDTPSPPYPATPAGDIMEL

SEQ ID NO: 7088 - protein, 588 aa, Homo sapiens
MGGLEKKKYERGSATNYITRNKARKKLQLSLADFRRLCILKGIYPHEPKHKKKVNKGSTAARTFYLIKDIRFLLHEPIVNKFREYKVFVRKLRKAYGKSEWNTVERLKDNKPNYKLDHIIKERYPTFIDALRDLDDALSMCFLFSTFPRTGKCHVQTIQLCRRLTVEFMHYIIAARALRKVFLSIKGIYYQAEVLGQPIVWITPYAFSHDHPTDVDYRVMATFTEFYTTLLGFVNFRLYQLLNLHYPPKLEGQAQAEAKAGEGTYALDSESCMEKLAALSASLARVVVPATEEEAEVDEFPTDGEMSAQEEDRRKELEAQEKHKKLFEGLKFFLNREVPREALAFIIRSFGGEVSWDKSLCIGATYDVTDSRITHQIVDRPGQQTSVIGRCYVQPQWVFDSVNARLLLPVAEYFSGVQLPPHLSPFVTEKEGDYVPPEKLKLLALQRGEDPGNLNESEEEEEEDDNNEGDGDEEGENEEEEEDAEAGSEKEEEARLAALEEQRMEGKKPRVMAGTLKLEDKQRLAQEEESEAKRLAIMMMKKREKYLYQKIMFGKRRKIREANKLAEKRKAHDEAVRSEKKAKKARPE

SEQ ID NO: 7089 - protein, 331 aa, Homo sapiens
MDWVMKHNGPNDASDGTVRLRGLPFGCSKEEIVQFFQGLEIVPNGITLTMDYQGRSTGEAFVQFASKEIAENALGKHKERIGHRYIEIFRSSRSEIKGFYDPPRRLLGQRPGPYDRPIGGRGGYYGAGRGSYGGFDDYGGYNNYGYGNDGFDDRMRDGRGMGGHGYGGAGDASSGFHGGHFVHMRGLPFRATENDIANFFSPLNPIRVHIDIGADGRATGEADVEFVTHEDAVAAMSKDKNNMQHRYIELFLNSTPGGGSGMGGSGMGGYGRDGMDNQGGYGSVGRMGMGNNYSGGYGTPDGLGGYGRGGGGSGGYYGQGGMSGGGWRGMY

SEQ ID NO: 7090 - protein, 910 aa, Homo sapiens
MASSAQSGGSSGGPAVPTVQRGIIKMVLSGCAIIVRGQPRGGPPPERQINLSNIRAGNLARRAAATQPDAKDTPDEPWAFPAREFLRKKLIGKEVCFTIENKTPQGREYGMIYLGKDTNGENIAESLVAEGLATRREGMRANNPEQNRLSECEEQAKAAKKGMWSEGNGSHTIRDLKYTIENPRHFVDSHHQKPVNAIIEHVRDGSVVRALLLPDYYLVTVMLSGIKCPTFRREADGSETPEPFAAEAKFFTESRLLQRDVQIILESCHNQNILGTILHPNGNITELLLKEGFARCVDWSIAVYTRGAEKLRAAERFAKERRLRIWRDYVAPTANLDQKDKQFVAKVMQVLNADAIVVKLNSGDYKTIHLSSIRPPRLEGENTQDKNKKLRPLYDIPYMFEAREFLRKKLIGKKVNVTVDYIRPASPATETVPAFSERTCATVTIGGINIAEALVSKGLATVIRYRQDDDQRSSHYDELLAAEARAIKNGKGLHSKKEVPIHRVADISGDTQKAKQFLPFLQRAGRSEAVVEYVFSGSRLKLYLPKETCLITFLLAGIECPRGARNLPGLVQEGEPFSEEATLFTKELVLQREVEVEVESMDKAGNFIGWLHIDGANLSVLLVEHALSKVHFTAERSSYYKSLLSAEEAAKQKKEKVWAHYEEQPVEEVMPVLEEKERSASYKPVFVTEITDDLHFYVQDVETGTQLEKLMENMRNDIASHPPVEGSYAPRRGEFCIAKFVDGEWYRARVEKVESPAKIHVFYIDYGNREVLPSTRLGTLSPAFSTRVLPAQATEYAFAFIQVPQDDDARTDAVDSVVRDIQNTQCLLNVEHLSAGCPHVTLQFADSKGDVGLGLVKEGLVMVEVRKEKQFQKVITEYLNAQESAKSARLNLWRYGDFRADDADEFGYSR

SEQ ID NO: 7091 - protein, 530 aa, Homo sapiens
MACTGWTSPLPLCVCLLLTCGFAEAGKLLVVPMDGSHWFTMRSVVEKLILRGHEVVVVMPEVSWQLGRSLNCTVKTYSTSYTLEDLDREFKAFAHAQWKAQVRSIYSLLMGSYNDIFDLFFSNCRSLFKDKKLVEYLKESSFDAVFLDPFDNCGLIVAKYFSLPSVVFARGILCHYLEEGAQCPAPLSYVPRILLGFSDAMTFKERVRNHIMHLEEHLLCHRFFKNALEIASEILQTPVTEYDLYSHTSIWLLRTDFVLDYPKPVMPNMIFIGGINCHQGKPLPMEFEAYINASGEHGIVVFSLGSMVSEIPEKKAMAIADALGKIPQTVLWRYTGTRPSNLANNTILVKWLPQNDLLGHPMTRAFITHAGSHGVYESICNGVPMVMMPLFGDQMDNAKRMETKGAGVTLNVLEMTSEDLENALKAVINDKSYKENIMRLSSLHKDRPVEPLDLAVFWVEFVMRHKGAPHLRPAAHDLTWYQYHSLDVIGFLLAVVLTVAFITFKCCAYGYRKCLGKKGRVKKAHKSKTH

SEQ ID NO: 7092 - protein, 1017 aa, Homo sapiens
MRVFLLCAYILLLMVSQLRAVSFPEDDEPLNTVDYHYSRQYPVFRGRPSGNESQHRLDFQLMLKIRDTLYIAGRDQVYTVNLNEMPKTEVIPNKKLTWRSRQQDRENCAMKGKHKDECHNFIKVFVPRNDEMVFVCGTNAFNPMCRYYRLSTLEYDGEEISGLARCPFDARQTNVALFADGKLYSATVADFLASDAVIYRSMGDGSALRTIKYDSKWIKEPHFLHAIEYGNYVYFFFREIAVEHNNLGKAVYSRVARICKNDMGGSQRVLEKHWTSFLKARLNCSVPGDSFFYFDVLQSITDIIQINGIPTVVGVFTTQLNSIPGSAVCAFSMDDIEKVFKGRFKEQKTPDSVWTAVPEDKVPKPRPGCCAKHGLAEAYKTSIDFPDETLSFIKSHPLMDSAVPPIADEPWFTKTRVRYRLTAISVDHSAGPYQNYTVIFVGSEAGMVLKVLAKTSPFSLNDSVLLEEIEAYNHAKCSAENEEDKKVISLQLDKDHHALYVAFSSCIIRIPLSRCERYGSCKKSCIASRDPYCGWLSQGSCGRVTPGMLAEGYEQDTEFGNTAHLGDCHEILPTSTTPDYKIFGGPTSGVRWEVQSGESNQMVHMNVLITCVFAAFVLGAFIAGVAVYCYRDMFVRKNRKIHKDAESAQSCTDSSGSFAKLNGLFDSPVKEYQQNIDSPKLYSNLLTSRKELPPNGDTKSMVMDHRGQPPELAALPTPESTPVLHQKTLQAMKSHSEKAHGHGASRKETPQFFPSSPPPHSPLSHGHIPSAIVLPNATHDYNTSFSNSNAHKAEKKLQNIDHPLTKSSSKRDHRRSVDSRNTLNDLLKHLNDPNSNPKAIMGDIQMAHQNLMLDPMGSMSEVPPKVPNREASLYSPPSTLPRNSPTKRVDVPTTPGVPMTSLERQRGYHKNSSQRHSISAMPKNLNSPNGVLLSRQPSMNRGGYMPTPTGAKVDYIQGTPVSVHLQPSLSRQSSYTSNGTLPRTGLKRTPSLKPDVPPKPSFVPQTPSVRPLNKYTY

SEQ ID NO: 7093 - protein, 2025 aa, Homo sapiens
MDNFAEGDFTVADYALLEDCPHVDDCVFAAEFMSNDYVRVTQLYCDGVGVQYKDYIQSERNLEFDICSIWCSKPISVLQDYCDAIKINIFWPLLFQHQNSSVISRLHPCVDANNSRASEINLKKLQHLELMEDIVDLAKKVANDSFLIGGLLRIGCKIENKILAMEEALNWIKYAGDVTILTKLGSIDNCWPMLSIFFTEYKYHITKIVMEDCNLLEELKTQSCMDCIEEGELMKMKGNEEFSKERFDIAIIYYTRAIEYRPENYLLYGNRALCFLRTGQFRNALGDGKRATILKNTWPKGHYRYCDALSMLGEYDWALQANIKAQKLCKNDPEGIKDLIQQHVKLQKQIEDLQGRTANKDPIKAFYENRAYTPRSLSAPIFTTSLNFVEKERDFRKINHEMANGGNQNLKVADEALKVDDCDCHPEFSPPSSQPPKHKGKQKSRNNESEKFSSSSPLTLPADLKNILEKQFSKSSRAAHQDFANIMKMLRSLIQDGYMALLEQRCRSAAQAFTELLNGLDPQKIKQLNLAMINYVLVVYGLAISLLGIGQPEELSEAENQFKRIIEHYPSEGLDCLAYCGIGKVYLKKNRFLEALNHFEKARTLIYRLPGVLTWPTSNVIIEESQPQKIKMLLEKFVEECKFPPVPDAICCYQKCHGYSKIQIYITDPDFKGFIRISCCQYCKIEFHMNCWKKLKTTTFNDKIDKDFLQGICLTPDCEGVISKIIIFSSGGEVKCEFEHKVIKEKVPPRPILKQKCSSLEKLRLKEDKKLKRKIQKKEAKKLAQERMEEDLRESNPPKNEEQKETVDNVQRCQFLDDRILQCIKQYADKIKSGIQNTAMLLKELLSWKVLSTEDYTTCFSSRNFLNEAVDYVIRHLIQENNRVKTRIFLHVLSELKEVEPKLAAWIQKLNSFGLDATGTFFSRYGASLKLLDFSIMTFLWNEKYGHKLDSIEGKQLDYFSEPASLKEARCLIWLLEEHRDKFPALHSALDEFFDIMDSRCTVLRKQDSGEAPFSSTKVKNKSKKKKPKDSKPMLVGSGTTSVTSNNEIITSSEDHSNRNSDSAGPFAVPDHLRQDVEEFEALYDQHSNEYVVRNKKLWDMNPKQKCSTLYDYFSQFLEEHGPLDMSNKMFSAEYEFFPEETRQILEKAGGLKPFLLGCPRFVVIDNCIALKKVASRLKKKRKKKNIKTKVEEISKAGEYVRVKLQLNPAAREFKPDVKSKPVSDSSSAPAFENVKPKPVSANSPKPACEDVKAKPVSDNSSRQVSEDGQPKGVSSNSPKPGSEDANYKRVSCNSPKPVLEDVKPTYWAQSHLVTGYCTYLPFQRFDITQTPPAYINVLPGLPQYTSIYTPLASLSPEYQLPRSVPVVPSFVANDRADKNAAAYFEGHHLNAENVAGHQIASETQILEGSLGISVKSHCSTGDAHTVLSESNRNDEHCGNSNNKCEVIPESTSAVTNIPHVQMVAIQVSWNIIHQEVNTEPYNPFEERQGEISRIEKEHQVLQDQLQEVYENYEQIKLKGLEETRDLEEKLKRHLEENKISKTELDWFLQDLEREIKKWQQEKKEIQERLKSLKKKIKKVSNASEMYTQKNDGKEKEHELHLDQSLEISNTLTNEKMKIEEYIKKGKEDYEESHQRAVAAEVSVLENWKESEVYKLQIMESQAEAFLKKLGLISRDPAAYPDMESDIRSWELFLSNVTKEIEKAKSQFEEQIKAIKNGSRLSELSKVQISELSFPACNTVHPELLPESSGDDGQGLVTSASDVTGNHAALHRDPSVFSAGDSPGEAPSALLPGPPPGQPEATQLTGPKRAGQAALSERSPVADRKQPVPPGRAARSSQSPKKPFNSIIEHLSVVFPCYNSTELAGFIKKVRSKNKNSLSGLSIDEIVQRVTEHILDEQKKKKPNPGKDKRTYEPSSATPVTRSSQGSPSVVVAPSPKTKGQKAEDVPVRIALGASSCEICHEVFKSKNVRVLKCGHKYHKGCFKQWLKGQSACPACQGRDLLTEESPSGRGWPSQNQELPSCSSR

SEQ ID NO: 7094 - protein, 797 aa, Homo sapiens
MENQGTRTQQIRQVLLLFVLLGMSQAGSETWSFSVAEEMQSGSFVGNLAKDLGLKVRELSSRGARVVSNDKKQRLQLDINTGDLLLSETLDREELCGSIEPCVLHLQVLMQNPTQFLQIELQVRDINDHSPIFSEKQMLLEIPENSPVGAVFLLESAKDLDVGINAVKSYTISPNSHFHIKMRVIPDNRKYPELVLDKALDYEELPELSFILSALDGGSPPRSGTALVRVVVVDINDNSPEFEQAFYEVKIRENSILGSLILIVSAWDLDSGTNGEICYTFSHASEDIRKTFEINQKSGEITLRAPLDFETIESYSIIIQATDGGGLFGKSTVIIHVIDVNDNAPEITVSSITSPIPENTPETVVMVFSIQDIDSGDNGRIVCSIPEDLPFVLKSSVENYYTLETERPLDRESTAEYNITITVTDLGIPRLKTEHNTTVLVSDVNDNAPTFTQTSYTLFVRENNSPALHIGSVSATDRDSGTNAQVNYSLLPPQDLHLPLASLVSINTDNGHLFALRSLDYEALQAFDFRVGATDRGSPALSSEALVRVLVLDANDNSPFVLYPLQNGSAPCTELVPRAAEPGYLVTKVVAVDGDSGQNAWLSYQLLKATEPGLFGVWAHNGEVRTARLLSERDAAKHRLVVLVKDNGEPPRSATATLQVLLVDGFSQPYLPLPEAAPAQAQADSLTVYLVVALASVSSLFLFSVLLFVAVRLCRRSRAASVGSCSVPKGPFPGHLVDVSGTGTLSQSYQYEVCLTGGSETNEFKFLKPVIPNIQAKGLGKNSEENSTFRNSFGFNF

SEQ ID NO: 7095 - protein, 922 aa, Homo sapiens
MFLHSVNLWNLAFYVFMVFLATLGLWDVFFGFEENKCSMSYMFEYPEYQKIELPKKLAKRYPAYELYLYGEGSYAEEHKILPLTGIPVLFLPGNAGSYKQVRSIGSIALRKAEDIDFKYHFDFFSVNFNEELVALYGGSLQKQTKFVHECIKTILKLYKGQEFAPKSVAIIGHSMGGLVARALLTLKNFKHDLINLLITQATPHVAPVMPLDRFITDFYTTVNNYWILNARHINLTTLSVAGGFRDYQVRSGLTFLPKLSHHTSALSVVSSAVPKTWVSTDHLSIVWCKQLQLTTVRAFFDLIDADTKQITQNSKKKLSVLYHHFIRHPSKHFEENPAIISDLTGTSMWVLVKVSKWTYVAYNESEKIYFTFPLENHRKIYTHVYCQSTMLDTNSWIFACINSTSMCLQGVDLSWKAELLPTIKYLTLRLQDYPSLSHLVVYVPSVRGSKFVVDCEFFKKEKRYIQLPVTHLFSFGLSSRKVVLNTNGLYYNLELLNFGQIYQAFKINVVSKCSAVKEEITSIYRLHIPWSYEDSLTIAQAPSSTEISLKLHIAQPENNTHVALFKMYTSSDCRYEVTVKTSFSQILGQVVRFHGGALPAYVVSNILLAYRGQLYSLFSTGCCLEYATMLDKEAKPYKVDPFVIIIKFLLGYKWFKELWDVLLLPELDAVILTCQSMCFPLISLILFLFGTCTAYWSGLLSSASVRLLSSLWLALKRPSELPKDIKMISPDLPFLTIVLIIVSWTTCGALAILLSYLYYVFKVVHLQASLTTFKNSQPVNPKHSRRSEKKSNHHKDSSIHHLRLSANDAEDSLRMHSTVINLLTWIVLLSMPSLIYWLKNLRYYFKLNPDPCKPLAFILIPTMAILGNTYTVSIKSSKLLKTTSQFPLPLAVGVIAFGSAHLYRLPCFVFIPLLLHALCNFM

SEQ ID NO: 7096 - protein, 518 aa, Homo sapiens
MFLRAGLAALSPLLRSLRPSPVAAMSTGTFVVSQPLNYRGGARVEPADASGTEKAFEPATGRVIATFTCSGEKEVNLAVQNAKAAFKIWSQKSGMERCRILLEAARIIREREDEIATMECINNGKSIFEARLDIDISWQCLEYYAGLAASMAGEHIQLPGGSFGYTRREPLGVCVGIGAWNYPFQIASWKSAPALACGNAMVFKPSPFTPVSALLLAEIYSEAGVPPGLFNVVQGGAATGQFLCQHPDVAKVSFTGSVPTGMKIMEMSAKGIKPVTLELGGKSPLIIFSDCDMNNAVKGALMANFLTQGQVCCNGTRVFVQKEILDKFTEEVVKQTQRIKIGDPLLEDTRMGPLINRPHLERVLGFVKVAKEQGAKVLCGGDIYVPEDPKLKDGYYMRPCVLTNCRDDMTCVKEEIFGPVMSILSFDTEAEVLERANDTTFGLAAGVFTRDIQRAHRVVAELQAGTCFINNYNVSPVELPFGGYKKSGFGRENGRVTIEYYSQLKTVCVEMGDVESAF

SEQ ID NO: 7097 - protein, 2477 aa, Homo sapiens
MLRGPGPGLLLLAVQCLGTAVPSTGASKSKRQAQQMVQPQSPVAVSQSKPGCYDNGKHYQINQQWERTYLGNALVCTCYGGSRGFNCESKPEAEETCFDKYTGNTYRVGDTYERPKDSMIWDCTCIGAGRGRISCTIANRCHEGGQSYKIGDTWRRPHETGGYMLECVCLGNGKGEWTCKPIAEKCFDHAAGTSYVVGETWEKPYQGWMMVDCTCLGEGSGRITCTSRNRCNDQDTRTSYRIGDTWSKKDNRGNLLQCICTGNGRGEWKCERHTSVQTTSSGSGPFTDVRAAVYQPQPHPQPPPYGHCVTDSGVVYSVGMQWLKTQGNKQMLCTCLGNGVSCQETAVTQTYGGNSNGEPCVLPFTYNGRTFYSCTTEGRQDGHLWCSTTSNYEQDQKYSFCTDHTVLVQTRGGNSNGALCHFPFLYNNHNYTDCTSEGRRDNMKWCGTTQNYDADQKFGFCPMAAHEEICTTNEGVMYRIGDQWDKQHDMGHMMRCTCVGNGRGEWTCIAYSQLRDQCIVDDITYNVNDTFHKRHEEGHMLNCTCFGQGRGRWKCDPVDQCQDSETGTFYQIGDSWEKYVHGVRYQCYCYGRGIGEWHCQPLQTYPSSSGPVEVFITETPSQPNSHPIQWNAPQPSHISKYILRWRPKNSVGRWKEATIPGHLNSYTIKGLKPGVVYEGQLISIQQYGHQEVTRFDFTTTSTSTPVTSNTVTGETTPFSPLVATSESVTEITASSFVVSWVSASDTVSGFRVEYELSEEGDEPQYLDLPSTATSVNIPDLLPGRKYIVNVYQISEDGEQSLILSTSQTTAPDAPPDTTVDQVDDTSIVVRWSRPQAPITGYRIVYSPSVEGSSTELNLPETANSVTLSDLQPGVQYNITIYAVEENQESTPVVIQQETTGTPRSDTVPSPRDLQFVEVTDVKVTIMWTPPESAVTGYRVDVIPVNLPGEHGQRLPISRNTFAEVTGLSPGVTYYFKVFAVSHGRESKPLTAQQTTKLDAPTNLQFVNETDSTVLVRWTPPRAQITGYRLTVGLTRRGQPRQYNVGPSVSKYPLRNLQPASEYTVSLVAIKGNQESPKATGVFTTLQPGSSIPPYNTEVTETTIVITWTPAPRIGFKLGVRPSQGGEAPREVTSDSGSIVVSGLTPGVEYVYTIQVLRDGQERDAPIVNKVVTPLSPPTNLHLEANPDTGVLTVSWERSTTPDITGYRITTTPTNGQQGNSLEEVVHADQSSCTFDNLSPGLEYNVSVYTVKDDKESVPISDTIIPEVPQLTDLSFVDITDSSIGLRWTPLNSSTIIGYRITVVAAGEGIPIFEDFVDSSVGYYTVTGLEPGIDYDISVITLINGGESAPTTLTQQTAVPPPTDLRFTNIGPDTMRVTWAPPPSIDLTNFLVRYSPVKNEEDVAELSISPSDNAVVLTNLLPGTEYVVSVSSVYEQHESTPLRGRQKTGLDSPTGIDFSDITANSFTVHWIAPRATITGYRIRHHPEHFSGRPREDRVPHSRNSITLTNLTPGTEYVVSIVALNGREESPLLIGQQSTVSDVPRDLEVVAATPTSLLISWDAPAVTVRYYRITYGETGGNSPVQEFTVPGSKSTATISGLKPGVDYTITVYAVTGRGDSPASSKPISINYRTEIDKPSQMQVTDVQDNSISVKWLPSSSPVTGYRVTTTPKNGPGPTKTKTAGPDQTEMTIEGLQPTVEYVVSVYAQNPSGESQPLVQTAVTNIDRPKGLAFTDVDVDSIKIAWESPQGQVSRYRVTYSSPEDGIHELFPAPDGEEDTAELQGLRPGSEYTVSVVALHDDMESQPLIGTQSTAIPAPTDLKFTQVTPTSLSAQWTPPNVQLTGYRVRVTPKEKTGPMKEINLAPDSSSVVVSGLMVATKYEVSVYALKDTLTSRPAQGVVTTLENVSPPRRARVTDATETTITISWRTKTETITGFQVDAVPANGQTPIQRTIKPDVRSYTITGLQPGTDYKIYLYTLNDNARSSPVVIDASTAIDAPSNLRFLATTPNSLLVSWQPPRARITGYIIKYEKPGSPPREVVPRPRPGVTEATITGLEPGTEYTIYVIALKNNQKSEPLIGRKKTDELPQLVTLPHPNLHGPEILDVPSTVQKTPFVTHPGYDTGNGIQLPGTSGQQPSVGQQMIFEEHGFRRTTPPTTATPIRHRPRPYPPNVGEEIQIGHIPREDVDYHLYPHGPGLNPNASTGQEALSQTTISWAPFQDTSEYIISCHPVGTDEEPLQFRVPGTSTSATLTGLTRGATYNVIVEALKDQQRHKVREEVVTVGNSVNEGLNQPTDDSCFDPYTVSHYAVGDEWERMSESGFKLLCQCLGFGSGHFRCDSSRWCHDNGVNYKIGEKWDRQGENGQMMSCTCLGNGKGEFKCDPHEATCYDDGKTYHVGEQWQKEYLGAICSCTCFGGQRGWRCDNCRRPGGEPSPEGTTGQSYNQYSQRYHQRTNTNVNCPIECFMPLDVQADREDSRE

SEQ ID NO: 7098 - protein, 291 aa, Homo sapiens
MASSNTVLMRLVASAYSIAQKAGMIVRRVIAEGDLGIVEKTCATDLQTKADRLAQMSICSSLARKFPKLTIIGEEDLPSEEVDQELIEDSQWEEILKQPCPSQYSAIKEEDLVVWVDPLDGTKEYTEGLLDNVTVLIGIAYEGKAIAGVINQPYYNYENNEKQQLREHRNEAKAGPDAVLGRTIWGVLGLGAFGFQLKEVPAGKHIITTTRSHSNKLVTDCVAAMNPDAVLRVGGAGNKIIQLIEGKASAYVFASPGCKKWDTCAPEVILHAVGGKLTDIHGNVLQYHKDV

SEQ ID NO: 7099 - protein, 515 aa, Homo sapiens
MVSIPEYYEGKNVLLTGATGFLGKVLLEKLLRSCPKVNSVYVLVRQKAGQTPQERVEEVLSGKLFDRLRDENPDFREKIIAINSELTQPKLALSEEDKEVIIDSTNIIFHCAATVRFNENLRDAVQLNVIATRQLILLAQQMKNLEVFMHVSTAYAYCNRKHIDEVVYPPPVDPKKLIDSLEWMDDGLVNDITPKLIGDRPNTYIYTKALAEYVVQQEGAKLNVAIVRPSIVGASWKEPFPGWIDNFNGPSGLFIAAGKGILRTIRASNNALADLVPVDVVVNMSLAAAWYSGVNRPRNIMVYNCTTGSTNPFHWGEVEYHVISTFKRNPLEQAFRRPNVNLTSNHLLYHYWIAVSHKAPAFLYDIYLRMTGRSPRMMKTITRLHKAMVFLEYFTSNSWVWNTENVNMLMNQLNPEDKKTFNIDVRQLHWAEYIENYCLGTKKYVLNEEMSGLPAARKHLNKLRNIRYGFNTILVILIWRIFIARSQMARNIWYFVVSLCYKFLSYFRASSTMRY

SEQ ID NO: 7100 - protein, 454 aa, Homo sapiens
MTKREAEELIEIEIDGTEKAECTEESIVEQTYAPAECVSQAIDINEPIGNLKKLLEPRLQCSLDAHEICLQDIQLDPERSLFDQGVKTDGTVQLSVQVISYQGIEPKLNILEIVKPADTVEVVIDPDAHHAESEAHLVEEAQVITLDGTKHITTISDETSEQVTRWAAALEGYRKEQERLGIPYDPIQWSTDQVLHWVVWVMKEFSMTDIDLTTLNISGRELCSLNQEDFFQRVPRGEILWSHLELLRKYVLASQEQQMNEIVTIDQPVQIIPASVQSATPTTIKVINSSAKAAKVQRAPRISGEDRSSPGNRTGNNGQIQLWQFLLELLTDKDARDCISWVGDEGEFKLNQPELVAQKWGQRKNKPTMNYEKLSRALRYYYDGDMICKVQGKRFVYKFVCDLKTLIGYSAAELNRLVTECEQKKLAKMQLHGIAQPVTAVALATASLQTEKDN

SEQ ID NO: 7101 - protein, 384 aa, Homo sapiens
MEPPGRRECPFPSWRFPGLLLAAMVLLLYSFSDACEEPPTFEAMELIGKPKPYYEIGERVDYKCKKGYFYIPPLATHTICDRNHTWLPVSDDACYRETCPYIRDPLNGQAVPANGTYEFGYQMHFICNEGYYLIGEEILYCELKGSVAIWSGKPPICEKVLCTPPPKIKNGKHTFSEVEVFEYLDAVTYSCDPAPGPDPFSLIGESTIYCGDNSVWSRAAPECKVVKCRFPVVENGKQISGFGKKFYYKATVMFECDKGFYLDGSDTIVCDSNSTWDPPVPKCLKVSTSSTTKSPASSASGPRPTYKPPVSNYPGYPKPEEGILDSLDVWVIAVIVIAIVVGVAVICVVPYRYLQRRKKKGKADGGAEYATYQTKSTTPAEQRG

SEQ ID NO: 7102 - protein, 197 aa, Homo sapiens
MAPSVPAAEPEYPKGIRAVLLGPPGAGKGTQVSDEMVVELIEKNLETPLCKNGFLLDGFPRTVRQAEMLDDLMEKRKEKLDSVIEFSIPDSLLIRRITGRLIHPKSGRSYHEEFNPPKEPMKDDITGEPLIRRSDDNEKALKIRLQAYHTQTTPLIEYYRKRGIHSAIDASQTPDVVFASILAAFSKATCKDLVMFI

SEQ ID NO: 7103 - protein, 191 aa, Homo sapiens
MAAPRGRAAPWTTALLLLLASQVLSPGSCADEEEVPEEWVLLHVVQGQIGAGNYSYLRLNHEGKIVLRMRSLKGDADLYVSASSLHPSFDDYELQSATCGPDAVSIPAHFRRPVGIGVYGHPSHLESEFEMKVYYDGTVEQHPFGEAAYPADGADAGQKHAGAPEDASQEEESVLWTILISILKLVLEILF

SEQ ID NO: 7104 - protein, 302 aa, Homo sapiens
MPGVARLPLLLGLLLLPRPGRPLDLADYTYDLAEEDDSEPLNYKDPCKAAAFLGDIALDEEDLRAFQVQQAVDLRRHTARKSSIKAAVPGNTSTPSCQSTNGQPQRGACGRWRGRSRSRRAATSRPERVWPDGVIPFVIGGNFTGSQRAVFRQAMRHWEKHTCVTFLERTDEDSYIVFTYRPCGCCSYVGRRGGGPQAISIGKNCDKFGIVVHELGHVVGFWHEHTRPDRDRHVSIVRENIQPGVLHSSLLLLSCGSRNGASFPCSLESSIHQALCWTGLFLRPSPFPRLPLAAPRTLRAGV

SEQ ID NO: 7105 - protein, 481 aa, Homo sapiens
MTSSPRAPPGEQGRGGAEMIRAAPPPLFLLLLLLLLLVSWASRGEAAPDQDEIQRLPGLAKQPSFRQYSGYLKGSGSKHLHYWFVESQKDPENSPVVLWLNGGPGCSSLDGLLTEHGPFLIANVLYLESPAGVGFSYSDDKFYATNDTEVAQSNFEALQDFFRLFPEYKNNKLFLTGESYAGIYIPTLAVLVMQDPSMNLQGLAVGNGLSSYEQNDNSLVYFAYYHGLLGNRLWSSLQTHCCSQNKCNFYDNKDLECVTNLQEVARIVGNSGLNIYNLYAPCAGGVPSHFRYEKDTVVVQDLGNIFTRLPLKRMWHQALLRSGDKVRMDPPCTNTTAASTYLNNPYVRKALNIPEQLPQWDMCNFLVNLQYRRLYRSMNSQYLKLLSSQKYQILLYNGDVDMACNFMGDEWFVDSLNQKMEVQRRPWLVKYGDSGEQIAGFVKEFSHIAFLTIKGAGHMVPTDKPLAAFTMFSRFLNKQPY

SEQ ID NO: 7106 - protein, 189 aa, Homo sapiens
MEEGGNLGGLIKMVHLLVLSGAWGMQMWVTFVSGFLLFRSLPRHTFGLVQSKLFPFYFHISMGCAFINLCILASQHAWAQLTFWEASQLYLLFLSLTLATVNARWLEPRTTAAMWALQTVEKERGLGGEVPGSHQGPDPYRQLREKDPKYSALRQNFFRYHGLSSLCNLGCVLSNGLCLAGLALEIRSL

SEQ ID NO: 7107 - protein, 1017 aa, Homo sapiens
MDLIRGVLLRLLLLASSLGPGAVSLRAAIRKPGKVGPPLDIKLGALNCTAFSIQWKMPRHPGSPILGYTVFYSEVGADKSLQEQLHSVPLSRDIPTTEEVIGDLKPGTEYRVSIAAYSQAGKGRLSSPRHVTTLSQDSCLPPAAPQQPHVIVVSDSEVALSWKPGASEGSAPIQYYSVEFIRPDFDKKWTSIHERIQMDSMVIKGLDPDTNYQFAVRAMNSHGPSPRSWPSDIIRTLCPEEAGSGRYGPRYITDMGAGEDDEGFEDDLDLDISFEEVKPLPATKGGNKKFLVESKKMSISNPKTISRLIPPTSASLPVTTVAPQPIPIQRKGKNGVAIMSRLFDMPCDETLCSADSFCVNDYTWGGSRCQCTLGKGGESCSEDIVIQYPQFFGHSYVTFEPLKNSYQAFQITLEFRAEAEDGLLLYCGENEHGRGDFMSLAIIRRSLQFRFNCGTGVAIIVSETKIKLGGWHTVMLYRDGLNGLLQLNNGTPVTGQSQGQYSKITFRTPLYLGGAPSAYWLVRATGTNRGFQGCVQSLAVNGRRIDMRPWPLGKALSGADVGECSSGICDEASCIHGGTCTAIKADSYICLCPLGFKGRHCEDAFTLTIPQFRESLRSYAATPWPLEPQHYLSFMEFEITFRPDSGDGVLLYSYDTGSKDFLSINLAGGHVEFRFDCGSGTGVLRSEDPLTLGNWHELRVSRTAKNGILQVDKQKIVEGMAEGGFTQIKCNTDIFIGGVPNYDDVKKNSGVLKPFSGSIQKIILNDRTIHVKHDFTSGVNVENAAHPCVRAPCAHGGSCRPRKEGYDCDCPLGFEGLHCQKECGNYCLNTIIEAIEIPQFIGRSYLTYDNPDILKRVSGSRSNVFMRFKTTAKDGLLLWRGDSPMRPNSDFISLGLRDGALVFSYNLGSGVASIMVNGSFNDGRWHRVKAVRDGQSGKITVDDYGARTGKSPGMMRQLNINGALYVGGMKEIALHTNRQYMRGLVGCISHFTLSTDYHISLVEDAVDGKNINTCGAK

SEQ ID NO: 7108 - protein, 859 aa, Homo sapiens
MLEVLEEIWSVRARRAHRPCPGPSLADDTDANSNGSSGNESNGHESRGASQRSSHSSSSGNGKDSALLETTESSKSTNSQSPSPPSSSIAYSLLSASSEQDNPSTSGCSSEQSARARTQKELMTALRELKLRLPPERRGKGRSGTLATLQYALACVKQVQANQEYYQQWSLEEGEPCSMDMSTYTLEELEHITSEYTLQNQDTFSVAVSFLTGRIVYISEQAAVLLRCKRDVFRGTRFSELLAPQDVGVFYGSTAPSRLPTWGTGASAGSGLRDFTQEKSVFCRIRGGPDRDPGPRYQPFRLTPYVTKIRVSDGAPAQPCCLLIAERIHSGYEAPRIPPDKRIFTTRHTPSCLFQDVDERAAPLLGYLPQDLLGAPVLLFLHPEDRPLMLAIHKKILQLAGQPFDHSPIRFCARNGEYVTMDTSWAGFVHPWSRKVAFVLGRHKVRTAPLNEDVFTPPAPSPAPSLDTDIQELSEQIHRLLLQPVHSPSPTGLCGVGAVTSPGPLHSPGSSSDSNGGDAEGPGPPAPVTFQQICKDVHLVKHQGQQLFIESRARPQSRPRLPATGTFKAKALPCQSPDPELEAGSAPVQAPLALVPEEAERKEASSCSYQQINCLDSILRYLESCNLPSTTKRKCASSSSYTTSSASDDDRQRTGPVSVGTKKDPPSAALSGEGATPRKEPVVGGTLSPLALANKAESVVSVTSQCSFSSTIVHVGDKKPPESDIIMMEDLPGLAPGPAPSPAPSPTVAPDPAPDAYRPVGLTKAVLSLHTQKEEQAFLSRFRDLGRLRGLDSSSTAPSALGERGSHLGPPGACPLPSLGLDCWGVGLKGGVSAPGTQAGVASTTRPCLGTGPSLASPH

SEQ ID NO: 7109 - protein, 647 aa, Homo sapiens
MVMYARKQQRLSDGCHDRRGDSQPYQALKYSSKSHPSSGDHRHEKMRDAGDPSPPNKMLRRSDSPENKYSDSTGHSKAKNVHTHRVRERDGGTSYSPQENSHNHSALHSSNSHSSNPSNNPSKTSDAPYDSADDWSEHISSSGKKYYYNCRTEVSQWEKPKEWLEREQRQKEANKMAVNSFPKDRDYRREVMQATATSGFASGMEDKHSSDASSLLPQNILSQTSRHNDRDYRLPRAETHSSSTPVQHPIKPVVHPTATPSTVPSSPFTLQSDHQPKKSFDANGASTLSKLPTPTSSVPAQKTERKESTSGDKPVSHSCTTPSTSSASGLNPTSAPPTSASAVPVSPVPQSPIPPLLQDPNLLRQLLPALQATLQLNNSNVDISKINEVLTAAVTQASLQSIIHKFLTAGPSAFNITSLISQAAQLSTQAQPSNQSPMSLTSDASSPRSYVSPRISTPQTNTVPIKPLISTPPVSSQPKVSTPVVKQGPVSQSATQQPVTADKQQGHEPVSPRSLQRSSSQRSPSPGPNHTSNSSNASNATVVPQNSSARSTCSLTPALAAHFSENLIKHVQGWPADHAEKQASRLREEAHNMGTIHMSEICTELKNLRSLVRVCEIQATLREQRILFLRQQIKELEKLKNQNSFMV

SEQ ID NO: 7110 - protein, 74 aa, Homo sapiens
MDSEVQRDGRILDLIDDAWREDKLPYEDVAIPLNELPEPEQDNGGTTESVKEQEMKWTDLALQYLHENVPPIGN

SEQ ID NO: 7111 - protein, 142 aa, Homo sapiens
MGKSEKIALPHGQLVHGIHLYEQPKINRQKSKYNLPLTKITSAKRNENNFWQDSVSSDRIQKQEKKPFKNTENIKNSHLKKSAFLTEVSQKENYAGAKFSDPPSPSVLPKPPSHWMGSTVENSNQNRELMAVHLKTLLKVQT

SEQ ID NO: 7112 - protein, 317 aa, Homo sapiens
METNCRKLVSACVQLGVQPAAVECLFSKDSEIKKVEFTDSPESRKEAASSKFFPRQHPGANEKDKSQQGKNEDVGAEDPSKKKRQRRQRTHFTSQQLQELEATFQRNRYPDMSTREEIAVWTNLTEARVRVWFKNRRAKWRKRERNQQAELCKNGFGPQFNGLMQPYDDMYPGYSYNNWAAKGLTSASLSTKSFPFFNSMNVNPLSSQSMFSPPNSISSMSMSSSMVPSAVTGVPGSSLNSLNNLNNLSSPSLNSAVPTPACPYAPPTPPYVYRDTCNSSLASLRLKAKQHSSFGYASVQNPASNLSACQYAVDRPV

SEQ ID NO: 7113 - protein, 392 aa, Homo sapiens
MSAQAQMRAMLDQLMGTSRDGDTTRQRIKFSDDRVCKSHLLNCCPHDVLSGTRMDLGECLKVHDLALRADYEIASKEQDFFFELDAMDHLQSFIADCDRRTEVAKKRLAETQEEISAEVAAKAERVHELNEEIGKLLAKVEQLGAEGNVEESQKVMDEVEKARAKKREAEEVYRNSMPASSFQQQKLRVCEVCSAYLGLHDNDRRLADHFGGKLHLGFIEIREKLEELKRVVAEKQEKRNQERLKRREEREREEREKLRRSRSHSKNPKRSRSREHRRHRSRSMSRERKRRTRSKSREKRHRHRSRSSSRSRSRSHQRSRHSSRDRSRERSKRRSSKERFRDQDLASCDRDRSSRDRSPRDRDRKDKKRSYESANGRSEDRRSSEEREAGEI

SEQ ID NO: 7114 - protein, 498 aa, Homo sapiens
MNGPEDLPKSYDYDLIIIGGGSGGLAAAKEAAQYGKKVMVLDFVTPTPLGTRWGLGGTCVNVGCIPKKLMHQAALLGQALQDSRNYGWKVEETVKHDWDRMIEAVQNHIGSLNWGYRVALREKKVVYENAYGQFIGPHRIKATNNKGKEKIYSAERFLIATGERPRYLGIPGDKEYCISSDDLFSLPYCPGKTLVVGASYVALECAGFLAGIGLDVTVMVRSILLRGFDQDMANKIGEHMEEHGIKFIRQFVPIKVEQIEAGTPGRLRVVAQSTNSEEIIEGEYNTVMLAIGRDACTRKIGLETVGVKINEKTGKIPVTDEEQTNVPYIYAIGDILEDKVELTPVAIQAGRLLAQRLYAGSTVKCDYENVPTTVFTPLEYGACGLSEEKAVEKFGEENIEVYHSYFWPLEWTIPSRDNNKCYAKIICNTKDNERVVGFHVLGPNAGEVTQGFAAALKCGLTKKQLDSTIGIHPVCAEVFTTLSVTKRSGASILQAGCG

SEQ ID NO: 7115 - protein, 421 aa, Homo sapiens
MASSSVPPATVSAATAGPGPGFGFASKTKKKHFVQQKVKVFRAADPLVGVFLWGVAHSINELSQVPPPVMLLPDDFKASSKIKVNNHLFHRENLPSHFKFKEYCPQVFRNLRDRFGIDDQDYLVSLTRNPPSESEGSDGRFLISYDRTLVIKEVSSEDIADMHSNLSNYHQYIVKCHGNTLLPQFLGMYRVSVDNEDSYMLVMRNMFSHRLPVHRKYDLKGSLVSREASDKEKVKELPTLKDMDFLNKNQKVYIGEEEKKIFLEKLKRDVEFLVQLKIMDYSLLLGIHDIIRGSEPEEEAPVREDESEVDGDCSLTGPPALVGSYGTSPEGIGGYIHSHRPLGPGEFESFIDVYAIRSAEGAPQKEVYFMGLIDILTQYDAKKKAAHAAKTVKHGAGAEISTVHPEQYAKRFLDFITNIFA

SEQ ID NO: 7116 - protein, 329 aa, Homo sapiens
MSGVVPTAPEQPAGEMENQTKPPDPRPDAPPEYNSHFLPGPPGTAVPPPTGYPGGLPMGYYSPQQPSTFPLYQPVGGIHPVRYQPGKYPMPNQSVPITWMPGPTPMANCPPGLEYLVQLDNIHVLQHFEPLEMMTCFETNNRYDIKNNSDQMVYIVTEDTDDFTRNAYRTLRPFVLRVTDCMGREIMTMQRPFRCTCCCFCCPSARQELEVQCPPGVTIGFVAEHWNLCRAVYSIQNEKKENVMRVRGPCSTYGCGSDSVFEVKSLDGISNIGSIIRKWNGLLSAMADADHFDIHFPLDLDVKMKAMIFGACFLIDFMYFERSPPQRSR

SEQ ID NO: 7117 - protein, 376 aa, Homo sapiens
MQWTSLLLLAGLFSLSQAQYEDDPHWWFHYLRSQQSTYYDPYDPYPYETYEPYPYGVDEGPAYTYGSPSPPDPRDCPQECDCPPNFPTAMYCDNRNLKYLPFVPSRMKYVYFQNNQITSIQEGVFDNATGLLWIALHGNQITSDKVGRKVFSKLRHLERLYLDHNNLTRMPGPLPRSLRELHLDHNQISRVPNNALEGLENLTALYLQHNEIQEVGSSMRGLRSLILLDLSYNHLRKVPDGLPSALEQLYMEHNNVYTVPDSYFRGAPKLLYVRLSHNSLTNNGLASNTFNSSSLLELDLSYNQLQKIPPVNTNLENLYLQGNRINEFSISSFCTVVDVVNFSKLQVLRLDGNEIKRSAMPADAPLCLRLASLIEI

SEQ ID NO: 7118 - protein, 4525 aa, Homo sapiens
MDPSRAIQNEISSLKDERDRVQKKTFTKWVNKHLIKAQRHISDLYEDLRDGHNLISLLEVLSGDSLPREKGRMRFHKLQNVQIALDYLRHRQVKLVNIRNDDIADGNPKLTLGLIWTIILHFQISDIQVSGQSEDMTAKEKLLLWSQRMVEGYQGLRCDNFTSSWRDGRLFNAIIHRHKPLLIDMNKVYRQTNLENLDQAFSVAERDLGVTRLLDPEDVDVPQPDEKSIITYVSSLYDAMPRVPDVQDGVRANELQLRWQEYRELVLLLLQWMRHHTAAFEERRFPSSFEEIEILWSQFLKFKEMELPAKEADKNRSKGIYQSLEGAVQAGQLKVPPGYHPLDVEKEWGKLHVAILEREKQLRSEFERLECLQRIVTKLQMEAGLCEEQLNQADALLQSDVRLLAAGKVPQRAGEVERDLDKADSMIRLLFNDVQTLKDGRHPQGEQMYRRVYRLHERLVAIRTEYNLRLKAGVAAPATQVAQVTLQSVQRRPELEDSTLRYLQDLLAWVEENQHRVDGAEWGVDLPSVEAQLGSHRGLHQSIEEFRAKIERARSDEGQLSPATRGAYRDCLGRLDLQYAKLLNSSKARLRSLESLHSFVAAATKELMWLNEKEEEEVGFDWSDRNTNMTAKKESYSALMRELELKEKKIKELQNAGDRLLREDHPARPTVESFQAALQTQWSWMLQLCCCIEAHLKENAAYFQFFSDVREAEGQLQKLQEALRRKYSCDRSATVTRLEDLLQDAQDEKEQLNEYKGHLSGLAKRAKAVVQLKPRHPAHPMRGRLPLLAVCDYKQVEVTVHKGDECQLVGPAQPSHWKVLSSSGSEAAVPSVCFLVPPPNQEAQEAVTRLEAQHQALVTLWHQLHVDMKSLLAWQSLRRDVQLIRSWSLATFRTLKPEEQRQALHSLELHYQAFLRDSQDAGGFGPEDRLMAEREYGSCSHHYQQLLQSLEQGAQEESRCQRCISELKDIRLQLEACETRTVHRLRLPLDKEPARECAQRIAEQQKAQAEVEGLGKGVARLSAEAEKVLALPEPSPAAPTLRSELELTLGKLEQVRSLSAIYLEKLKTISLVIRGTQGAEEVLRAHEEQLKEAQAVPATLPELEATKASLKKLRAQAEAQQPTFDALRDELRGAQEVGERLQQRHGERDVEVERWRERVAQLLERWQAVLAQTDVRQRELEQLGRQLRYYRESADPLGAWLQDARRRQEQIQAMPLADSQAVREQLRQEQALLEEIERHGEKVEECQRFAKQYINAIKDYELQLVTYKAQLEPVASPAKKPKVQSGSESVIQEYVDLRTHYSELTTLTSQYIKFISETLRRMEEEERLAEQQRAEERERLAEVEAALEKQRQLAEAHAQAKAQAEREAKELQQRMQEEVVRREEAAVDAQQQKRSIQEELQQLRQSSEAEIQAKARQAEAAERSRLRIEEEIRVVRLQLEATERQRGGAEGELQALRARAEEAEAQKRQAQEEAERLRRQVQDESQRKRQAEVELASRVKAEAEAAREKQRALQALEELRLQAEEAERRLRQAEVERARQVQVALETAQRSAEAELQSKRASFAEKTAQLERSLQEEHVAVAQLREEAERRAQQQAEAERAREEAERELERWQLKANEALRLRLQAEEVAQQKSLAQAEAEKQKEEAEREARRRGKAEEQAVRQRELAEQELEKQRQLAEGTAQQRLAAEQELIRLRAETEQGEQQRQLLEEELARLQREAAAATQKRQELEAELAKVRAEMEVLLASKARAEEESRSTSEKSKQRLEAEAGRFRELAEEAARLRALAEEAKRQRQLAEEDAARQRAEAERVLAEKLAAIGEATRLKTEAEIALKEKEAENERLRRLAEDEAFQRRRLEEQAAQHKADIEERLAQLRKASDSELERQKGLVEDTLRQRRQVEEEILALKASFEKAAAGKAELELELGRIRSNAEDTLRSKEQAELEAARQRQLAAEEERRRREAEERVQKSLAAEEEAARQRKAALEEVERLKAKVEEARRLRERAEQESARQLQLAQEAAQKRLQAEEKAHAFAVQQKEQELQQTLQQEQSVLDQLRGEAEAARRAAEEAEEARVQAEREAAQSRRQVEEAERLKQSAEEQAQARAQAQAAAEKLRKEAEQEAARRAQAEQAALRQKQAADAEMEKHKKFAEQTLRQKAQVEQELTTLRLQLEETDHQKNLLDEELQRLKAEATEAARQRSQVEEELFSVRVQMEELSKLKARIEAENRALILRDKDNTQRFLQEEAEKMKQVAEEAARLSVAAQEAARLRQLAEEDLAQQRALAEKMLKEKMQAVQEATRLKAEAELLQQQKELAQEQARRLQEDKEQMAQQLAEETQGFQRTLEAERQRQLEMSAEAERLKLRVAEMSRAQARAEEDAQRFRKQAEEIGEKLHRTELATQEKVTLVQTLEIQRQQSDHDAERLREAIAELEREKEKLQQEAKLLQLKSEEMQTVQQEQLLQETQALQQSFLSEKDSLLQRERFIEQEKAKLEQLFQDEVAKAQQLREEQQRQQQQMEQERQRLVASMEEARRRQHEAEEGVRRKQEELQQLEQQRRQQEELLAEENQRLREQLQLLEEQHRAALAHSEEVTASQVAATKTLPNGRDALDGPAAEAEPEHSFDGLRRKVSAQRLQEAGILSAEELQRLAQGHTTVDELARREDVRHYLQGRSSIAGLLLKATNEKLSVYAALQRQLLSPGTALILLEAQAASGFLLDPVRNRRLTVNEAVKEGVVGPELHHKLLSAERAVTGYKDPYTGQQISLFQAMQKGLIVREHGIRLLEAQIATGGVIDPVHSHRVPVDVAYRRGYFDEEMNRVLADPSDDTKGFFDPNTHENLTYLQLLERCVEDPETGLCLLPLTDKAAKGGELVYTDSEARDVFEKATVSAPFGKFQGKTVTIWEIINSEYFTAEQRRDLLRQFRTGRITVEKIIKIIITVVEEQEQKGRLCFEGLRSLVPAAELLESRVIDRELYQQLQRGERSVRDVAEVDTVRRALRGANVIAGVWLEEAGQKLSIYNALKKDLLPSDMAVALLEAQAGTGHIIDPATSARLTVDEAVRAGLVGPEFHEKLLSAEKAVTGYRDPYTGQSVSLFQALKKGLIPREQGLRLLDAQLSTGGIVDPSKSHRVPLDVACARGCLDEETSRALSAPRADAKAYSDPSTGEPATYGELQQRCRPDQLTGLSLLPLSEKAARARQEELYSELQARETFEKTPVEVPVGGFKGRTVTVWELISSEYFTAEQRQELLRQFRTGKVTVEKVIKILITIVEEVETLRQERLSFSGLRAPVPASELLASGVLSRAQFEQLKDGKTTVKDLSELGSVRTLLQGSGCLAGIYLEDTKEKVSIYEAMRRGLLRATTAALLLEAQAATGFLVDPVRNQRLYVHEAVKAGVVGPELHEQLLSAEKAVTGYRDPYSGSTISLFQAMQKGLVLRQHGIRLLEAQIATGGIIDPVHSHRVPVDVAYQRGYFSEEMNRVLADPSDDTKGFFDPNTHENLTYRQLLERCVEDPETGLRLLPLKGAEKAEVVETTQVYTEEETRRAFEETQIDIPGGGSHGGSTMSLWEVMQSDLIPEEQRAQLMADFQAGRVTKERMIIIIIEIIEKTEIIRQQGLASYDYVRRRLTAEDLFEARIISLETYNLLREGTRSLREALEAESAWCYLYGTGSVAGVYLPGSRQTLSIYQALKKGLLSAEVARLLLEAQAATGFLLDPVKGERLTVDEAVRKGLVGPELHDRLLSAERAVTGYRDPYTEQTISLFQAMKKELIPTEEALRLLDAQLATGGIVDPRLGFHLPLEVAYQRGYLNKDTHDQLSEPSEVRSYVDPSTDERLSYTQLLRRCRRDDGTGQLLLPLSDARKLTFRGLRKQITMEELVRSQVMDEATALQLREGLTSIEEVTKNLQKFLEGTSCIAGVFVDATKERLSVYQAMKKGIIRPGTAFELLEAQAATGYVIDPIKGLKLTVEEAVRMGIVGPEFKDKLLSAERAVTGYKDPYSGKLISLFQAMKKGLILKDHGIRLLEAQIATGGIIDPEESHRLPVEVAYKRGLFDEEMNEILTDPSDDTKGFFDPNTEENLTYLQLMERCITDPQTGLCLLPLKEKKRERKTSSKSSVRKRRVVIVDPETGKEMSVYEAYRKGLIDHQTYLELSEQECEWEEITISSSDGVVKSMIIDRRSGRQYDIDDAIAKNLIDRSALDQYRAGTLSITEFADMLSGNAGGFRSRSSSVGSSSSYPISPAVSRTQLASWSDPTEETGPVAGILDTETLEKVSITEAMHRNLVDNITGQRLLEAQACTGGIIDPSTGERFPVTDAVNKGLVDKIMVDRINLAQKAFCGFEDPRTKTKMSAAQALKKGWLYYEAGQRFLEVQYLTGGLIEPDTPGRVPLDEALQRGTVDARTAQKLRDVGAYSKYLTCPKTKLKISYKDALDRSMVEEGTGLRLLEAAAQSTKGYYSPYSVSGSGSTAGSRTGSRTGSRAGSRRGSFDATGSGFSMTFSSSSYSSSGYGRRYASGSSASLGGPESAVA

SEQ ID NO: 7119 - protein, 662 aa, Homo sapiens
MKLSPQPSCVNLGMMWTWALWMLPSLCKFSLAALPAKPENISCVYYYRKNLTCTWSPGKETSYTQYTVKRTYAFGEKHDNCTTNSSTSENRASCSFFLPRITIPDNYTIEVEAENGDGVIKSHMTYWRLENIAKTEPPKIFRVKPVLGIKRMIQIEWIKPELAPVSSDLKYTLRFRTVNSTSWMEVNFAKNRKDKNQTYNLTGLQPFTEYVIALRCAVKESKFWSDWSQEKMGMTEEEAPCGLELWRVLKPAEADGRRPVRLLWKKARGAPVLEKTLGYNIWYYPESNTNLTETMNTTNQQLELHLGGESFWVSMISYNSLGKSPVATLRIPAIQEKSFQCIEVMQACVAEDQLVVKWQSSALDVNTWMIEWFPDVDSEPTTLSWESVSQATNWTIQQDKLKPFWCYNISVYPMLHDKVGEPYSIQAYAKEGVPSEGPETKVENIGVKTVTITWKEIPKSERKGIICNYTIFYQAEGGKGFSKTVNSSILQYGLESLKRKTSYIVQVMASTSAGGTNGTSINFKTLSFSVFEIILITSLIGGGLLILIILTVAYGLKKPNKLTHLCWPTVPNPAESSIATWHGDDFKDKLNLKESDDSVNTEDRILKPCSTPSDKLVIDKLVVNFGNVLQEIFTDEARTGQENNLGGEKNGTRILSSCPTSI

SEQ ID NO: 7120 - protein, 288 aa, Homo sapiens
MDLLWILPSLWLLLLGGPACLKTQEHPSCPGPRELEASKVVLLPSCPGAPGSPGEKGAPGPQGPPGPPGKMGPKGEPGPRNCRELLSQGATLSGWYHLCLPEGRALPVFCDMDTEGGGWLVFQRRQDGSVDFFRSWSSYRAGFGNQESEFWLGNENLHQLTLQGNWELRVELEDFNGNRTFAHYATFRLLGEVDHYQLALGKFSEGTAGDSLSLHSGRPFTTYDADHDSSNSNCAVIVHGAWWYASCYRSNLNGRYAVSEAAAHKYGIDWASGRGVGHPYRRVRMMLR

SEQ ID NO: 7121 - protein, 756 aa, Homo sapiens
MLGICRGRRKFLAASLSLLCIPAITWIYLFSGSFEDGKPVSLSPLESQAHSPRYTASSQRERESLEVRMREVEEENRALRRQLSLAQGRAPSHRRGNHSKTYSMEEGTGDSENLRAGIVAGNSSECGQQPVVEKCETIHVAIVCAGYNASRDVVTLVKSVLFHRRNPLHFHLIADSIAEQILATLFQTWMVPAVRVDFYNADELKSEVSWIPNKHYSGIYGLMKLVLTKTLPANLERVIVLDTDITFATDIAELWAVFHKFKGQQVLGLVENQSDWYLGNLWKNHRPWPALGRGYNTGVILLLLDKLRKMKWEQMWRLTAERELMGMLSTSLADQDIFNAVIKQNPFLVYQLPCFWNVQLSDHTRSEQCYRDVSDLKVIHWNSPKKLRVKNKHVEFFRNLYLTFLEYDGNLLRRELFGCPSEADVNSENLQKQLSELDEDDLCYEFRRERFTVHRTHLYFLHYEYEPAADSTDVTLVAQLSMDRLQMLEAICKHWEGPISLALYLSDAEAQQFLRYAQGSEVLMSRHNVGYHIVYKEGQFYPVNLLRNVAMKHISTPYMFLSDIDFLPMYGLYEYLRKSVIQLDLANTKKAMIVPAFETLRYRLSFPKSKAELLSMLDMGTLFTFRYHVWTKGHAPTNFAKWRTATTPYRVEWEADFEPYVVVRRDCPEYDRRFVGFGWNKVAHIMELDVQEYEFIVLPNAYMIHMPHAPSFDITKFRSNKQYRICLKTLKEEFQQDMSRRYGFAALKYLTAENNS

SEQ ID NO: 7122 - protein, 761 aa, Homo sapiens
MALPALGLDPWSLLGLFLFQLLQLLLPTTTAGGGGQGPMPRVRYYAGDERRALSFFHQKGLQDFDTLLLSGDGNTLYVGAREAILALDIQDPGVPRLKNMIPWPASDRKKSECAFKKKSNETQCFNFIRVLVSYNVTHLYTCGTFAFSPACTFIELQDSYLLPISEDKVMEGKGQSPFDPAHKHTAVLVDGMLYSGTMNNFLGSEPILMRTLGSQPVLKTDNFLRWLHHDASFVAAIPSTQVVYFFFEETASEFDFFERLHTSRVARVCKNDVGGEKLLQKKWTTFLKAQLLCTQPGQLPFNVIRHAVLLPADSPTAPHIYAVFTSQWQVGGTRSSAVCAFSLLDIERVFKGKYKELNKETSRWTTYRGPETNPRPGSCSVGPSSDKALTFMKDHFLMDEQVVGTPLLVKSGVEYTRLAVETAQGLDGHSHLVMYLGTTTGSLHKAVVSGDSSAHLVEEIQLFPDPEPVRNLQLAPTQGAVFVGFSGGVWRVPRANCSVYESCVDCVLARDPHCAWDPESRTCCLLSAPNLNSWKQDMERGNPEWACASGPMSRSLRPQSRPQIIKEVLAVPNSILELPCPHLSALASYYWSHGPAAVPEASSTVYNGSLLLIVQDGVGGLYQCWATENGFSYPVISYWVDSQDQTLALDPELAGIPREHVKVPLTRVSGGAALAAQQSYWPHFVTVTVLFALVLSGALIILVASPLRALRARGKVQGCETLRPGEKAPLSREQHLQSPKECRTSASDVDADNNCLGTEVA

SEQ ID NO: 7123 - protein, 452 aa, Homo sapiens
MNRQLVNILTALFAFFLETNHFRTAFCKDHDSRSGKQPSQTLSPSDFLDKLMGRTSGYDARIRPNFKGPPVNVTCNIFINSFGSIAETTMDYRVNIFLRQQWNDSRLAYSEYPDDSLDLDPSMLDSIWKPDLFFANEKGANFHDVTTDNKLLRISKNGKVLYSIRLTLTLSCPMDLKNFPMDVQTCTMQLESFGYTMNDLIFEWLSDGPVQVAEGLTLPQFILKEEKELGYCTKHYNTGKFTCIEVKFHLERQMGYYLIQMYIPSLLIVILSWVSFWINMDAAPARVALGITTVLTMTTQSSGSRASLPKVSYVKAIDIWMAVCLLFVFAALLEYAAVNFVSRQHKEFLRLRRRQKRQNKEEDVTRESRFNFSGYGMGHCLQVKDGTAVKATPANPLPQPPKDGDAIKKKFVDRAKRIDTISRAAFPLAFLIFNIFYWITYKIIRHEDVHKK

SEQ ID NO: 7124 - protein, 596 aa, Homo sapiens
MEPELAAQKQPRPRRRSRRASGLSTEGATGPSADTSGSELDGRCSLRRGSSFTFLTPGPNWDFTLKRKRREKDDDVVSLSSLDLKEPSNKRVRPLARVTSLANLISPVRNGAVRRFGQTIQSFTLRGDHRSPASAQKFSSRSTVPTPAKRRSSALWSEMLDITMKESLTTREIRRQEAIYEMSRGEQDLIEDLKLARKAYHDPMLKLSIMSEEELTHIFGDLDSYIPLHEDLLTRIGEATKPDGTVEQIGHILVSWLPRLNAYRGYCSNQLAAKALLDQKKQDPRVQDFLQRCLESPFSRKLDLWSFLDIPRSRLVKYPLLLKEILKHTPKEHPDVQLLEDAILIIQGVLSDINLKKGESECQYYIDKLEYLDEKQRDPRIEASKVLLCHGELRSKSGHKLYIFLFQDILVLTRPVTRNERHSYQVYRQPIPVQELVLEDLQDGDVRMGGSFRGAFSNSEKAKNIFRIRFHDPSPAQSHTLQANDVFHKQQWFNCIRAAIAPFQSAGSPPELQGLPELHEECEGNHPSARKLTAQRRASTVSSVTQVEVDENAYRCGSGMQMAEDSKSLKTHQTQPGIRRARDKALSGGKRKETLV

SEQ ID NO: 7125 - protein, 103 aa, Homo sapiens [sequence omitted]

SEQ ID NO: 7126 - protein, 3142 aa, Homo sapiens
MATLEKLMKAFESLKSFQQQQQQQQQQQQQQQQQQQQQPPPPPPPPPPPQLPQPPPQAQPLLPQPQPPPPPPPPPPGPAVAEEPLHRPKKELSATKKDRVNHCLTICENIVAQSVRNSPEFQKLLGIAMELFLLCSDDAESDVRMVADECLNKVIKALMDSNLPRLQLELYKEIKKNGAPRSLRAALWRFAELAHLVRPQKCRPYLVNLLPCLTRTSKRPEESVQETLAAAVPKIMASFGNFANDNEIKVLLKAFIANLKSSSPTIRRTAAGSAVSICQHSRRTQYFYSWLLNVLLGLLVPVEDEHSTLLILGVLLTLRYLVPLLQQQVKDTSLKGSFGVTRKEMEVSPSAEQLVQVYELTLHHTQHQDHNVVTGALELLQQLFRTPPPELLQTLTAVGGIGQLTAAKEESGGRSRSGSIVELIAGGGSSCSPVLSRKQKGKVLLGEEEALEDDSESRSDVSSSALTASVKDEISGELAASSGVSTPGSAGHDIITEQPRSQHTLQADSVDLASCDLTSSATDGDEEDILSHSSSQVSAVPSDPAMDLNDGTQASSPISDSSQTTTEGPDSAVTPSDSSEIVLDGTDNQYLGLQIGQPQDEDEEATGILPDEASEAFRNSSMALQQAHLLKNMSHCRQPSDSSVDKFVLRDEATEPGDQENKPCRIKGDIGQSTDDDSAPLVHCVRLLSASFLLTGGKNVLVPDRDVRVSVKALALSCVGAAVALHPESFFSKLYKVPLDTTEYPEEQYVSDILNYIDHGDPQVRGATAILCGTLICSILSRSRFHVGDWMGTIRTLTGNTFSLADCIPLLRKTLKDESSVTCKLACTAVRNCVMSLCSSSYSELGLQLIIDVLTLRNSSYWLVRTELLETLAEIDFRLVSFLEAKAENLHRGAHHYTGLLKLQERVLNNVVIHLLGDEDPRVRHVAAASLIRLVPKLFYKCDQGQADPVVAVARDQSSVYLKLLMHETQPPSHFSVSTITRIYRGYNLLPSITDVTMENNLSRVIAAVSHELITSTTRALTFGCCEALCLLSTAFPVCIWSLGWHCGVPPLSASDESRKSCTVGMATMILTLLSSAWFPLDLSAHQDALILAGNLLAASAPKSLRSSWASEEEANPAATKQEEVWPALGDRALVPMVEQLFSHLLKVINICAHVLDDVAPGPAIKAALPSLTNPPSLSPIRRKGKEKEPGEQASVPLSPKKGSEASAASRQSDTSGPVTTSKSSSLGSFYHLPSYLKLHDVLKATHANYKVTLDLQNSTEKFGGFLRSALDVLSQILELATLQDIGKCVEEILGYLKSCFSREPMMATVCVQQLLKTLFGTNLASQFDGLSSNPSKSQGRAQRLGSSSVRPGLYHYCFMAPYTHFTQALADASLRNMVQAEQENDTSGWFDVLQKVSTQLKTNLTSVTKNRADKNAIHNHIRLFEPLVIKALKQYTTTTCVQLQKQVLDLLAQLVQLRVNYCLLDSDQVFIGFVLKQFEYIEVGQFRESEAIIPNIFFFLVLLSYERYHSKQIIGIPKIIQLCDGIMASGRKAVTHAIPALQPIVHDLFVLRGTNKADAGKELETQKEVVVSMLLRLIQYHQVLEMFILVLQQCHKENEDKWKRLSRQIADIILPMLAKQQMHIDSHEALGVLNTLFEILAPSSLRPVDMLLRSMFVTPNTMASVSTVQLWISGILAILRVLISQSTEDIVLSRIQELSFSPYLISCTVINRLRDGDSTSTLEEHSEGKQIKNLPEETFSRFLLQLVGILLEDIVTKQLKVEMSEQQHTFYCQELGTLLMCLIHIFKSGMFRRITAAATRLFRSDGCGGSFYTLDSLNLRARSMITTHPALVLLWCQILLLVNHTDYRWWAEVQQTPKRHSLSSTKLLSPQMSGEEEDSDLAAKLGMCNREIVRRGALILFCDYVCQNLHDSEHLTWLIVNHIQDLISLSHEPPVQDFISAVHRNSAASGLFIQAIQSRCENLSTPTMLKKTLQCLEGIHLSQSGAVLTLYVDRLLCTPFRVLARMVDILACRRVEMLLAANLQSSMAQLPMEELNRIQEYLQSSGLAQRHQRLYSLLDRFRLSTMQDSLSPSPPVSSHPLDGDGHVSLETVSPDKDWYVHLVKSQCWTRSDSALLEGAELVNRIPAEDMNAFMMNSEFNLSLLAPCLSLGMSEISGGQKSALFEAAREVTLARVSGTVQQLPAVHHVFQPELPAEPAAYWSKLNDLFGDAALYQSLPTLARALAQYLVVVSKLPSHLHLPPEKEKDIVKFVVATLEALSWHLIHEQIPLSLDLQAGLDCCCLALQLPGLWSVVSSTEFVTHACSLIYCVHFILEAVAVQPGEQLLSPERRTNTPKAISEEEEEVDPNTQNPKYITAACEMVAEMVESLQSVLALGHKRNSGVPAFLTPLLRNIIISLARLPLVNSYTRVPPLVWKLGWSPKPGGDFGTAFPEIPVEFLQEKEVFKEFIYRINTLGWTSRTQFEETWATLLGVLVTQPLVMEQEESPPEEDTERTQINVLAVQAITSLVLSAMTVPVAGNPAVSCLEQQPRNKPLKALDTRFGRKLSIIRGIVEQEIQAMVSKRENIATHHLYQAWDPVPSLSPATTGALISHEKLLLQINPERELGSMSYKLGQVSIHSVWLGNSITPLREEEWDEEEEEEADAPAPSSPPTSPVNSRKHRAGVDIHSCSQFLLELYSRWILPSSSARRTPAILISEVVRSLLVVSDLFTERNQFELMYVTLTELRRVHPSEDEILAQYLVPATCKAAAVLGMDKAVAEPVSRLLESTLRSSHLPSRVGALHGVLYVLECDLLDDTAKQLIPVISDYLLSNLKGIAHCVNIHSQQHVLVMCATAFYLIENYPLDVGPEFSASIIQMCGVMLSGSEESTPSIIYHCALRGLERLLLSEQLSRLDAESLVKLSVDRVNVHSPHRAMAALGLMLTCMYTGKEKVSPGRTSDPNPAAPDSESVIVAMERVSVLFDRIRKGFPCEARVVARILPQFLDDFFPPQDIMNKVIGEFLSNQQPYPQFMATVVYKVFQTLHSTGQSSMVRDWVMLSLSNFTQRAPVAMATWSLSCFFVSASTSPWVAAILPHVISRMGKLEQVDVNLFCLVATDFYRHQIEEELDRRAFQSVLEVVAAPGSPYHRLLTCLRNVHKVTTC

SEQ ID NO: 7127 - protein, 237 aa, Homo sapiens
MDNGDWGYMMTDPVTLNVGGHLYTTSLTTLTRYPDSMLGAMFGGDFPTARDPQGNYFIDRDGPLFRYVLNFLRTSELTLPLDFKEFDLLRKEADFYQIEPLIQCLNDPKPLYPMDTFEEVVELSSTRKLSKYSNPVAVIITQLTITTKVHSLLEGISNYFTKWNKHMMDTRDCQVSFTFGPCDYHQEVSLRVHLMEYITKQGFTIRNTRVHHMSERANENTVEHNWTFCRLARKTDD

SEQ ID NO: 7128 - protein, 294 aa, Homo sapiens
MQGPAGNASRGLPGGPPSTVASGAGRCESGALMHSFGIFLQGLLGVVAFSTLMLKRFREPKHERRPWRIWFLDTSKQAIGMLFIHFANVYLADLTEEDPCSLYLINFLLDATVGMLLIYVGVRAVSVLVEWQQWESLRFGEYGDPLQCGAWVGQCALYIVIMIFEKSVVFIVLLILQWKKVALLNPIENPDLKLAIVMLIVPFFVNALMFWVVDNFLMRKGKTKAKLEERGANQDSRNGSKVRYRRAASHEESESEILISADDEMEESDVEEDLRRLTPLKPVKKKKHRFGLPV

SEQ ID NO: 7129 - protein, 621 aa, Homo sapiens
MGLLSDPVRRRALARLVLRLNAPLCVLSYVAGIAWFLALVFPPLTQRTYMSENAMGSTMVEEQFAGGDRARAFARDFAAHRKKSGALPVAWLERTMRSVGLEVYTQSFSRKLPFPDETHERYMVSGTNVYGILRAPRAASTESLVLTVPCGSDSTNSQAVGLLLALAAHFRGQIYWAKDIVFLVTEHDLLGTEAWLEAYHDVNVTGMQSSPLQGRAGAIQAAVALELSSDVVTSLDVAVEGLNGQLPNLDLLNLFQTFCQKGGLLCTLQGKLQPEDWTSLDGPLQGLQTLLLMVLRQASGRPHGSHGLFLRYRVEALTLRGINSFRQYKYDLVAVGKALEGMFRKLNHLLERLHQSFFLYLLPGLSRFVSIGLYMPAVGFLLLVLGLKALELWMQLHEAGMGLEEPGGAPGPSVPLPPSQGVGLASLVAPLLISQAMGLALYVLPVLGQHVATQHFPVAEAEAVVLTLLAIYAAGLALPHNTHRVVSTQAPDRGWMALKLVALIYLALQLGCIALTNFSLGFLLATTMVPTAALAKPHGPRTLYAALLVLTSPAATLLGSLFLWRELQEAPLSLAEGWQLFLAALAQGVLEHHTYGALLFPLLSLGLYPCWLLFWNVLFWK

SEQ ID NO: 7130 - protein, 495 aa, Homo sapiens
MAGKVRSLLPPLLLAAAGLAGLLLLCVPTRDVREPPALKYGIVLDAGSSHTSMFIYKWPADKENDTGIVGQHSSCDVPGGGISSYADNPSGASQSLVGCLEQALQDVPKERHAGTPLYLGATAGMRLLNLTNPEASTSVLMAVTHTLTQYPFDFRGARILSGQEEGVFGWVTANYLLENFIKYGWVGRWFRPRKGTLGAMDLGGASTQITFETTSPAEDRASEVQLHLYGQHYRVYTHSFLCYGRDQVLQRLLASALQTHGFHPCWPRGFSTQVLLGDVYQSPCTMAQRPQNFNSSARVSLSGSSDPHLCRDLVSGLFSFSSCPFSRCSFNGVFQPPVAGNFVAFSAFFYTVDFLRTSMGLPVATLQQLEAAAVNVCNQTWAQLQARVPGQRARLADYCAGAMFVQQLLSRGYGFDERAFGGVIFQKKAADTAVGWALGYMLNLTNLIPADPPGLRKGTDFSSWVVLLLLFASALLAALVLLLRQVHSAKLPSTI

SEQ ID NO: 7131 - protein, 341 aa, Homo sapiens
MTGSNMSDALANAVCQRCQARFSPAERIVNSNGELYHEHCFVCAQCFRPFPEGLFYEFEGRKYCEHDFQMLFAPCCGSCGEFIIGRVIKAMNNNWHPGCFRCELCDVELADLGFVKNAGRHLCRPCHNREKAKGLGKYICQRCHLVIDEQPLMFRSDAYHPDHFNCTHCGKELTAEARELKGELYCLPCHDKMGVPICGACRRPIEGRVVNALGKQWHVEHFVCAKCEKPFLGHRHYEKKGLAYCETHYNQLFGDVCYNCSHVIEGDVVSALNKAWCVSCFSCSTCNSKLTLKNKFVEFDMKPVCKRCYEKFPLELKKRLKKLSELTSRKAQPKATDLNSA

SEQ ID NO: 7132 - protein, 1939 aa, Homo sapiens
MAARLLAPPGPDSFKPFTPESLANIERRIAESKLKKPPKADGSHREDDEDSKPKPNSDLEAGKSLPFIYGDIPQGLVAVPLEDFDPYYLTQKTFVVLNRGKTLFRFSATPALYILSPFNLIRRIAIKILIHSVFSMIIMCTILTNCVFMTFSNPPDWSKNVEYTFTGIYTFESLVKIIARGFCIDGFTFLRDPWNWLDFSVIMMAYITEFVNLGNVSALRTFRVLRALKTISVIPGLKTIVGALIQSVKKLSDVMILTVFCLSVFALIGLQLFMGNLRNKCVVWPINFNESYLENGTKGFDWEEYINNKTNFYTVPGMLEPLLCGNSSDAGQCPEGYQCMKAGRNPNYGYTSFDTFSWAFLALFRLMTQDYWENLYQLTLRAAGKTYMIFFVLVIFVGSFYLVNLILAVVAMAYEEQNQATLEEAEQKEAEFKAMLEQLKKQQEEAQAAAMATSAGTVSEDAIEEEGEEGGGSPRSSSEISKLSSKSAKERRNRRKKRKQKELSEGEEKGDPEKVFKSESEDGMRRKAFRLPDNRIGRKFSIMNQSLLSIPGSPFLSRHNSKSSIFSFRGPGRFRDPGSENEFADDEHSTVEESEGRRDSLFIPIRARERRSSYSGYSGYSQGSRSSRIFPSLRRSVKRNSTVDCNGVVSLIGGPGSHIGGRLLPEATTEVEIKKKGPGSLLVSMDQLASYGRKDRINSIMSVVTNTLVEELEESQRKCPPCWYKFANTFLIWECHPYWIKLKEIVNLIVMDPFVDLAITICIVLNTLFMAMEHHPMTPQFEHVLAVGNLVFTGIFTAEMFLKLIAMDPYYYFQEGWNIFDGFIVSLSLMELSLADVEGLSVLRSFRLLRVFKLAKSWPTLNMLIKIIGNSVGALGNLTLVLAIIVFIFAVVGMQLFGKSYKECVCKINQDCELPRWHMHDFFHSFLIVFRVLCGEWIETMWDCMEVAGQAMCLIVFMMVMVIGNLVVLNLFLALLLSSFSADNLAATDDDGEMNNLQISVIRIKKGVAWTKLKVHAFMQAHFKQREADEVKPLDELYEKKANCIANHTGADIHRNGDFQKNGNGTTSGIGSSVEKYIIDEDHMSFINNPNLTVRVPIAVGESDFENLNTEDVSSESDPEGSKDKLDDTSSSEGSTIDIKPEVEEVPVEQPEEYLDPDACFTEGCVQRFKCCQVNIEEGLGKSWWILRKTCFLIVEHNWFETFIIFMILLSSGALAFEDIYIEQRKTIRTILEYADKVFTYIFILEMLLKWTAYGFVKFFTNAWCWLDFLIVAVVVNALVGAIPSIMNVLLVCLIFWLIFSIMGVNLFAGKYHYCFNETSEIRFEIEDVNNKTECEKLMEGNNTEIRWKNVKINFDNVGAGYLALLQVATFKGWMDIMYAAVDSRKPDEQPKYEDNIYMYIYFVIFIIFGSFFTLNLFIGVIIDNFNQQKKKFGGQDIFMTEEQKKYYNAMKKLGSKKPQKPIPRPLNKIQGIVFDFVTQQAFDIVIMMLICLNMVTMMVETDTQSKQMENILYWINLVFVIFFTCECVLKMFALRHYYFTIGWNIFDFVVVILSIVGMFLADIIEKYFVSPTLFRVIRLARIGRILRLIKGAKGIRTLLFALMMSLPALFNIGLLLFLVMFIFSIFGMSNFAYVKHEAGIDDMFNFETFGNSMICLFQITTSAGWDGLLLPILNRPPDCSLDKEHPGSGFKGDCGNPSVGIFFFVSYIIISFLIVVNMYIAIILENFSVATEESADPLSEDDFETFYEIWEKFDPDATQFIEYCKLADFADALEHPLRVPKPNTIELIAMDLPMVSGDRIHCLDILFAFTKRVLGDSGELDILRQQMEERFVASNPSKVSYEPITTTLRRKQEEVSAVVLQRAYRGHLARRGFICKKTTSNKLENGGTHREKKESTPSTASLPSYDSVTKPEKEKQQRAEEGRRERAKRQKEVRESKC

SEQ ID NO: 7133 - protein, 190 aa, Homo sapiens
MVAWRSAFLVCLAFSLATLVQRGSGDFDDFNLEDAVKETSSVKRNDFDLADALDDRNDRDDGRRKPIAGGGGFSDKDLEDIVGGGEYKPDKGKGDGRYGSNDDPGSGMVAEPGTIAGVASALAMALIGAVSSYISYQQKKFCFSIQQGLNADYVKGENLEAVVCEEPQVKYSTLHTQSAEPPPPPEPARI

SEQ ID NO: 7134 - protein, 123 aa, Homo sapiens
MAALGTVLFTGVRRLHCSVAAWAGGQWRLQQGLAANPSGYGPLTELPDWSYADGRPAPPMKGQLRRKAERETFARRVVLLSQEMDAGLQAWQLRQQKLQEEQRKQENALKPKGASLKSPLPSQ

SEQ ID NO: 7135 - protein, 769 aa, Homo sapiens
MLGLRPPLLALVGLLSLGCVLSQECTKFKVSSCRECIESGPGCTWCQKLNFTGPGDPDSIRCDTRPQLLMRGCAADDIMDPTSLAETQEDHNGGQKQLSPQKVTLYLRPGQAAAFNVTFRRAKGYPIDLYYLMDLSYSMLDDLRNVKKLGGDLLRALNEITESGRIGFGSFVDKTVLPFVNTHPDKLRNPCPNKEKECQPPFAFRHVLKLTNNSNQFQTEVGKQLISGNLDAPEGGLDAMMQVAACPEEIGWRNVTRLLVFATDDGFHFAGDGKLGAILTPNDGRCHLEDNLYKRSNEFDYPSVGQLAHKLAENNIQPIFAVTSRMVKTYEKLTEIIPKSAVGELSEDSSNVVHLIKNAYNKLSSRVFLDHNALPDTLKVTYDSFCSNGVTHRNQPRGDCDGVQINVPITFQVKVTATECIQEQSFVIRALGFTDIVTVQVLPQCECRCRDQSRDRSLCHGKGFLECGICRCDTGYIGKNCECQTQGRSSQELEGSCRKDNNSIICSGLGDCVCGQCLCHTSDVPGKLIYGQYCECDTINCERYNGQVCGGPGRGLCFCGKCRCHPGFEGSACQCERTTEGCLNPRRVECSGRGRCRCNVCECHSGYQLPLCQECPGCPSPCGKYISCAECLKFEKGPFGKNCSAACPGLQLSNNPVKGRTCKERDSEGCWVAYTLEQQDGMDRYLIYVDESRECVAGPNIAAIVGGTVAGIVLIGILLLVIWKALIHLSDLREYRRFEKEKLKSQWNNDNPLFKSATTTVMNPKFAES

SEQ ID NO: 7136 - protein, 803 aa, Homo sapiens
MGCWGQLLVWFGAAGAILCSSPGSQETFLRSSPLPLASPSPRDPKVSAPPSILEPASPLNSPGTEGSWLFSTCGASGRHGPTQTQCDGAYAGTSVVVTVGAAGQLRGVQLWRVPGPGQYLISAYGAAGGKGAKNHLSRAHGVFVSAIFSLGLGESLYILVGQQGEDACPGGSPESQLVCLGESRAVEEHAAMDGSEGVPGSRRWAGGGGGGGGATYVFRVRAGELEPLLVAAGGGGRAYLRPRDRGRTQASPEKLENRSEAPGSGGRGGAAGGDASETDNLWADGEDGVSFIHPSSELFLQPLAVTENHGEVEIRRHLNCSHCPLRDCQWQAELQLAECLCPEGMELAVDNVTCMDLHKPPGPLVLMVAVVATSTLSLLMVCGVLILVKQKKWQGLQEMRLPSPELELSKLRTSAIRTAPNPYYCQVGLGPAQSWPLPPGVTEVSPANVTLLRALGHGAFGEVYEGLVIGLPGDSSPLQVAIKTLPELCSPQDELDFLMEALIISKFRHQNIVRCVGLSLRATPRLILLELMSGGDMKSFLRHSRPHLGQPSPLVMRDLLQLAQDIAQGCHYLEENHFIHRDIAARNCLLSCAGPSRVAKIGDFGMARDIYRASYYRRGDRALLPVKWMPPEAFLEGIFTSKTDSWSFGVLLWEIFSLGYMPYPGRTNQEVLDFVVGGGRMDPPRGCPGPVYRIMTQCWQHEPELRPSFASILERLQYCTQDPDVLNSLLPMELGPTPEEEGTSGLGNRSLECLRPPQPQELSPEKLKSWGGSPLGPWLSSGLKPLKSRGLQPQNLWNPTYRS

SEQ ID NO: 7137 - protein, 666 aa, Homo sapiens
MEQEPQNGEPAEIKIIREAYKKAFLFVNKGLNTDELGQKEEAKNYYKQGIGHLLRGISISSKESEHTGPGWESARQMQQKMKETLQNVRTRLEILEKGLATSLQNDLQEVPKLYPEFPPKDMCEKLPEPQSFSSAPQHAEVNGNTSTPSAGAVAAPASLSLPSQSCPAEAPPAYTPQAAEGHYTVSYGTDSGEFSSVGEEFYRNHSQPPPLETLGLDADELILIPNGVQIFFVNPAGEVSAPSYPGYLRIVRFLDNSLDTVLNRPPGFLQVCDWLYPLVPDRSPVLKCTAGAYMFPDTMLQAAGCFVGVVLSSELPEDDRELFEDLLRQMSDLRLQANWNRAEEENEFQIPGRTRPSSDQLKEASGTDVKQLDQGNKDVRHKGKRGKRAKDTSSEEVNLSHIVPCEPVPEEKPKELPEWSEKVAHNILSGASWVSWGLVKGAEITGKAIQKGASKLRERIQPEEKPVEVSPAVTKGLYIAKQATGGAAKVSQFLVDGVCTVANCVGKELAPHVKKHGSKLVPESLKKDKDGKSPLDGAMVVAASSVQGFSTVWQGLECAAKCIVNNVSAETVQTVRYKYGYNAGEATHHAVDSAVNVGVTAYNINNIGIKAMVKKTATQTGHTLLEDYQIVDNSQRENQEGAANVNVRGEKDEQTKEVKEAKKKDK

SEQ ID NO: 7138 - protein, 354 aa, Homo sapiens
MDFILEDMDLAANEISIYDKLSETVDLVRQTGHQCGMSEKAIEKFIRQLLEKNEPQRPPPQYPLLIVVYKVLATLGLILLTAYFVIQPFSPLAPEPVLSGAHTWRSLIHHIRLMSLPIAKKYMSENKGVPLHGGDEDRPFPDFDPWWTNDCEQNESEPIPANCTGCAQKHLKVMLLEDAPRKFERLHPLVIKTGKPLLEEEIQHFLCQYPEATEGFSEGFFAKWWRCFPERWFPFPYPWRRPLNRSQMLRELFPVFTHLPFPKDASLNKCSFLHPEPVVGSKMHKMPDLFIIGSGEAMLQLIPPFQCRRHCQSVAMPIEPGDIGYVDTTHWKVYVIARGVQPLVICDGTAFSEL

SEQ ID NO: 7139 - protein, 192 aa, Homo sapiens
MSPRRTLPRPLSLCLSLCLCLCLAAALGSAQSGSCRDKKNCKVVFSQQELRKRLTPLQYHVTQEKGTESAFEGEYTHHKDPGIYKCVVCGTPLFKSETKFDSGSGWPSFHDVINSEAITFTDDFSYGMHRVETSCSQCGAHLGHIFDDGPRPTGKRYCINSAALSFTPADSSGTAEGGSGVASPAQADKAEL

SEQ ID NO: 7140 - protein, 1220 aa, Homo sapiens
MKLKEVDRTAMQAWSPAQNHPIYLATGTSAQQLDATFSTNASLEIFELDLSDPSLDMKSCATFSSSHRYHKLIWGPYKMDSKGDVSGVLIAGGENGNIILYDPSKIIAGDKEVVIAQNDKHTGPVRALDVNIFQTNLVASGANESEIYIWDLNNFATPMTPGAKTQPPEDISCIAWNRQVQHILASASPSGRATVWDLRKNEPIIKVSDHSNRMHCSGLAWHPDVATQMVLASEDDRLPVIQMWDLRFASSPLRVLENHARGILAIAWSMADPELLLSCGKDAKILCSNPNTGEVLYELPTNTQWCFDIQWCPRNPAVLSAASFDGRISVYSIMGGSTDGLRQKQVDKLSSSFGNLDPFGTGQPLPPLQIPQQTAQHSIVLPLKKPPKWIRRPVGASFSFGGKLVTFENVRMPSHQGAEQQQQQHHVFISQVVTEKEFLSRSDQLQQAVQSQGFINYCQKKIDASQTEFEKNVWSFLKVNFEDDSRGKYLELLGYRKEDLGKKIALALNKVDGANVALKDSDQVAQSDGEESPAAEEQLLGEHIKEEKEESEFLPSSGGTFNISVSGDIDGLITQALLTGNFESAVDLCLHDNRMADAIILAIAGGQELLARTQKKYFAKSQSKITRLITAVVMKNWKEIVESCDLKNWREALAAVLTYAKPDEFSALCDLLGTRLENEGDSLLQTQACLCYICAGNVEKLVACWTKAQDGSHPLSLQDLIEKVVILRKAVQLTQAMDTSTVGVLLAAKMSQYANLLAAQGSIAAALAFLPDNTNQPNIMQLRDRLCRAQGEPVAGHESPKIPYEKQQLPKGRPGPVAGHHQMPRVQTQQYYPHGENPPPPGFIMHGNVNPNAAGQLPTSPGHMHTQVPPYPQPQPYQPAQPYPFGTGGSAMYRPQQPVAPPTSNAYPNTPYISSASSYTGQSQLYAAQHQASSPTSSPATSFPPPPSSGASFQHGGPGAPPSSSAYALPPGTTGTLPAASELPASQRTGPQNGWNDPPALNRVPKKKKMPENFMPPVPITSPIMNPLGDPQSQMLQQQPSAPVPLSSQSSFPQPHLPGGQPFHGVQQPLGQTGMPPSFSKPNIEGAPGAPIGNTFQHVQSLPTKKITKKPIPDEHLILKTTFEDLIQRCLSSATDPQTKRKLDDASKRLEFLYDKLREQTLSPTITSGLHNIARSIETRNYSEGLTMHTHIVSTSNFSETSAFMPVLKVVLTQANKLGV

SEQ ID NO: 7141 - protein, 204 aa, Homo sapiens
MFVLVEMVDTVRIPPWQFERKLNDSIAEELNKKLANKVVYNVGLCICLFDITKLEDAYVFPGDGASHTKVHFRCVVFHPFLDEILIGKIKGCSPEGVHVSLGFFDDILIPPESLQQPAKFDEAEQVWVWEYETEEGAHDLYMDTGEEIRFRVVDESFVDTSPTGPSSADATTSSEELPKKEAPYTLVGSISEPGLGLLSWWTSN

SEQ ID NO: 7142 - protein, 1506 aa, Homo sapiens
MVHVARLLLLLLTFFLRTDAETPPRFTRTPVDQTGVSGGVASFICQATGDPRPKIVWNKKGKKVSNQRFEVIEFDDGSGSVLRIQPLRTPRDEAIYECVASNNVGEISVSTRLTVLREDQIPRGFPTIDMGPQLKVVERTRTATMLCAASGNPDPEITWFKDFLPVDTSNNNGRIKQLRSESIGGTPIRGALQIEQSEESDQGKYECVATNSAGTRYSAPANLYVRELREVRRVPPRFSIPPTNHEIMPGGSVNITCVAVGSPMPYVKWMLGAEDLTPEDDMPIGRNVLELNDVRQSANYTCVAMSTLGVIEAIAQITVKALPKPPGTPVVTESTATSITLTWDSGNPEPVSYYIIQHKPKNSEELYKEIDGVATTRYSVAGLSPYSDYEFRVVAVNNIGRGPPSEPVLTQTSEQAPSSAPRDVQARMLSSTTILVQWKEPEEPNGQIQGYRVYYTMDPTQHVNNWMKHNVADSQITTIGNLVPQKTYSVKVLAFTSIGDGPLSSDIQVITQTGVPGQPLNFKAEPESETSILLSWTPPRSDTIANYELVYKDGEHGEEQRITIEPGTSYRLQGLKPNSLYYFRLAARSPQGLGASTAEISARTMQSMFAKNFHVKAVMKTSVLLSWEIPENYNSAMPFKILYDDGKMVEEVDGRATQKLIVNLKPEKSYSFVLTNRGNSAGGLQHRVTAKTAPDVLRTKPAFIGKTNLDGMITVQLPEVPANENIKGYYIIIVPLKKSRGKFIKPWESPDEMELDELLKEISRKRRSIRYGREVELKPYIAAHFDVLPTEFTLGDDKHYGGFTNKQLQSGQEYVFFVLAVMEHAESKMYATSPYSDPVVSMDLDPQPITDEEEGLIWVVGPVLAVVFIICIVIAILLYKSSKPDRKRAESDSRKSSIPNNKEIPSHHPTDPVELRRLNFQTPGMASHPPIPILELADHIERLKANDNLKFSQEYESIDPGQQFTWEHSNLEVNKPKNRYANVIAYDHSRVLLSAIEGIPGSDYVNANYIDGYRKQNAYIATQGSLPETFGDFWRMIWEQRSATVVMMTKLEERSRVKCDQYWPSRGTETHGLVQVTLLDTVELATYCVRTFALYKNGSSEKREVRQFQFTAWPDHGVPEHPTPFLAFLRRVKTCNPPDAGPMVVHCSAGVGRTGCFIVIDAMLERIKHEKTVDIYGHVTLMRAQRNYMVQTEDQYIFIHDALLEAVTCGNTEVPARNLYAYIQKLTQIETGENVTGMELEFKRLASSKAHTSRFISANLPCNKFKNRLVNIMPYESTRVCLQPIRGVEGSDYINASFIDGYRQQKAYIATQGPLAETTEDFWRMLWEHNSTIVVMLTKLREMGREKCHQYWPAERSARYQYFVVDPMAEYNMPQYILREFKVTDARDGQSRTVRQFQFTDWPEQGVPKSGEGFIDFIGQVHKTKEQFGQDGPISVHCSAGVGRTGVFITLSIVLERMRYEGVVDIFQTVKMLRTQRPAMVQTEDQYQFSYRAALEYLGSFDHYAT

SEQ ID NO: 7143 - protein, 1233 aa, Homo sapiens
MWLSPEEVLVANALWVTERANPFFVLQRRRGHGRGGGLTGLLVGTLDVVLDSSARVAPYRILHQTQDSQVYWTVACGSSRKEITKHWEWLENNLLQTLSIFDSEEDITTFVKGKIHGIIAEENKNLQPQGDEDPGKFKEAELKMRKQFGMPEGEKLVNYYSCSYWKGRVPRQGWLYLTVNHLCFYSFLLGKEVSLVVQWVDITRLEKNATLLFPESIRVDTRDQELFFSMFLNIGETFKLMEQLANLAMRQLLDSEGFLEDKALPRPIRPHRNISALKRDLDARAKNECYRATFRLPRDERLDGHTSCTLWTPFNKLHIPGQMFISNNYICFASKEEDACHLIIPLREVTIVEKADSSSVLPSPLSISTKSKMTFLFANLKDRDFLVQRISDFLQKTPSKQPGSIGSRKASVVDPSTESSPAPQEGSEQPASPASPLSSRQSFCAQEAPTASQGLLKLFQKNSPMEDLGAKGAKEKMKEESWHIHFFEYGRGVCMYRTAKTRALVLKGIPESLRGELWLLFSGAWNEMVTHPGYYAELVEKSTGKYSLATEEIERDLHRSMPEHPAFQNELGIAALRRVLTAYAFRNPTIGYCQAMNIVTSVLLLYGSEEEAFWLLVALCERMLPDYYNTRVVGALVDQGIFEELTRDFLPQLSEKMQDLGVISSISLSWFLTLFLSVMPFESAVVIVDCFFYEGIKVILQVALAVLDANMEQLLGCSDEGEAMTMLGRYLDNVVNKQSVSPPIPHLRALLSSSDDPPAEVDIFELLKVSYEKFSSLRAEDIEQMRFKQRLKVIQSLEDTAKRSVVRAIPVDIGFSIEELEDLYMVFKAKHLASQYWGCSRTMAGRRDPSLPYLEQYRIDASQFRELFASLTPWACGSHTPLLAGRMFRLLDENKDSLINFKEFVTGMSGMYHGDLTEKLKVLYKLHLPPALSPEEAESALEAAHYFTEDSSSEEALPQEEQEGSGSEERGEEKGTSSPDYRHYLRMWAKEKEAQKETIKDLPKMNQEQFIELCKTLYNMFSEDPMEQDLYHAIATVASLLLRIGEVGKKFSARTGRKPRDCATEEDEPPAPELHQDAARELQPPAAGDPQAKAGGDTHLGKAPQESQVVVEGGSGEGQGSPSQLLSDDETKDDMSMSSYSVVSTGSLQCEDLADDTVLVGGEACSPTARIGGTVDTDWCISFEQILASILTESVLVNFFEKRVDIGLKIKDQKKVERQFSTASDHEQPGVSG

SEQ ID NO: 7144 - protein, 562 aa, Homo sapiens
MATEHVNGNGTEEPMDTTSAVIHSENFQTLLDAGLPQKVAEKLDEIYVAGLVAHSDLDERAIEALKEFNEDGALAVLQQFKDSDLSHVQNKSAFLCGVMKTYRQREKQGTKVADSSKGPDEAKIKALLERTGYTLDVTTGQRKYGGPPPDSVYSGQQPSVGTEIFVGKIPRDLFEDELVPLFEKAGPIWDLRLMMDPLTGLNRGYAFVTFCTKEAAQEAVKLYNNHEIRSGKHIGVCISVANNRLFVGSIPKSKTKEQILEEFSKVTEGLTDVILYHQPDDKKKNRGFCFLEYEDHKTAAQARRRLMSGKVKVWGNVGTVEWADPIEDPDPEVMAKVKVLFVRNLANTVTEEILEKAFSQFGKLERVKKLKDYAFIHFDERDGAVKAMEEMNGKDLEGENIEIVFAKPPDQKRKERKAQRQAAKNQMYDDYYYYGPPHMPPPTRGRGRGGRGGYGYPPDYYGYEDYYDYYGYDYHNYRGGYEDPYYGYEDFQVGARGRGGRGARGAAPSRGRGAAPPRGRAGYSQRGGPGSARGVRGARGGAQQQRGRGQGKGVEAGPDLLQ

SEQ ID NO: 7145 - protein, 817 aa, Homo sapiens
MDVSLCPAKCSFWRIFLLGSVWLDYVGSVLACPANCVCSKTEINCRRPDDGNLFPLLEGQDSGNSNGNASINITDISRNITSIHIENWRSLHTLNAVDMELYTGLQKLTIKNSGLRSIQPRAFAKNPHLRYINLSSNRLTTLSWQLFQTLSLRELQLEQNFFNCSCDIRWMQLWQEQGEAKLNSQNLYCINADGSQLPLFRMNISQCDLPEISVSHVNLTVREGDNAVITCNGSGSPLPDVDWIVTGLQSINTHQTNLNWTNVHAINLTLVNVTSEDNGFTLTCIAENVVGMSNASVALTVYYPPRVVSLEEPELRLEHCIEFVVRGNPPPTLHWLHNGQPLRESKIIHVEYYQEGEISEGCLLFNKPTHYNNGNYTLIAKNPLGTANQTINGHFLKEPFPVDEVSPTPPITVTHKPEEDTFGVSIAVGLAAFACVLLVVLFVMINKYGRRSKFGMKGPVAVISGEEDSASPLHHINHGITTPSSLDAGPDTVVIGMTRIPVIENPQYFRQGHNCHKPDTYVQHIKRRDIVLKRELGEGAFGKVFLAECYNLSPTKDKMLVAVKALKDPTLAARKDFQREAELLTNLQHEHIVKFYGVCGDGDPLIMVFEYMKHGDLNKFLRAHGPDAMILVDGQPRQAKGELGLSQMLHIASQIASGMVYLASQHFVHRDLATRNCLVGANLLVKIGDFGMSRDVYSTDYYRVGGHTMLPIRWMPPESIMYRKFTTESDVWSFGVILWEIFTYGKQPWFQLSNTEVIECITQGRVLERPRVCPKEVYDVMLGCWQREPQQRLNIKEIYKILHALGKATPIYLDILG

SEQ ID NO: 7146 - protein, 418 aa, Homo sapiens
MIHSLFLINCSGDIFLEKHWKSVVSQSVCDYFFEAQEKAADVENVPPVISTPHHYLISIYRDKLFFVSVIQTEVPPLFVIEFLHRVADTFQDYFGECSEAAIKDNVVIVYELLEEMLDNGFPLATESNILKELIKPPTILRSVVNSITGSSNVGDTLPTGQLSNIPWRRAGVKYTNNEAYFDVVEEIDAIIDKSGSTVFAEIQGVIDACIKLSGMPDLSLSFMNPRLLDDVSFHPCIRFKRWESERVLSFIPPDGNFRLISYRVSSQNLVAIPVYVKHSISFKENSSCGRFDITIGPKQNMGKTIEGITVTVHMPKVVLNMNLTPTQGSYTFDPVTKVLTWDVGKITPQKLPSLKGLVNLQSGAPKPEENPSLNIQFKIQQLAISGLKVNRLDMYGEKYKPFKGVKYVTKAGKFQVRT

SEQ ID NO: 7147 - protein, 220 aa, Homo sapiens
MLGIWTLLPLVLTSVARLSSKSVNAQVTDINSKGLELRKTVTTVETQNLEGLHHDGQFCHKPCPPGERKARDCTVNGDEPDCVPCQEGKEYTDKAHFSSKCRRCRLCDEGHGLEVEINCTRTQNTKCRCKPNFFCNSTVCEHCDPCTKCEHGIIKECTLTSNTKCKEEGSRSNLGWLCLLLLPIPLIVWVKRKEVQKTCRKHRKENQGSHESPTLNPMLT

SEQ ID NO: 7148 - protein, 1332 aa, Homo sapiens
MGDPAPARSLDDIDLSALRDPAGIFELVEVVGNGTYGQVYKGRHVKTGQLAAIKVMDVTEDEEEEIKQEINMLKKYSHHRNIATYYGAFIKKSPPGNDDQLWLVMEFCGAGSVTDLVKNTKGNALKEDCIAYICREILRGLAHLHAHKVIHRDIKGQNVLLTENAEVKLVDFGVSAQLDRTVGRRNTFIGTPYWMAPEVIACDENPDATYDYRSDIWSLGITAIEMAEGAPPLCDMHPMRALFLIPRNPPPRLKSKKWSKKFIDFIDTCLIKTYLSRPPTEQLLKFPFIRDQPTERQVRIQLKDHIDRSRKKRGEKEETEYEYSGSEEEDDSHGEEGEPSSIMNVPGESTLRREFLRLQQENKSNSEALKQQQQLQQQQQRDPEAHIKHLLHQRQRRIEEQKEERRRVEEQQRREREQRKLQEKEQQRRLEDMQALRREEERRQAEREQEYKRKQLEEQRQSERLQRQLQQEHAYLKSLQQQQQQQQLQKQQQQQLLPGDRKPLYHYGRGMNPADKPAWAREVEERTRMNKQQNSPLAKSKPGSTGPEPPIPQASPGPPGPLSQTPPMQRPVEPQEGPHKSLVAHRVPLKPYAAPVPRSQSLQDQPTRNLAAFPASHDPDPAIPAPTATPSARGAVIRQNSDPTSEGPGPSPNPPAWVRPDNEAPPKVPQRTSSIATALNTSGAGGSRPAQAVRARPRSNSAWQIYLQRRAERGTPKPPGPPAQPPGPPNASSNPDLRRSDPGWERSDSVLPASHGHLPQAGSLERNRVGVSSKPDSSPVLSPGNKAKPDDHRSRPGRPADFVLLKERTLDEAPRPPKKAMDYSSSSEEVESSEDDEEEGEGGPAEGSRDTPGGRSDGDTDSVSTMVVHDVEEITGTQPPYGGGTMVVQRTPEEERNLLHADSNGYTNLPDVVQPSHSPTENSKGQSPPSKDGSGDYQSRGLVKAPGKSSFTMFVDLGIYQPGGSGDSIPITALVGGEGTRLDQLQYDVRKGSVVNVNPTNTRAHSETPEIRKYKKRFNSEILCAALWGVNLLVGTENGLMLLDRSGQGKVYGLIGRRRFQQMDVLEGLNLLITISGKRNKLRVYYLSWLRNKILHNDPEVEKKQGWTTVGDMEGCGHYRVVKYERIKFLVIALKSSVEVYAWAPKPYHKFMAFKSFADLPHRPLLVDLTVEEGQRLKVIYGSSAGFHAVDVDSGNSYDIYIPVHIQSQITPHAIIFLPNTDGMEMLLCYEDEGVYVNTYGRIIKDVVLQWGEMPTSVAYICSNQIMGWGEKAIEIRSVETGHLDGVFMHKRAQRLKFLCERNDKVFFASVRSGGSSQVYFMTLNRNCIMNW

SEQ ID NO: 7149 - protein, 514 aa, Homo sapiens
MSWPRRLLLRYLFPALLLHGLGEGSALLHPDSRSHPRSLEKSAWRAFKESQCHHMLKHLHNGARITVQMPPTIEGHWVSTGCEVRSGPEFITRSYRFYHNNTFKAYQFYYGSNRCTNPTYTLIIRGKIRLRQASWIIRGGTEADYQLHNVQVICHTEAVAEKLGQQVNRTCPGFLADGGPWVQDVAYDLWREENGCECTKAVNFAMHELQLIRVEKQYLHHNLDHLVEELFLGDIHTDATQRMFYRPSSYQPPLQNAKNHDHACIACRIIYRSDEHHPPILPPKADLTIGLHGEWVSQRCEVRPEVLFLTRHFIFHDNNNTWEGHYYHYSDPVCKHPTFSIYARGRYSRGVLSSRVMGGTEFVFKVNHMKVTPMDAATASLLNVFNGNECGAEGSWQVGIQQDVTHTNGCVALGIKLPHTEYEIFKMEQDARGRYLLFNGQRPSDGSSPDRPEKRATSYQMPLVQCASSSPRAEDLAEDSGSSLYGRAPGRHTWSLLLAALACLVPLLHWNIRR

SEQ ID NO: 7150 - protein, 908 aa, Homo sapiens
MVGLLLFFFPAIFLEVSLLPRSPGRKVLLAGASSQRSVARMDGDVIIGALFSVHHQPPAEKVPERKCGEIREQYGIQRVEAMFHTLDKINADPVLLPNITLGSEIRDSCWHSSVALEQSIEFIRDSLISIRDEKDGINRCLPDGQSLPPGRTKKPIAGVIGPGSSSVAIQVQNLLQLFDIPQIAYSATSIDLSDKTLYKYFLRVVPSDTLQARAMLDIVKRYNWTYVSAVHTEGNYGESGMDAFKELAAQEGLCIAHSDKIYSNAGEKSFDRLLRKLRERLPKARVVVCFCEGMTVRGLLSAMRRLGVVGEFSLIGSDGWADRDEVIEGYEVEANGGITIKLQSPEVRSFDDYFLKLRLDTNTRNPWFPEFWQHRFQCRLPGHLLENPNFKRICTGNESLEENYVQDSKMGFVINAIYAMAHGLQNMHHALCPGHVGLCDAMKPIDGSKLLDFLIKSSFIGVSGEEVWFDEKGDAPGRYDIMNLQYTEANRYDYVHVGTWHEGVLNIDDYKIQMNKSGVVRSVCSEPCLKGQIKVIRKGEVSCCWICTACKENEYVQDEFTCKACDLGWWPNADLTGCEPIPVRYLEWSNIESIIAIAFSCLGILVTLFVTLIFVLYRDTPVVKSSSRELCYIILAGIFLGYVCPFTLIAKPTTTSCYLQRLLVGLSSAMCYSALVTKTNRIARILAGSKKKICTRKPRFMSAWAQVIIASILISVQLTLVVTLIIMEPPMPILSYPSIKEVYLICNTSNLGVVAPLGYNGLLIMSCTYYAFKTRNVPANFNEAKYIAFTMYTTCIIWLAFVPIYFGSNYKIITTCFAVSLSVTVALGCMFTPKMYIIIAKPERNVRSAFTTSDVVRMHVGDGKLPCRSNTFLNIFRRKKAGAGNAKWRTGAQGTAYVAPPLCAREDQ

SEQ ID NO: 7151 - protein, 1098 aa, Homo sapiens
MLEGDLVSKMLRAVLQSHKNGVALPRLQGEYRSLTGDWIPFKQLGFPTLEAYLRSVPAVVRIETSRSGEITCYAMACTETARIAQLVARQRSSKRKTGRQVNCQMRVKKTMPFFLEGKPKATLRQPGFASNFSVGKKPNPAPLRDKGNSVGVKPDAEMSPYMLHTTLGNEAFKDIPVQRHVTMSTNNRFSPKASLQPPLQMHLSRTSTKEMSDNLNQTVEKPNVKPPASYTYKMDEVQNRIKEILNKHNNGIWISKLPHFYKELYKEDLNQGILQQFEHWPHICTVEKPCSGGQDLLLYPAKRKQLLRSELDTEKVPLSPLPGPKQTPPLKGCPTVMAGDFKEKVADLLVKYTSGLWASALPKAFEEMYKVKFPEDALKNLASLSDVCSIDYISGNPQKAILYAKLPLPTDKIQKDAGQAHGDNDIKAMVEQEYLQVEESIAESANTFMEDITVPPLMIPTEASPSVLVVELSNTNEVVIRYVGKDYSAAQELMEDEMKEYYSKNPKITPVQAVNVGQLLAVNAEEDAWLRAQVISTEENKIKVCYVDYGFSENVEKSKAYKLNPKFCSLSFQATKCKLAGLEVLSDDPDLVKVVESLTCGKIFAVEILDKADIPLVVLYDTSGEDDININATCLKAICDKSLEVHLQVDAMYTNVKVTNICSDGTLYCQVPCKGLNKLSDLLRKIEDYFHCKHMTSECFVSLPFCGKICLFHCKGKWLRVEITNVHSSRALDVQFLDSGTVTSVKVSELREIPPRFLQEMIAIPPQAIKCCLADLPQSIGMWTPDAVLWLRDSVLNCSDCSIKVTKVDETRGIAHVYLFTPKNFPDPHRSINRQITNADLWKHQKDVFLSAISSGADSPNSKNGNMPMSGNTGENFRKNLTDVIKKSMVDHTSAFSTEELPPPVHLSKPGEHMDVYVPVACHPGYFVIQPWQEIHKLEVLMEEMILYYSVSEERHIAVEKDQVYAAKVENKWHRVLLKGILTNGLVSVYELDYGKHELVNIRKVQPLVDMFRKLPFQAVTAQLAGVKCNQWSEEASMVFRNHVEKKPLVALVQTVIENANPWDRKVVVYLVDTSLPDTDTWIHDFMSEYLIELSKVN

SEQ ID NO: 7152 - protein, 453 aa, Homo sapiens
MAARCSTRWLLVVVGTPRLPAISGRGARPPREGVVGAWLSRKLSVPAFASSLTSCGPRALLTLRPGVSLTGTKHNPFICTASFHTSAPLAKEDYYQILGVPRNASQKEIKKAYYQLAKKYHPDTNKDDPKAKEKFSQLAEAYEVLSDEVKRKQYDAYGSAGFDPGASGSQHSYWKGGPTVDPEELFRKIFGEFSSSSFGDFQTVFDQPQEYFMELTFNQAAKGVNKEFTVNIMDTCERCNGKGNEPGTKVQHCHYCGGSGMETINTGPFVMRSTCRRCGGRGSIIISPCVVCRGAGQAKQKKRVMIPVPAGVEDGQTVRMPVGKREIFITFRVQKSPVFRRDGADIHSDLFISIAQALLGGTARAQGLYETINVTIPPGTQTDQKIRMGGKGIPRINSYGYGDHYIHIKIRVPKRLTSRQQSLILSYAEDETDVEGTVNGVTLTSSGKRSTGN

SEQ ID NO: 7153 - protein, 348 aa, Homo sapiens
MPHIDNDVKLDFKDVLLRPKRSTLKSRSEVDLTRSFSFRNSKQTYSGVPIIAANMDTVGTFEMAKVLCKFSLFTAVHKHYSLVQWQEFAGQNPDCLEHLAASSGTGSSDFEQLEQILEAIPQVKYICLDVANGYSEHFVEFVKDVRKRFPQHTIMAGNVVTGEMVEELILSGADIIKVGIGPGSVCTTRKKTGVGYPQLSAVMECADAAHGLKGHIISDGGCSCPGDVAKAFGAGADFVMLGGMLAGHSESGGELIERDGKKYKLFYGMSSEMAMKKYAGGVAEYRASEGKTVEVPFKGDVEHTIRDILGGIRSTCTYVGAAKLKELSRRTTFIRVTQQVNPIFSEAC

SEQ ID NO: 7154 - protein, 620 aa, Homo sapiens
MQVSKRMLAGGVRSMPSPLLACWQPILLLVLGSVLSGSATGCPPRCECSAQDRAVLCHRKRFVAVPEGIPTETRLLDLGKNRIKTLNQDEFASFPHLEELELNENIVSAVEPGAFNNLFNLRTLGLRSNRLKLIPLGVFTGLSNLTKLDISENKIVILLDYMFQDLYNLKSLEVGDNDLVYISHRAFSGLNSLEQLTLEKCNLTSIPTEALSHLHGLIVLRLRHLNINAIRDYSFKRLYRLKVLEISHWPYLDTMTPNCLYGLNLTSLSITHCNLTAVPYLAVRHLVYLRFLNLSYNPISTIEGSMLHELLRLQEIQLVGGQLAVVEPYAFRGLNYLRVLNVSGNQLTTLEESVFHSVGNLETLILDSNPLACDCRLLWVFRRRWRLNFNRQQPTCATPEFVQGKEFKDFPDVLLPNYFTCRRARIRDRKAQQVFVDEGHTVQFVCRADGDPPPAILWLSPRKHLVSAKSNGRLTVFPDGTLEVRYAQVQDNGTYLCIAANAGGNDSMPAHLHVRSYSPDWPHQPNKTFAFISNQPGEGEANSTRATVPFPFDIKTLIIATTMGFISFLGVVLFCLVLLFLWSRGKGNTKHNIEIEYVPRKSDAGISSADAPRKFNMKMI

SEQ ID NO: 7155 - protein, 986 aa, Homo sapiens
MRVNEKYSTLPAEDRSVHIINICAIEDIGYLPSEGTLLNSLSVDPDAECKYGLYFRDGRRKVDYILVYHHKRPSGNRTLVRRVQHSDTPSGARSVKQDHPLPGKGASLDAGSGEPPMDYHEDDKRFRREEYEGNLLEAGLELERDEDTKIHGVGFVKIHAPWNVLCREAEFLKLKMPTKKMYHINETRGLLKKINSVLQKITDPIQPKVAEHRPQTMKRLSYPFSREKQHLFDLSDKDSFFDSKTRSTIVYEILKRTTCTKAKYSMGITSLLANGVYAAAYPLHDGDYNGENVEFNDRKLLYEEWARYGVFYKYQPIDLVRKYFGEKIGLYFAWLGVYTQMLIPASIVGIIVFLYGCATMDENIPSMEMCDQRHNITMCPLCDKTCSYWKMSSACATARASHLFDNPATVFFSVFMALWAATFMEHWKRKQMRLNYRWDLTGFEEEEEAVKDHPRAEYEARVLEKSLKKESRNKEKRRHIPEESTNKWKQRVKTAMAGVKLTDKVKLTWRDRFPAYLTNLVSIIFMIAVTFAIVLGVIIYRISMAAALAMNSSPSVRSNIRVTVTATAVIINLVVIILLDEVYGCIARWLTKIEVPKTEKSFEERLIFKAFLLKFVNSYTPIFYVAFFKGRFVGRPGDYVYIFRSFRMEECAPGGCLMELCIQLSIIMLGKQLIQNNLFEIGIPKMKKLIRYLKLKQQSPPDHEECVKRKQRYEVDYNLEPFAGLTPEYMEMIIQFGFVTLFVASFPLAPLFALLNNIIEIRLDAKKFVTELRRPVAVRAKDIGIWYNILRGIGKLAVIINAFVISFTSDFIPRLVYLYMYSKNGTMHGFVNHTLSSFNVSDFQNGTAPNDPLDLGYEVQICRYKDYREPPWSENKYDISKDFWAVLAARLAFVIVFQNLVMFMSDFVDWVIPDIPKDISQQIHKEKVLMVELFMREEQDKQQLLETWMEKERQKDEPPCNHHNTKACPDSLGSPAPSHAYHGGVL

SEQ ID NO: 7156 - protein, 596 aa, Homo sapiens
MFGIQENIPRGGTTMKEEPLGSGMNPVRSWMHTAGVVDANTAAQSGVGLARAHFEKQPPSNLRKSNFFHFVLALYDRQGQPVEIERTAFVDFVEKEKEPNNEKTNNGIHYKLQLLYSNGVRTEQDLYVRLIDSMTKQAIVYEGQDKNPEMCRVLLTHEIMCSRCCDKKSCGNRNETPSDPVIIDRFFLKFFLKCNQNCLKNAGNPRDMRRFQVVVSTTVNVDGHVLAVSDNMFVHNNSKHGRRARRLDPSEGTAPSYLENATPCIKAISPSEGWTTGGATVIIIGDNFFDGLQVVFGTMLVWSELITPHAIRVQTPPRHIPGVVEVTLSYKSKQFCKGAPGRFVYTALNEPTIDYGFQRLQKVIPRHPGDPERLPKEVLLKRAADLVEALYGMPHNNQEIILKRAADIAEALYSVPRNHNQIPTLGNNPAHTGMMGVNSFSSQLAVNVSETSQANDQVGYSRNTSSVSPRGYVPSSTPQQSNYNTVSTSMNGYGSGAMASLGVPGSPGFLNGSSANSPYGIVPSSPTMAASSVTLPSNCSSTHGIFSFSPANVISAVKQKSAFAPVVRPQASPPPSCTSANGNGLQAMSGLVVPPM

SEQ ID NO: 7157 - protein, 759 aa, Homo sapiens
MSKRLRSSEVCADCSGPDPSWASVNRGTFLCDECCSVHRSLGRHISQVRHLKHTPWPPTLLQMVETLYNNGANSIWEHSLLDPASIMSGRRKANPQDKVHPNKAEFIRAKYQMLAFVHRLPCRDDDSVTAKDLSKQLHSSVRTGNLETCLRLLSLGAQANFFHPEKGNTPLHVASKAGQILQAELLAVYGADPGTQDSSGKTPVDYARQGGHHELAERLVEIQYELTDRLAFYLCGRKPDHKNGQHFIIPQMADSSLDLSELAKAAKKKLQSLSNHLFEELAMDVYDEVDRRETDAVWLATQNHSALVTETTVVPFLPVNPEYSSTRNQGRQKLARFNAHEFATLVIDILSDAKRRQQGSSLSGSKDNVELILKTINNQHSVESQDNDQPDYDSVASDEDTDLETTASKTNRQKSLDSDLSDGPVTVQEFMEVKNALVASEAKIQQLMKVNNNLSDELRIMQKKLQTLQSENSNLRKQATTNVYQVQTGSEYTDTSNHSSLKRRPSARGSRPMSMYETGSGQKPYLPMGEASRPEESRMRLQPFPAHIGRSALVTSSSSLPSFPSTLSWSRDESARRASRLEKQNSTPESDYDNTPNDMEPDGMGSSRKGRQRSMVWPGDGLVPDTAEPHVAPSPTLPSTEDVIRKTEQITKNIQELLRAAQENKHDSYIPCSERIHVAVTEMAALFPKKPKSDMVRTSLRLLTSSAYRLQSECKKTLPGDPGSPTDVQLVTQQVIQCAYDIAKAAKQLVTITTKENNN

SEQ ID NO: 7158 - protein, 1018 aa, Homo sapiens
MVSHFMGSLSVLCFLLLLGFQFVCPQPSTQHRKVPQRMAAEGAPEDDGGGGAPGVWGAWGPWSACSRSCSGGVMEQTRPCLPRSYRLRGGQRPGAPARAFADHVVSAVRTSVPLHRSRDETPALAGTDASRQGPTVLRGSRHPQPQGLEVTGDRRSRTRGTIGPGKYGYGKAPYILPLQTDTAHTPQRLRRQKLSSRHSRSQGASSARHGYSSPAHQVPQHGPLYQSDSGPRSGLQAAEAPIYQLPLTHDQGYPAASSLFHSPETSNNHGVGTHGATQSFSQPARSTAISCIGAYRQYKLCNTNVCPESSRSIREVQCASYNNKPFMGRFYEWEPFAEVKGNRKCELNCQAMGYRFYVRQAEKVIDGTPCDQNGTAICVSGQCKSIGCDDYLGSDKVVDKCGVCGGDNTGCQVVSGVFKHALTSLGYHRVVEIPEGATKINITEMYKSNNYLALRSRSGRSIINGNWAIDRPGKYEGGGTMFTYKRPNEISSTAGESFLAEGPTNEILDVYMIHQQPNPGVHYEYVIMGTNAISPQVPPHRRPGEPFNGQMVTEGRSQEEGEQKGRNEEKEDLRGEAPEMFTSESAQTFPVRHPDRFSPHRPDNLVPPAPQPPRRSRDHNWKQLGTTECSTTCGKGSQYPIFRCVHRSTHEEAPESYCDSSMKPTPEEEPCNIFPCPAFWDIGEWSECSKTCGLGMQHRQVLCRQVYANRSLTVQPYRCQHLEKPETTSTCQLKICSEWQIRTDWTSCSVPCGVGQRTRDVKCVSNIGDVVDDEECNMKLRPNDIENCDMGPCAKSWFLTEWSERCSAECGAGVRTRSVVCMTNHVSSLPLEGCGNNRPAEATPCDNGPCTGKVEWFAGSWSQCSIECGSGTQQREVICVRKNADTFEVLDPSECSFLEKPPSQQSCHLKPCGAKWFSTEWSMCSKSCQGGFRVREVRCLSDDMTLSNLCDPQLKPEERESCNPQDCVPEVDENCKDKYYNCNVVVQARLCVYNYYKTACCASCTRVANRQTGFLGSR

SEQ ID NO: 7159 - protein, 471 aa, Homo sapiens
MPNSEPASLLELFNSIATQGELVRSLKAGNASKDEIDSAVKMLVSLKMSYKAAAGEDYKADCPPGNPAPTSNHGPDATEAEEDFVDPWTVQTSSAKGIDYDKLIVRFGSSKIDKELINRIERATGQRPHHFLRRGIFFSHRDMNQVLDAYENKKPFYLYTGRGPSSEAMHVGHLIPFIFTKWLQDVFNVPLVIQMTDDEKYLWKDLTLDQAYSYAVENAKDIIACGFDINKTFIFSDLDYMGMSSGFYKNVVKIQKHVTFNQVKGIFGFTDSDCIGKISFPAIQAAPSFSNSFPQIFRDRTDIQCLIPCAIDQDPYFRMTRDVAPRIGYPKPALLHSTFFPALQGAQTKMSASDPNSSIFLTDTAKQIKTKVNKHAFSGGRDTIEEHRQFGGNCDVDVSFMYLTFFLEDDDKLEQIRKDYTSGAMLTGELKKALIEVLQPLIAEHQARRKEVTDEIVKEFMTPRKLSFDFQ

SEQ ID NO: 7160 - protein, 200 aa, Homo sapiens
MFRKGKKRHSSSSSQSSEISTKSKSVDSSLGGLSRSSTVASLDTDSTKSSGQSNNNSDTCAEFRIKYVGAIEKLKLSEGKGLEGPLDLINYIDVAQQDGKLPFVPPEEEFIMGVSKYGIKVSTSDQYDVLHRHALYLIIRMVCYDDGLGAGKSLLALKTTDASNEEYSLWVYQCNSLEQAQAICKVLSTAFDSVLTSEKP

SEQ ID NO: 7161 - protein, 305 aa, Homo sapiens
MWPLVAALLLGSACCGSAQLLFNKTKSVEFTFCNDTVVIPCFVTNMEAQNTTEVYVKWKFKGRDIYTFDGALNKSTVPTDFSSAKIEVSQLLKGDASLKMDKSDAVSHTGNYTCEVTELTREGETIIELKYRVVSWFSPNENILIVIFPIFAILLFWGQFGIKTLKYRSGGMDEKTIALLVAGLVITVIVIVGAILFVPGEYSLKNATGLGLIVTSTGILILLHYYVFSTAIGLTSFVIAILVIQVIAYILAVVGLSLCIAACIPMHGPLLISGLSILALAQLLGLVYMKFVASNQKTIQPPRNN

SEQ ID NO: 7162 - protein, 512 aa, Homo sapiens
MAEPSVESSSPGGSATSDDHEFDPSADMLVHDFDDERTLEEEEMMEGETNFSSEIEDLAREGDMPIHELLSLYGYGSTVRLPEEDEEEEEEEEEGEDDEDADNDDNSGCSGENKEENIKDSSGQEDETQSSNDDPSQSVASQDAQEIIRPRRCKYFDTNSEVEEESEEDEDYIPSEDWKKEIMVGSMFQAEIPVGICRYKENEKVYENDDQLLWDPEYLPEDKVIIFLKDASRRTGDEKGVEAIPEGSHIKDNEQALYELVKCNFDTEEALRRLRFNVKAAREELSVWTEEECRNFEQGLKAYGKDFHLIQANKVRTRSVGECVAFYYMWKKSERYDFFAQQTRFGKKKYNLHPGVTDYMDRLLDESESAASSRAPSPPPTASNSSNSQSEKEDGTVSTANQNGVSSNGPGEILNKEEVKVEGLHINGPTGGNKKPLHADMDTNGYETDNLTTDPKLAHMTARNENDFDEKSERPAKRRRVNSNGKESPGSSEFFQEAVSHGKFEELENTDD

SEQ ID NO: 7163 - protein, 631 aa, Homo sapiens
MNSSDEEKQLQLITSLKEQAIGEYEDLRAENQKTKEKCDKIRQERDEAVKKLEEFQKISHMVIEEVNFMQNHLEIEKTCRESAEALATKLNKENKTLKRISMLYMAKLGPDVITEEINIDDEDSTTDTDGAAETCVSVQCQKQIKELRDQIVSVQEEKKILAIELENLKSKLVEVIEEVNKVKQEKTVLNSEVLEQRKVLEKCNRVSMLAVEEYEEMQVNLELEKDLRKKAESFAQEMFIEQNKLKRQSHLLLQSSIPDQQLLKALDENAKLTQQLEEERIQHQQKVKELEEQLENETLHKEIHNLKQQLELLEEDKKELELKYQNSEEKARNLKHSVDELQKRVNQSENSVPPPPPPPPPLPPPPPNPIRSLMSMIRKRSHPSGSGAKKEKATQPETTEEVTDLKRQAVEEMMDRIKKGVHLRPVNQTARPKTKPESSKGCESAVDELKGILGTLNKSTSSRSLKSLDPENSETELERILRRRKVTAEADSSSPTGILATSESKSMPVLGSVSSVTKTALNKKTLEAEFNSPSPPTPEPGEGPRKLEGCTSSKVTFQPPSSIGCRKKYIDGEKQAEPVVVLDPVSTHEPQTKDQVAEKDPTQHKEDEGEIQPENKEDSIENVRETDSSNC

SEQ ID NO: 7164 - protein, 321 aa, Homo sapiens
MAQSRDGGNPFAEPSELDNPFQPPPAYEPPAPAPLPPPSAPSLQPSRKLSPTEPKNYGSYSTQASAAAATAELLKKQEELNRKAEELDRRERELQHAALGGTATRQNNWPPLPSFCPVQPCFFQDISMEIPQEFQKTVSTMYYLWMCSTLALLLNFLACLASFCVETNNGAGFGLSILWVLLFTPCSFVCWYRPMYKAFRSDSSFNFFVFFFIFFVQDVLFVLQAIGIPGWGFSGWISALVVPKGNTAVSVLMLLVALLFTGIAVLGIVMLKRIHSLYRRTGASFQKAQQEFAAGVFSNPAVRTAAANAAAGAAENAFRAP

SEQ ID NO: 7165 - protein, 1114 aa, Homo sapiens
MLRGTMTAWRGMRPEVTLACLLLATAGCFADLNEVPQVTVQPASTVQKPGGTVILGCVVEPPRMNVTWRLNGKELNGSDDALGVLITHGTLVITALNNHTVGRYQCVARMPAGAVASVPATVTLANLQDFKLDVQHVIEVDEGNTAVIACHLPESHPKAQVRYSVKQEWLEASRGNYLIMPSGNLQIVNASQEDEGMYKCAAYNPVTQEVKTSGSSDRLRVRRSTAEAARIIYPPEAQTIIVTKGQSLILECVASGIPPPRVTWAKDGSSVTGYNKTRFLLSNLLIDTTSEEDSGTYRCMADNGVGQPGAAVILYNVQVFEPPEVTMELSQLVIPWGQSAKLTCEVRGNPPPSVLWLRNAVPLISSQRLRLSRRALRVLSMGPEDEGVYQCMAENEVGSAHAVVQLRTSRPSITPRLWQDAELATGTPPVSPSKLGNPEQMLRGQPALPRPPTSVGPASPQCPGEKGQGAPAEAPIILSSPRTSKTDSYELVWRPRHEGSGRAPILYYVVKHRKVTNSSDDWTISGIPANQHRLTLTRLDPGSLYEVEMAAYNCAGEGQTAMVTFRTGRRPKPEIMASKEQQIQRDDPGASPQSSSQPDHGRLSPPEAPDRPTISTASETSVYVTWIPRGNGGFPIQSFRVEYKKLKKVGDWILATSAIPPSRLSVEITGLEKGTSYKFRVRALNMLGESEPSAPSRPYVVSGYSGRVYERPVAGPYITFTDAVNETTIMLKWMYIPASNNNTPIHGFYIYYRPTDSDNDSDYKKDMVEGDKYWHSISHLQPETSYDIKMQCFNEGGESEFSNVMICETKARKSSGQPGRLPPPTLAPPQPPLPETIERPVGTGAMVARSSDLPYLIVGVVLGSIVLIIVTFIPFCLWRAWSKQKHTTDLGFPRSALPPSCPYTMVPLGGLPGHQASGQPYLSGISGRACANGIHMNRGCPSAAVGYPGMKPQQHCPGELQQQSDTSSLLRQTHLGNGYDPQSHQITRGPKSSPDEGSFLYTLPDDSTHQLLQPHHDCCQRQEQPAAVGQSGVRRAPDSPVLEAVWDPPFHSGPPCCLGLVPVEEVDSPDSCQVSGGDWCPQHPVGAYVGQEPGMQLSPGPLVRVSFETPPLTI

SEQ ID NO: 7166 - protein, 480 aa, Homo sapiens
MGPGPPAAGAAPSPRPLSLVARLSYAVGHFLNDLCASMWFTYLLLYLHSVRAYSSRGAGLLLLLGQVADGLCTPLVGYEADRAASCCARYGPRKAWHLVGTVCVLLSFPFIFSPCLGCGAATPEWAALLYYGPFIVIFQFGWASTQISHLSLIPELVTNDHEKVELTALRYAFTVVANITVYGAAWLLLHLQGSSRVEPTQDISISDQLGGQDVPVFRNLSLLVVGVGAVFSLLFHLGTRERRRPHAEEPGEHTPLLAPATAQPLLLWKHWLREPAFYQVGILYMTTRLIVNLSQTYMAMYLTYSLHLPKKFIATIPLVMYLSGFLSSFLMKPINKCIGRNMTYFSGLLVILAFAAWVALAEGLGVAVYAAAVLLGAGCATILVTSLAMTADLIGPHTNSGAFVYGSMSFLDKVANGLAVMAIQSLHPCPSELCCRACVSFYHWAMVAVTGGVGVAAALCLCSLLLWPTRLRRWDRDARP

SEQ ID NO: 7167 - protein, 465 aa, Homo sapiens
MFLATLYFALPLLDLLLSAEVSGGDRLDCVKASDQCLKEQSCSTKYRTLRQCVAGKETNFSLASGLEAKDECRSAMEALKQKSLYNCRCKRGMKKEKNCLRIYWSMYQSLQGNDLLEDSPYEPVNSRLSDIFRVVPFISDVFQQVEHIPKGNNCLDAAKACNLDDICKKYRSAYITPCTTSVSNDVCNRRKCHKALRQFFDKVPAKHSYGMLFCSCRDIACTERRRQTIVPVCSYEEREKPNCLNLQDSCKTNYICRSRLADFFTNCQPESRSVSSCLKENYADCLLAYSGLIGTVMTPNYIDSSSLSVAPWCDCSNSGNDLEECLKFLNFFKDNTCLKNAIQAFGNGSDVTVWQPAFPVQTTTATTTTALRVKNKPLGPAGSENEIPTHVLPPCANLQAQKLKSNVSGNTHLCISNGNYEKEGLGASSHITTKSMAAPPSCGLSPLLVLVVTALSTLLSLTETS

SEQ ID NO: 7168 - protein, 493 aa, Homo sapiens
MLKALFLTMLTLALVKSQDTEETITYTQCTDGYEWDPVRQQCKDIDECDIVPDACKGGMKCVNHYGGYLCLPKTAQIIVNNEQPQQETQPAEGTSGATTGVVAASSMATSGVLPGGGFVASAAAVAGPEMQTGRNNFVIRRNPADPQRIPSNPSHRIQCAAGYEQSEHNVCQDIDECTAGTHNCRADQVCINLRGSFACQCPPGYQKRGEQCVDIDECTIPPYCHQRCVNTPGSFYCQCSPGFQLAANNYTCVDINECDASNQCAQQCYNILGSFICQCNQGYELSSDRLNCEDIDECRTSSYLCQYQCVNEPGKFSCMCPQGYQVVRSRTCQDINECETTNECREDEMCWNYHGGFRCYPRNPCQDPYILTPENRCVCPVSNAMCRELPQSIVYKYMSIRSDRSVPSDIFQIQATTIYANTINTFRIKSGNENGEFYLRQTSPVSAMLVLVKSLSGPREHIVDLEMLTVSSIGTFRTSSVLRLTIIVGPFSF

SEQ ID NO: 7169 - protein, 1257 aa, Homo sapiens
MKAADEPAYLTVGTDVSAKYRGAFCEAKIKTVKRLVKVKVLLKQDNTTQLVQDDQVKGPLRVGAIVETRTSDGSFQEAIISKLTDASWYTVVFDDGDERTLRRTSLCLKGERHFAESETLDQLPLTNPEHFGTPVIAKKTNRGRRSSLPVTEDEKEEESSEEEDEDKRRLNDELLGKVVSVVSATERTEWYPALVISPSCNDDITVKKDQCLVRSFIDSKFYSIARKDIKEVDILNLPESELSTKPGLQKASIFLKTRVVPDNWKMDISEILESSSSDDEDGPAEENDEEKEKEAKKTEEEVPEEELDPEERDNFLQQLYKFMEDRGTPINKPPVLGYKDLNLFKLFRLVYHQGGCDNIDSGAVWKQIYMDLGIPILNSAASYNVKTAYRKYLYGFEEYCRSANIQFRTVHHHEPKVKEEKKDLEESMEEALKLDQEMPLTEVKSEPEENIDSNSESEREEIELKSPRGRRRIARDVNSIKKEIEEEKTEDKLKDNDTENKDVDDDYETAEKKENELLLGRKNTPKQKEKKIKKQEDSDKDSDEEEEKSQEREETESKCDSEGEEDEEDMEPCLTGTKVKVKYGRGKTQKIYEASIKSTEIDDGEVLYLVHYYGWNVRYDEWVKADRIIWPLDKGGPKKKQKKKAKNKEDSEKDEKRDEERQKSKRGRPPLKSTLSSNMPYGLSKTANSEGKSDSCSSDSETEDALEKNLINEELSLKDELEKNENLNDDKLDEENPKISAHILKENDRTQMQPLETLKLEVGENEQIVQIFGNKMEKTEEVKKEAEKSPKGKGRRSKTKDLSLEIIKISSFGQNEAGSEPHIEAHSLELSSLDNKNFSSATEDEIDQCVKEKKLKRKILGQSSPEKKIRIENGMEMTNTVSQERTSDCIGSEGMKNLNFEQHFERENEGMPSLIAESNQCIQQLTSERFDSPAEETVNIPLKEDEDAMPLIGPETLVCHEVDLDDLDEKDKTSIEDVAVESSESNSLVSIPPALPPVVQHNFSVASPLTLSQDESRSVKSESDITIEVDSIAEESQEGLCERESANGFETNVASGTCSIIVQERESREKGQKRPSDGNSGLMAKKQKRTPKRTSAAAKNEKNGTGQSSDSEDLPVLDNSSKCTPVKHLNVSKPQKLARSPARISPHIKDGEKDKHREKHPNSSPRTYKWSFQLNELDNMNSTERISFLQEKLQEIRKYYMSLKSEVATIDRRRKRLKKKDREVSHAGASMSSASSDTGMSPSSSSPPQNVLAVECR

SEQ ID NO: 7170 - protein, 377 aa, Homo sapiens
MLLLVTSLLLCELPHPAFLLIPEKSDLRTVAPASSLNVRFDSRTMNLSWDCQENTTFSKCFLTDKKNRVVEPRLSNNECSCTFREICLHEGVTFEVHVNTSQRGFQQKLLYPNSGREGTAAQNFSCFIYNADLMNCTWARGPTAPRDVQYFLYIRNSKRRREIRCPYYIQDSGTHVGCHLDNLSGLTSRNYFLVNGTSREIGIQFFDSLLDTKKIERFNPPSNVTVRCNTTHCLVRWKQPRTYQKLSYLDFQYQLDVHRKNTQPGTENLLINVSGDLENRYNFPSSEPRAKHSVKIRAADVRILNWSSWSEAIEFDHLGGIHPRGRERLPRRGLDREGNYLRPRGCRNGMDISASATRGNCFLDDAVNLYIIFYVFI

SEQ ID NO: 7171 - protein, 361 aa, Homo sapiens
METGAAELYDQALLGILQHVGNVQDFLRVLFGFLYRKTDFYRLLRHPSDRMGFPPGAAQALVLQVFKTFDHMARQDDEKRRQELEEKIRRKEEEEAKTVSAAAAEKEPVPVPVQEIEIDSTTELDGHQEVEKVQPPGPVKEMAHGSQEAEAPGAVAGAAEVPREPPILPRIQEQFQKNPDSYNGAVRENYTWSQDYTDLEVRVPVPKHVVKGKQVSVALSSSSIRVAMLEENGERVLMEGKLTHKINTESSLWSLEPGKCVLVNLSKVGEYWWNAILEGEEPIDIDKINKERSMATVDEEEQAVLDRLTFDYHQKLQGKPQSHELKVHEMLKKGWDAEGSPFRGQRFDPAMFNISPGAVQF

SEQ ID NO: 7172 - protein, 370 aa, Homo sapiens
MAVSVTPIRDTKWLTLEVCREFQRGTCSRPDTECKFAHPSKSCQVENGRVIACFDSLKGRCSRENCKYLHPPPHLKTQLEINGRNNLIQQKNMAMLAQQMQLANAMMPGAPLQPVPMFSVAPSLATNASAAAFNPYLGPVSPSLVPAEILPTAPMLVTGNPGVPVPAAAAAAAQKLMRTDRLEVCREYQRGNCNRGENDCRFAHPADSTMIDTNDNTVTVCMDYIKGRCSREKCKYFHPPAHLQAKIKAAQYQVNQAAAAQAAATAAAMGIPQAVLPPLPKRPALEKTNGATAVFNTGIFQYQQALANMQLQQHTAFLPPVPMVHGATPATVSAATTSATSVPFAATATANQIPIISAEHLTSHKYVTQM

SEQ ID NO: 7173 - protein, 315 aa, Homo sapiens
MVQQRGARAKRDGGPPPPGPGPAEEGAREPGWCKTPSGHIKRPMNAFMVWSQHERRKIMDQWPDMHNAEISKRLGRRWQLLQDSEKIPFVREAERLRLKHMADYPDYKYRPRKKSKGAPAKARPRPPGGSGGGSRLKPGPQLPGRGGRRAAGGPLGGGAAAPEDDDEDDDEELLEVRLVETPGRELWRMVPAGRAARGQAERAQGPSGEGAAAAAAASPTPSEDEEPEEEEEEAAAAEEGEEETVASGEESLGFLSRLPPGPAGLDCSALDRDPDLQPPSGTSHFEFPDYCTPEVTEMIAGDWRPSSIADLVFTY

SEQ ID NO: 7174 - protein, 437 aa, Homo sapiens
MARVAWGLLWLLLGSAGAQYEKYSFRGFPPEDLMPLAAAYGHALEQYEGESWRESARYLEAALRLHRLLRDSEAFCHANCSGPAPAAKPDPDGGRADEWACELRLFGRVLERAACLRRCKRTLPAFQVPYPPRQLLRDFQSRLPYQYLHYALFKANRLEKAVAAAYTFLQRNPKHELTAKYLNYYQGMLDVADESLTDLEAQPYEAVFLRAVKLYNSGDFRSSTEDMERALSEYLAVFARCLAGCEGAHEQVDFKDFYPAIADLFAESLQCKVDCEANLTPNVGGYFVDKFVATMYHYLQFAYYKLNDVRQAARSAASYMLFDPKDSVMQQNLVYYRFHRARWGLEEEDFQPREEAMLYHNQTAELRELLEFTHMYLQSDDEMELEETEPPLEPEDALSDAEFEGEGDYEEGMYADWWQEPDAKGDEAEAEPEPELA

SEQ ID NO: 7175 - protein, 576 aa, Homo sapiens
MELENIVANTVLLKAREGGGGNRKGKSKKWRQMLQFPHISQCEELRLSLERDYHSLCERQPIGRLLFREFCATRPELSRCVAFLDGVAEYEVTPDDKRKACGRQLTQNFLSHTGPDLIPEVPRQLVTNCTQRLEQGPCKDLFQELTRLTHEYLSVAPFADYLDSIYFNRFLQWKWLERQPVTKNTFRQYRVLGKGGFGEVCACQVRATGKMYACKKLEKKRIKKRKGEAMALNEKQILEKVNSRFVVSLAYAYETKDALCLVLTLMNGGDLKFHIYHMGQAGFPEARAVFYAAEICCGLEDLHRERIVYRDLKPENILLDDHGHIRISDLGLAVHVPEGQTIKGRVGTVGYMAPEVVKNERYTFSPDWWALGCLLYEMIAGQSPFQQRKKKIKREEVERLVKEVPEEYSERFSPQARSLCSQLLCKDPAERLGCRGGSAREVKEHPLFKKLNFKRLGAGMLEPPFKPDPQAIYCKDVLDIEQFSTVKGVELEPTDQDFYQKFATGSVPIPWQNEMVETECFQELNVFGLDGSVPPDLDWKGQPPAPPKKGLLQRLFSRQDCCGNCSDSEEELPTRL

SEQ ID NO: 7176 - protein, 1519 aa, Homo sapiens
MAPYPCGCHILLLLFCCLAAARANLLNLNWLWFNNEDTSHAATTIPEPQGPLPVQPTADTTTHVTPRNGSTEPATAPGSPEPPSELLEDGQDTPTSAESPDAPEENIAGVGAEILNVAKGIRSFVQLWNDTVPTESLARAETLVLETPVGPLALAGPSSTPQENGTTLWPSRGIPSSPGAHTTEAGTLPAPTPSPPSLGRPWAPLTGPSVPPPSSERISEEVGLLQLLGDPPPQQVTQTDDPDVGLAYVFGPDANSGQVARYHFPSLFFRDFSLLFHIRPATEGPGVLFAITDSAQAMVLLGVKLSGVQDGHQDISLLYTEPGAGQTHTAASFRLPAFVGQWTHLALSVAGGFVALYVDCEEFQRMPLARSSRGLELEPGAGLFVAQAGGADPDKFQGVIAELKVRRDPQVSPMHCLDEEGDDSDGASGDSGSGLGDARELLREETGAALKPRLPAPPPVTTPPLAGGSSTEDSRSEEVEEQTTVASLGAQTLPGSDSVSTWDGSVRTPGGRVKEGGLKGQKGEPGVPGPPGRAGPPGSPCLPGPPGLPCPVSPLGPAGPALQTVPGPQGPPGPPGRDGTPGRDGEPGDPGEDGKPGDTGPQGFPGTPGDVGPKGDKGDPGVGERGPPGPQGPPGPPGPSFRHDKLTFIDMEGSGFGGDLEALRGPRGFPGPPGPPGVPGLPGEPGRFGVNSSDVPGPAGLPGVPGREGPPGFPGLPGPPGPPGREGPPGRTGQKGSLGEAGAPGHKGSKGAPGPAGARGESGLAGAPGPAGPPGPPGPPGPPGPGLPAGFDDMEGSGGPFWSTARSADGPQGPPGLPGLKGDPGVPGLPGAKGEVGADGVPGFPGLPGREGIAGPQGPKGDRGSRGEKGDPGKDGVGQPGLPGPPGPPGPVVYVSEQDGSVLSVPGPEGRPGFAGFPGPAGPKGNLGSKGERGSPGPKGEKGEPGSIFSPDGGALGPAQKGAKGEPGFRGPPGPYGRPGYKGEIGFPGRPGRPGMNGLKGEKGEPGDASLGFGMRGMPGPPGPPGPPGPPGTPVYDSNVFAESSRPGPPGLPGNQGPPGPKGAKGEVGPPGPPGQFPFDFLQLEAEMKGEKGDRGDAGQKGERGEPGGGGFFGSSLPGPPGPPGPPGPRGYPGIPGPKGESIRGQPGPPGPQGPPGIGYEGRQGPPGPPGPPGPPSFPGPHRQTISVPGPPGPPGPPGPPGTMGASSGVRLWATRQAMLGQVHEVPEGWLIFVAEQEELYVRVQNGFRKVQLEARTPLPRGTDNEVAALQPPVVQLHDSNPYPRREHPHPTARPWRADDILASPPRLPEPQPYPGAPHHSSYVHLRPARPTSPPAHSHRDFQPVLHLVALNSPLSGGMRGIRGADFQCFQQARAVGLAGTFRAFLSSRLQDLYSIVRRADRAAVPIVNLKDELLFPSWEALFSGSEGPLKPGARIFSFDGKDVLRHPTWPQKSVWHGSDPNGRRLTESYCETWRTEAPSATGQASSLLGGRLLGQSAASCHHAYIVLCIENSFMTASK

SEQ ID NO: 7177 - protein, 91 aa, Homo sapiens
MSYMLPHLHNGWQVDQAILSEEDRVVVIRFGHDWDPTCMKMDEVLYSIAEKVKNFAVIYLVDITEVPDFNKMYELYDPCTVMFFFSYHRGW

SEQ ID NO: 7178 - protein, 583 aa, Homo sapiens
MEGSRPRSSLSLASSASTISSLSSLSPKKPTRAVNKIHAFGKRGNALRRDPNLPVHIRGWLHKQDSSGLRLWKRRWFVLSGHCLFYYKDSREESVLGSVLLPSYNIRPDGPGAPRGRRFTFTAEHPGMRTYVLAADTLEDLRGWLRALGRASRAEGDDYGQPRSPARPQPGEGPGGPGGPPEVSRGEEGRISESPEVTRLSRGRGRPRLLTPSPTTDLHSGLQMRRARSPDLFTPLSRPPSPLSLPRPRSAPARRPPAPSGDTAPPARPHTPLSRIDVRPPLDWGPQRQTLSRPPTPRRGPPSEAGGGKPPRSPQHWSQEPRTQPGPPLESTFHQSLETDTLLTKLCGQDRLLRRLQEEIDQKQEEKEQLEAALELTRQQLGQATREAGAPGRAWGRQRLLQDRLVSVRATLCHLTQERERVWDTYSGLEQELGTLRETLEYLLHLGSPQDRVSAQQQLWMVEDTLAGLGGPQKPPPHTEPDSPSPVLQGEESSERESLPESLELSSPRSPETDWGRPPGGDKDLASPHLGLGSPRVSRASSPEGRHLPSPQLGTKSKEHHPLLADFRRSPGAGSQPLPSPGY

SEQ ID NO: 7179 - protein, 802 aa, Homo sapiens
MGHPPLEFSDCYLDSPDFRERLKCYEQELERTNKFIKDVIKDGNALISAMRNYSSAVQKFSQTLQSFQFDFIGDTLTDDEINIAESFKEFAELLNEVENERMMMVHNASDLLIKPLENFRKEQIGFTKERKKKFEKDGERFYSLLDRHLHLSSKKKESQLQEADLQVDKERHNFFESSLDYVYQIQEVQESKKFNIVEPVLAFLHSLFISNSLTVELTQDFLPYKQQLQLSLQNTRNHFSSTREEMEELKKRMKEAPQTCKLPGQPTIEGYLYTQEKWALGISWVKYYCQYEKETKTLTMTPMEQKPGAKQGPLDLTLKYCVRRKTESIDKRFCFDIETNERPGTITLQALSEANRRLWMEAMDGKEPIYHSPITKQQEMELNEVGFKFVRKCINIIETKGIKTEGLYRTVGSNIQVQKLLNAFFDPKCPGDVDFHNSDWDIKTITSSLKFYLRNLSEPVMTYRLHKELVSAAKSDNLDYRLGAIHSLVYKLPEKNREMLELLIRHLVNVCEHSKENLMTPSNMGVIFGPTLMRAQEDTVAAMMNIKFQNIVVEILIEHFGKIYLGPPEESAAPPVPPPRVTARRHKPITISKRLLRERTVFYTSSLDESEDEIQHQTPNGTITSSIEPPKPPQHPKLPIQRSGETDPGRKSPSRPILDGKLEPCPEVDVGKLVSRLQDGGTKITPKATNGPMPGSGPTKTPSFHIKRPAPRPLAHHKEGDADSFSKVRPPGEKPTIIRPPVRPPDPPCRAATPQKPEPKPDIVAGNAGEITSSVVASRTRFFETASRKTGSSQGRLPGDES

SEQ ID NO: 7180 - protein, 287 aa, Homo sapiens
MDPKQTTLLCLVLCLGQRIQAQEGDFPMPFISAKSSPVIPLDGSVKIQCQAIREAYLTQLMIIKNSTYREIGRRLKFWNETDPEFVIDHMDANKAGRYQCQYRIGHYRFRYSDTLELVVTGLYGKPFLSADRGLVLMPGENISLTCSSAHIPFDRFSLAKEGELSLPQHQSGEHPANFSLGPVDLNVSGIYRCYGWYNRSPYLWSFPSNALELVVTDSIHQDYTTQNLIRMAVAGLVLVALLAILVENWHSHTALNKEASADVAEPSWSQQMCQPGLTFARTPSVCK

SEQ ID NO: 7181 - protein, 475 aa, Homo sapiens
MAAKSQPNIPKAKSLDGVTNDRTASQGQWGRAWEVDWFSLASVIFLLLFAPFIVYYFIMACDQYSCALTGPVVDIVTGHARLSDIWAKTPPITRKAAQLYTLWVTFQVLLYTSLPDFCHKFLPGYVGGIQEGAVTPAGVVNKYQINGLQAWLLTHLLWFANAHLLSWFSPTIIFDNWIPLLWCANILGYAVSTFAMVKGYFFPTSARDCKFTGNFFYNYMMGIEFNPRIGKWFDFKLFFNGRPGIVAWTLINLSFAAKQRELHSHVTNAMVLVNVLQAIYVIDFFWNETWYLKTIDICHDHFGWYLGWGDCVWLPYLYTLQGLYLVYHPVQLSTPHAVGVLLLGLVGYYIFRVANHQKDLFRRTDGRCLIWGRKPKVIECSYTSADGQRHHSKLLVSGFWGVARHFNYVGDLMGSLAYCLACGGGHLLPYFYIIYMAILLTHRCLRDEHRCASKYGRDWERYTAAVPYRLLPGIF

SEQ ID NO: 7182 - protein, 1192 aa, Homo sapiens
MALSDEPAAGGPEEEAEDETLAFGAALEAFGESAETRALLGRLREVHGGGAEREVALERFRVIMDKYQEQPHLLDPHLEWMMNLLLDIVQDQTSPASLVHLAFKFLYIITKVRGYKTFLRLFPHEVADVEPVLDLVTIQNPKDHEAWETRYMLLLWLSVTCLIPFDFSRLDGNLLTQPGQARMSIMDRILQIAESYLIVSDKARDAAAVLVSRFITRPDVKQSKMAEFLDWSLCNLARSSFQTMQGVITMDGTLQALAQIFKHGKREDCLPYAATVLRCLDGCRLPESNQTLLRKLGVKLVQRLGLTFLKPKVAAWRYQRGCRSLAANLQLLTQGQSEQKPLILTEDDDEDDDVPEGVERVIEQLLVGLKDKDTVVRWSAAKGIGRMAGRLPRALADDVVGSVLDCFSFQETDKAWHGGCLALAELGRRGLLLPSRLVDVVAVILKALTYDEKRGACSVGTNVRDAACYVCWAFARAYEPQELKPFVTAISSALVIAAVFDRDINCRRAASAAFQENVGRQGTFPHGIDILTTADYFAVGNRSNCFLVISVFIAGFPEYTQPMIDHLVTMKISHWDGVIRELAARALHNLAQQAPEFSATQVFPRLLSMTLSPDLHMRHGSILACAEVAYALYKLAAQENRPVTDHLDEQAVQGLKQIHQQLYDRQLYRGLGGQLMRQAVCVLIEKLSLSKMPFRGDTVIDGWQWLINDTLRHLHLISSHSRQQMKDAAVSALAALCSEYYMKEPGEADPAIQEELITQYLAELRNPEEMTRCGFSLALGALPGFLLKGRLQQVLTGLRAVTHTSPEDVSFAESRRDGLKAIARICQTVGVKAGAPDEAVCGENVSQIYCALLGCMDDYTTDSRGDVGTWVRKAAMTSLMDLTLLLARSQPELIEAHTCERIMCCVAQQASEKIDRFRAHAASVFLTLLHFDSPPIPHVPHRGELEKLFPRSDVASVNWSAPSQAFPRITQLLGLPTYRYHVLLGLVVSLGGLTESTIRHSTQSLFEYMKGIQSDPQALGSFSGTLLQIFEDNLLNERVSVPLLKTLDHVLTHGCFDIFTTEEDHPFAVKLLALCKKEIKNSKDIQKLLSGIAVFCEMVQFPGDVRRQALLQLCLLLCHRFPLIRKTTASQVYETLLTYSDVVGADVLDEVVTVLSDTAWDAELAVVREQRNRLCDLLGVPRPQLVPQPGAC

SEQ ID NO: 7183 - protein, 3830 aa, Homo sapiens
MAFVATQGATVVDQTTLMKKYLQFVAALTDVNTPDETKLKMMQEVSENFENVTSSPQYSTFLEHIIPRFLTFLQDGEVQFLQEKPAQQLRKLVLEIIHRIPTNEHLRPHTKNVLSVMFRFLETENEENVLICLRIIIELHKQFRPPITQEIHHFLDFVKQIYKELPKVVNRYFENPQVIPENTVPPPEMVGMITTIAVKVNPEREDSETRTHSIIPRGSLSLKVLAELPIIVVLMYQLYKLNIHNVVAEFVPLIMNTIAIQVSAQARQHKLYNKELYADFIAAQIKTLSFLAYIIRIYQELVTKYSQQMVKGMLQLLSNCPAETAHLRKELLIAAKHILTTELRNQFIPCMDKLFDESILIGSGYTARETLRPLAYSTLADLVHHVRQHLPLSDLSLAVQLFAKNIDDESLPSSIQTMSCKLLLNLVDCIRSKSEQESGNGRDVLMRMLEVFVLKFHTIARYQLSAIFKKCKPQSELGAVEAALPGVPTAPAAPGPAPSPAPVPAPPPPPPPPPPATPVTPAPVPPFEKQGEKDKEDKQTFQVTDCRSLVKTLVCGVKTITWGITSCKAPGEAQFIPNKQLQPKETQIYIKLVKYAMQALDIYQVQIAGNGQTYIRVANCQTVRMKEEKEVLEHFAGVFTMMNPLTFKEIFQTTVPYMVERISKNYALQIVANSFLANPTTSALFATILVEYLLDRLPEMGSNVELSNLYLKLFKLVFGSVSLFAAENEQMLKPHLHKIVNSSMELAQTAKEPYNYFLLLRALFRSIGGGSHDLLYQEFLPLLPNLLQGLNMLQSGLHKQHMKDLFVELCLTVPVRLSSLLPYLPMLMDPLVSALNGSQTLVSQGLRTLELCVDNLQPDFLYDHIQPVRAELMQALWRTLRNPADSISHVAYRVLGKFGGSNRKMLKESQKLHYVVTEVQGPSITVEFSDCKASLQLPMEKAIETALDCLKSANTEPYYRRQAWEVIKCFLVAMMSLEDNKHALYQLLAHPNFTEKTIPNVIISHRYKAQDTPARKTFEQALTGAFMSAVIKDLRPSALPFVASLIRHYTMVAVAQQCGPFLLPCYQVGSQPSTAMFHSEENGSKGMDPLVLIDAIAICMAYEEKELCKIGEVALAVIFDVASIILGSKERACQLPLFSYIVERLCACCYEQAWYAKLGGVVSIKFLMERLPLTWVLQNQQTFLKALLFVMMDLTGEVSNGAVAMAKTTLEQLLMRCATPLKDEERAEEIVAAQEKSFHHVTHDLVREVTSPNSTVRKQAMHSLQVLAQVTGKSVTVIMEPHKEVLQDMVPPKKHLLRHQPANAQIGLMEGNTFCTTLQPRLFTMDLNVVEHKVFYTELLNLCEAEDSALTKLPCYKSLPSLVPLRIAALNALAACNYLPQSREKIIAALFKALNSTNSELQEAGEACMRKFLEGATIEVDQIHTHMRPLLMMLGDYRSLTLNVVNRLTSVTRLFPNSFNDKFCDQMMQHLRKWMEVVVITHKGGQRSDGNEMKICSAIINLFHLIPAAPQTLVKPLLEVVMKTERAMLIEAGSPFREPLIKFLTRHPSQTVELFMMEATLNDPQWSRMFMSFLKHKDARPLRDVLAANPNRFITLLLPGGAQTAVRPGSPSTSTMRLDLQFQAIKIISIIVKNDDSWLASQHSLVSQLRRVWVSENFQERHRKENMAATNWKEPKLLAYCLLNYCKRNYGDIELLFQLLRAFTGRFLCNMTFLKEYMEEEIPKNYSIAQKRALFFRFVDFNDPNFGDELKAKVLQHILNPAFLYSFEKGEGEQLLGPPNPEGDNPESITSVFITKVLDPEKQADMLDSLRIYLLQYATLLVEHAPHHIHDNNKNRNSKLRRLMTFAWPCLLSKACVDPACKYSGHLLLAHIIAKFAIHKKIVLQVFHSLLKAHAMEARAIVRQAMAILTPAVPARMEDGHQMLTHWTRKIIVEEGHTVPQLVHILHLIVQHFKVYYPVRHHLVQHMVSAMQRLGFTPSVTIEQRRLAVDLSEVVIKWELQRIKDQQPDSDMDPNSSGEGVNSVSSSIKRGLSVDSAQEVKRFRTATGAISAVFGRSQSLPGADSLLAKPIDKQHTDTVVNFLIRVACQVNDNTNTAGSPGEVLSRRCVNLLKTALRPDMWPKSELKLQWFDKLLMTVEQPNQVNYGNICTGLEVLSFLLTVLQSPAILSSFKPLQRGIAACMTCGNTKVLRAVHSLLSRLMSIFPTEPSTSSVASKYEELECLYAAVGKVIYEGLTNYEKATNANPSQLFGTLMILKSACSNNPSYIDRLISVFMRSLQKMVREHLNPQAASGSTEATSGTSELVMLSLELVKTRLAVMSMEMRKNFIQAILTSLIEKSPDAKILRAVVKIVEEWVKNNSPMAANQTPTLREKSILLVKMMTYIEKRFPEDLELNAQFLDLVNYVYRDETLSGSELTAKLEPAFLSGLRCAQPLIRAKFFEVFDNSMKRRVYERLLYVTCSQNWEAMGNHFWIKQCIELLLAVCEKSTPIGTSCQGAMLPSITNVINLADSHDRAAFAMVTHVKQEPRERENSESKEEDVEIDIELAPGDQTSTPKTKELSEKDIGNQLHMLTNRHDKFLDTLREVKTGALLSAFVQLCHISTTLAEKTWVQLFPRLWKILSDRQQHALAGEISPFLCSGSHQVQRDCQPSALNCFVEAMSQCVPPIPIRPCVLKYLGKTHNLWFRSTLMLEHQAFEKGLSLQIKPKQTTEFYEQESITPPQQEILDSLAELYSLLQEEDMWAGLWQKRCKYSETATAIAYEQHGFFEQAQESYEKAMDKAKKEHERSNASPAIFPEYQLWEDHWIRCSKELNQWEALTEYGQSKGHINPYLVLECAWRVSNWTAMKEALVQVEVSCPKEMAWKVNMYRGYLAICHPEEQQLSFIERLVEMASSLAIREWRRLPHVVSHVHTPLLQAAQQIIELQEAAQINAGLQPTNLGRNNSLHDMKTVVKTWRNRLPIVSDDLSHWSSIFMWRQHHYQAIVTAYENSSQHDPSSNNAMLGVHASASAIIQYGKIARKQGLVNVALDILSRIHTIPTVPIVDCFQKIRQQVKCYLQLAGVMGKNECMQGLEVIESTNLKYFTKEMTAEFYALKGMFLAQINKSEEANKAFSAAVQMHDVLVKAWAMWGDYLENIFVKERQLHLGVSAITCYLHACRHQNESKSRKYLAKVLWLLSFDDDKNTLADAVDKYCIGVPPIQWLAWIPQLLTCLVGSEGKLLLNLISQVGRVYPQAVYFPIRTLYLTLKIEQRERYKSDPGPIRATAPMWRCSRIMHMQRELHPTLLSSLEGIVDQMVWFRENWHEEVLRQLQQGLAKCYSVAFEKSGAVSDAKITPHTLNFVKKLVSTFGVGLENVSNVSTMFSSAASESLARRAQATAQDPVFQKLKGQFTTDFDFSVPGSMKLHNLISKLKKWIKILEAKTKQLPKFFLIEEKCRFLSNFSAQTAEVEIPGEFLMPKPTHYYIKIARFMPRVEIVQKHNTAARRLYIRGHNGKIYPYLVMNDACLTESRREERVLQLLRLLNPCLEKRKETTKRHLFFTVPRVVAVSPQMRLVEDNPSSLSLVEIYKQRCAKKGIEHDNPISRYYDRLATVQARGTQASHQVLRDILKEVQSNMVPRSMLKEWALHTFPNATDYWTFRKMFTIQLALIGFAEFVLHLNRLNPEMLQIAQDTGKLNVAYFRFDINDATGDLDANRPVPFRLTPNISEFLTTIGVSGPLTASMIAVARCFAQPNFKVDGILKTVLRDEIIAWHKKTQEDTSSPLSAAGQPENMDSQQLVSLVQKAVTAIMTRLHNLAQFEGGESKVNTLVAAANSLDNLCRMDPAWHPWL

SEQ ID NO: 7184 - protein, 373 aa, Homo sapiens
MDTLEEVTWANGSTALPPPLAPNISVPHRCLLLLYEDIGTSRVRYWDLLLLIPNVLFLIFLLWKLPSARAKIRITSSPIFITFYILVFVVALVGIARAVVSMTVSTSNAATVADKILWEITRFFLLAIELSVIILGLAFGHLESKSSIKRVLAITTVLSLAYSVTQGTLEILYPDAHLSAEDFNIYGHGGRQFWLVSSCFFFLVYSLVVILPKTPLKERISLPSRRSFYVYAGILALLNLLQGLGSVLLCFDIIEGLCCVDATTFLYFSFFAPLIYVAFLRGFFGSEPKILFSYKCQVDETEEPDVHLPQPYAVARREGLEAAGAAGASAASYSSTQFDSAGGVAYLDDIASMPCHTGSINSTDSERWKAINA

SEQ ID NO: 7185 - protein, 516 aa, Homo sapiens
MLGKLAMLLWVQQALLALLLPTLLAQGEARRSRNTTRPALLRLSDYLLTNYRKGVRPVRDWRKPTTVSIDVIVYAILNVDEKNQVLTTYIWYRQYWTDEFLQWNPEDFDNITKLSIPTDSIWVPDILINEFVDVGKSPNIPYVYIRHQGEVQNYKPLQVVTACSLDIYNFPFDVQNCSLTFTSWLHTIQDINISLWRLPEKVKSDRSVFMNQGEWELLGVLPYFREFSMESSNYYAEMKFYVVIRRRPLFYVVSLLLPSIFLMVMDIVGFYLPPNSGERVSFKITLLLGYSVFLIIVSDTLPATAIGTPLIGKAPPGSRAQSGEKPAPSHLLHVSLASALGCTGVYFVVCMALLVISLAETIFIVRLVHKQDLQQPVPAWLRHLVLERIAWLLCLREQSTSQRPPATSQATKTDDCSAMGNHCSHMGGPQDFEKSPRDRCSPPPPPREASLAVCGLLQELSSIRQFLEKRDEIREVARDWLRVGSVLDKLLFHIYLLAVLAYSITLVMLWSIWQYA

SEQ ID NO: 7186 - protein, 457 aa, Homo sapiens
MSQGSVTFRDVAIDFSQEEWKWLQPAQRDLYRCVMLENYGHLVSLGLSISKPDVVSLLEQGKEPWLGKREVKRDLFSVSESSGEIKDFSPKNVIYDDSSQYLIMERILSQGPVYSSFKGGWKCKDHTEMLQENQGCIRKVTVSHQEALAQHMNISTVERPYGCHECGKTFGRRFSLVLHQRTHTGEKPYACKECGKTFSQISNLVKHQMIHTGKKPHECKDCNKTFSYLSFLIEHQRTHTGEKPYECTECGKAFSRASNLTRHQRIHIGKKQYICRKCGKAFSSGSELIRHQITHTGEKPYECIECGKAFRRFSHLTRHQSIHTTKTPYECNECRKAFRCHSFLIKHQRIHAGEKLYECDECGKVFTWHASLIQHTKSHTGEKPYACAECDKAFSRSFSLILHQRTHTGEKPYVCKVCNKSFSWSSNLAKHQRTHTLDNPYEYENSFNYHSFLTEHQ

SEQ ID NO: 7187 - protein, 497 aa, Homo sapiens
MPHPRRYHSSERGSRGSYREHYRSRKHKRRRSRSWSSSSDRTRRRRREDSYHVRSRSYDDRSSDRRVYDRRYCGSYRRNDYSRDRGDAYYDTDYRHSYEYQRENSSYRSQRSSRRKHRRRRRRSRTFSRSSSHSSRRAKSVEDDAEGHLIYHVGDWLQERYEIVSTLGEGTFGRVVQCVDHRRGGARVALKIIKNVEKYKEAARLEINVLEKINEKDPDNKNLCVQMFDWFDYHGHMCISFELLGLSTFDFLKDNNYLPYPIHQVRHMAFQLCQAVKFLHDNKLTHTDLKPENILFVNSDYELTYNLEKKRDERSVKSTAVRVVDFGSATFDHEHHSTIVSTRHYRAPEVILELGWSQPCDVWSIGCIIFEYYVGFTLFQTHDNREHLAMMERILGPIPSRMIRKTRKQKYFYRGRLDWDENTSAGRYVRENCKPLRRYLTSEAEEHHQLFDLIESMLEYEPAKRLTLGEALQHPFFARLRAEPPNKLWDSSRDISR

SEQ ID NO: 7188 - protein, 222 aa, Homo sapiens
MDSFKVVLEGPAPWGFRLQGGKDFNVPLSISRLTPGGKAAQAGVAVGDWVLSIDGENAGSLTHIEAQNKIRACGERLSLGLSRAQPVQSKPQKASAPAADPPRYTFAPSVSLNKTARPFGAPPPADSAPQQNGQPLRPLVPDASKQRLMENTEDWRPRPGTGQSRSFRILAHLTGTEFMQDPDEEHLKKSREKYVLELQSPRYTRLRDWHHQRSAHVLNVQS

SEQ ID NO: 7189 - protein, 1496 aa, Homo sapiens
MALSKGLRLLGRLGAEGDCSVLLEARGRDDCLLFEAGTVATLAPEEKEVIKGQYGKLTDAYGCLGELRLKSGGTSLSFLVLVTGCTSVGRIPDAEIYKITATDFYPLQEEAKEEERLIALKKILSSGVFYFSWPNDGSRFDLTVRTQKQGDDSSEWGNSFFWNQLLHVPLRQHQVSCCDWLLKIICGVVTIRTVYASHKQAKACLVSRVSCERTGTRFHTRGVNDDGHVSNFVETEQMIYMDDGVSSFVQIRGSVPLFWEQPGLQVGSHHLRLHRGLEANAPAFDRHMVLLKEQYGQQVVVNLLGSRGGEEVLNRAFKKLLWASCHAGDTPMINFDFHQFAKGGKLEKLETLLRPQLKLHWEDFDVFTKGENVSPRFQKGTLRMNCLDCLDRTNTVQSFIALEVLHLQLKTLGLSSKPIVDRFVESFKAMWSLNGHSLSKVFTGSRALEGKAKVGKLKDGARSMSRTIQSNFFDGVKQEAIKLLLVGDVYGEEVADKGGMLLDSTALLVTPRILKAMTERQSEFTNFKRIRIAMGTWNVNGGKQFRSNVLRTAELTDWLLDSPQLSGATDSQDDSSPADIFAVGFEEMVELSAGNIVNASTTNKKMWGEQLQKAISRSHRYILLTSAQLVGVCLYIFVRPYHVPFIRDVAIDTVKTGMGGKAGNKGAVGIRFQFHSTSFCFICSHLTAGQSQVKERNEDYKEITQKLCFPMGRNVFSHDYVFWCGDFNYRIDLTYEEVFYFVKRQDWKKLLEFDQLQLQKSSGKIFKDFHEGAINFGPTYKYDVGSAAYDTSDKCRTPAWTDRVLWWRKKHPFDKTAGELNLLDSDLDVDTKVRHTWSPGALQYYGRAELQASDHRPVLAIVEVEVQEVDVGARERVFQEVSSFQGPLDATVVVNLQSPTLEEKNEFPEDLRTELMQTLGSYGTIVLVRINQGQMLVTFADSHSALSVLDVDGMKVKGRAVKIRPKTKDWLKGLREEIIRKRDSMAPVSPTANSCLLEENFDFTSLDYESEGDILEDDEDYLVDEFNQPGVSDSELGGDDLSDVPGPTALAPPSKSPALTKKKQHPTYKDDADLVELKRELEAVGEFRHRSPSRSLSVPNRPRPPQPPQRPPPPTGLMVKKSASDASISSGTHGQYSILQTARLLPGAPQQPPKARTGISKPYNVKQIKTTNAQEAEAAIRCLLEARGGASEEALSAVAPRDLEASSEPEPTPGAAKPETPQAPPLLPRRPPPRVPAIKKPTLRRTGKPLSPEEQFEQQTVHFTIGPPETSVEAPPVVTAPRVPPVPKPRTFQPGKAAERPSHRKPASDEAPPGAGASVPPPLEAPPLVPKVPPRRKKSAPAAFHLQVLQSNSQLLQGLTYNSSDSPSGHPPAAGTVFPQGDFLSTSSATSPDSDGTKAMKPEAAPLLGDYQDPFWNLLHHPKLLNNTWLSKSSDPLDSGTRSPKRDPIDPVSAGASAAKAELPPDHEHKTLGHWVTISDQEKRTALQVFDPLAKT

SEQ ID NO: 7190 - protein, 937 aa, Homo sapiens
MLLYRGAPAGPGAPGCGLARPGGGPQAFGIRLSTMSPRYLQSNSSSHTRPFSAIAELLDNAVDPDVSARTVFIDVEEVKNKSCLTFTDDGCGMTPHKLHRMLSFGFTDKVIKKSQCPIGVFGNGFKSGSMRLGKDALVFTKNGGTLTVGLLSQTYLECVQAQAVIVPIVPFNQQNKKMIITEDSLPSLEAILNYSIFNRENDLLAQFDAIPGKKGTRVLIWNIRRNKNGKSELDFDTDQYDILVSDFDTEEKMTGGVTSELPETEYSLRAFCGILYMKPRMKIFLRQKKVTTQMIAKSLANVEYDTYKPTFTNKQVRITFGFSCKNSNQFGIMMYHNNRLIKSFEKVGCQVKPTRGEGVGVIGVIECNFLKPAYNKQDFEYTKEYRLTINALAQKLNAYWKEKTSQDNFETSTVARPIPKVPDQTWVQCDECLKWRKLPGKIDPSMLPARWFCYYNSHPKYRRCSVPEEQELTDEDLCLSKAKKQEQTVEEKKKMPMENENHQVFSNPPKILTVQEMAGLNNKTIGYEGIHSPSVLPSGGEESRSPSLQLKPLDSSVLQFSSKYKWILGEEPVEKRRRLQNEMTTPSLDYSMPAPYRRVEAPVAYPEGENSHDKSSSERSTPPYLFPEYPEASKNTGQNREVSILYPGAKDQRQGSLLPEELEDQMPRLVAEESNRGSTTINKEEVNKGPFVAVVGVAKGVRDSGAPIQLIPFNREELAERRKAVESWNPVPYSVASAAIPAAAIGEKARGYEESEGHNTPKLKNQRELEELKRTTEKLERVLAERNLFQQKVEELEQERNHWQSEFKKVQHELVIYSTQEAEGLYWSKKHMGYRQAEFQILKAELERTKEEKQELKEKLKETETHLEMLQKAQVSYRTPEGDDLERALAKLTRLRIHVSYLLTSVLPHLELREIGYDSEQVDGILYTVLEANHILD

SEQ ID NO: 7191 - protein, 428 aa, Homo sapiens
MKRGGRDSDRNSSEEGTAEKSKKLRTTNEHSQTCDWGNLLQDIILQVFKYLPLLDRAHASQVCRNWNQVFHMPDLWRCFEFELNQPATSYLKATHPELIKQIIKRHSNHLQYVSFKVDSSKESAEAACDILSQLVNCSLKTLGLISTARPSFMDLPKSHFISALTVVFVNSKSLSSLKIDDTPVDDPSLKVLVANNSDTLKLLKMSSCPHVSPAGILCVADQCHGLRELALNYHLLSDELLLALSSEKHVRLEHLRIDVVSENPGQTHFHTIQKSSWDAFIRHSPKVNLVMYFFLYEEEFDPFFRYEIPATHLYFGRSVSKDVLGRVGMTCPRLVELVVCANGLRPLDEELIRIAERCKNLSAIGLGECEVSCSAFVEFVKMCGGRLSQLSIMEEVLIPDQKYSLEQIHWEVSKHLGRVWFPDMMPTW

SEQ ID NO: 7192 - protein, 183 aa, Homo sapiens
MSSPSPGKRRMDTDVVKLIESKHEVTILGGLNEFVVKFYGPQGTPYEGGVWKVRVDLPDKYPFKSPSIGFMNKIFHPNIDEASGTVCLDVINQTWTALYDLTNIFESFLPQLLAYPNPIDPLNGDAAAMYLHRPEEYKQKIKEYIQKYATEEALKEQEEGTGDSSSESSMSDFSEDEAQDMEL

SEQ ID NO: 7193 - protein, 512 aa, Homo sapiens
MMLSEQAQKWFPTHVQVTVLQAKDLKPKGKSGTNDTYTIIQLGKEKYSTSVAEKTLEPVWKEEASFELPGLLIQGSPEKYILFLIVMHRSLVGLDKFLGQVAINLNDIFEDKQRRKTEWFRLESKQGKRIKNRGEIKVNIQFMRNNMTASMFDLSMKDKTRSPFAKLKDKMKGRKNDGTFSDTSSAIIPSTHMPDANSEFSSGEIQMKSKPKKPFLLGPQRLSSAHSMSDLSGSHMSSEKLKAGTIGQTHLLGHQLDSFGTVPESGSLKSPHRRTLSFDTSKMNQPDSIVDEGELCFGRQNDPFTNVTASLPQKFATLPRKKNPFEESSETWDSSMNLFSKPIEIRKENKREKREKVSLFERVTGKKDSRRSDKLNNGGSDSPCDLKSPNAFSENRQDYFDYESTNPFTAKFRASNIMPSSSFHMSPTSNEDLRKIPDSNPFDATAGYRSLTYEEVLQELVKHKELLRRKDTHIRELEDYIDNLLVRVMEETPSILRVPYEPSRKAGKFSNS

SEQ ID NO: 7194 - protein, 241 aa, Homo sapiens
MRLLRRWAFAALLLSLLPTPGLGTQGPAGALRWGGLPQLGGPGAPEVTEPSRLVRESSGGEVRKQQLDTRVRQEPPGGPPVHLAQVSFVIPAFNSNFTLDLELNHHLLSSQYVERHFSREGTTQHSTGAGDHCYYQGKLRGNPHSFAALSTCQGLHGVFSDGNLTYIVEPQEVAGPWGAPQGPLPHLIYRTPLLPDPLGCREPGCLFAVPAQSAPPNRPRLRRKRSAGATLQCTVKPSMWS

SEQ ID NO: 7195 - protein, 497 aa, Homo sapiens
MTFNSFEGSKTCVPADINKEEEFVEEFNRLKTFANFPSGSPVSASTLARAGFLYTGEGDTVRCFSCHAAVDRWQYGDSAVGRHRKVSPNCRFINGFYLENSATQSTNSGIQNGQYKVENYLGSRDHFALDRPSETHADYLLRTGQVVDISDTIYPRNPAMYSEEARLKSFQNWPDYAHLTPRELASAGLYYTGIGDQVQCFCCGGKLKNWEPCDRAWSEHRRHFPNCFFVLGRNLNIRSESDAVSSDRNFPNSTNLPRNPSMADYEARIFTFGTWIYSVNKEQLARAGFYALGEGDKVKCFHCGGGLTDWKPSEDPWEQHAKWYPGCKYLLEQKGQEYINNIHLTHSLEECLVRTTEKTPSLTRRIDDTIFQNPMVQEAIRMGFSFKDIKKIMEEKIQISGSNYKSLEVLVADLVNAQKDSMQDESSQTSLQKEISTEEQLRRLQEEKLCKICMDRNIAIVFVPCGHLVTCKQCAEAVDKCPMCYTVITFKQKIFMS

SEQ ID NO: 7196 - protein, 393 aa, Homo sapiens
MSDEREVAEAATGEDASSPPPKTEAASDPQHPAASEGAAAAAASPPLLRCLVLTGFGGYDKVKLQSRPAAPPAPGPGQLTLRLRACGLNFADLMARQGLYDRLPPLPVTPGMEGAGVVIAVGEGVSDRKAGDRVMVLNRSGMWQEEVTVPSVQTFLIPEAMTFEEAAALLVNYITAYMVLFDFGNLQPGHSVLVHMAAGGVGMAAVQLCRTVENVTVFGTASASKHEALKENGVTHPIDYHTTDYVDEIKKISPKGVDIVMDPLGGSDTAKGYNLLKPMGKVVTYGMANLLTGPKRNLMALARTWWNQFSVTALQLLQANRAVCGFHLGYLDGEVELVSGVVARLLALYNQGHIKPHIDSVWPFEKVADAMKQMQEKKNVGKVLLVPGPEKEN

SEQ ID NO: 7197 - protein, 870 aa, Homo sapiens
MGNRGMEELIPLVNKLQDAFSSIGQSCHLDLPQIAVVGGQSAGKSSVLENFVGRDFLPRGSGIVTRRPLILQLIFSKTEHAEFLHCKSKKFTDFDEVRQEIEAETDRVTGTNKGISPVPINLRVYSPHVLNLTLIDLPGITKVPVGDQPPDIEYQIKDMILQFISRESSLILAVTPANMDLANSDALKLAKEVDPQGLRTIGVITKLDLMDEGTDARDVLENKLLPLRRGYIGVVNRSQKDIEGKKDIRAALAAERKFFLSHPAYRHMADRMGTPHLQKTLNQQLTNHIRESLPALRSKLQSQLLSLEKEVEEYKNFRPDDPTRKTKALLQMVQQFGVDFEKRIEGSGDQVDTLELSGGARINRIFHERFPFELVKMEFDEKDLRREISYAIKNIHGVRTGLFTPDLAFEAIVKKQVVKLKEPCLKCVDLVIQELINTVRQCTSKLSSYPRLREETERIVTTYIREREGRTKDQILLLIDIEQSYINTNHEDFIGFANAQQRSTQLNKKRAIPNQGEILVIRRGWLTINNISLMKGGSKEYWFVLTAESLSWYKDEEEKEKKYMLPLDNLKIRDVEKGFMSNKHVFAIFNTEQRNVYKDLRQIELACDSQEDVDSWKASFLRAGVYPEKDQAENEDGAQENTFSMDPQLERQVETIRNLVDSYVAIINKSIRDLMPKTIMHLMINNTKAFIHHELLAYLYSSADQSSLMEESADQAQRRDDMLRMYHALKEALNIIGDISTSTVSTPVPPPVDDTWLQSASSHSPTPQRRPVSSIHPPGRPPAVRGPTPGPPLIPVPVGAAASFSAPPIPSRPGPQSVFANSDLFPAPPQIPSRPVRIPPGIPPGVPSRRPPAAPSRPTIIRPAEPSLLD

SEQ ID NO: 7198 - protein, 433 aa, Homo sapiens
MATSGDCPRSESQGEEPAECSEAGLLQEGVQPEEFVAIADYAATDETQLSFLRGEKILILRQTTADWWWGERAGCCGYIPANHVGKHVDEYDPEDTWQDEEYFGSYGTLKLHLEMLADQPRTTKYHSVILQNKESLTDKVILDVGCGTGIISLFCAHYARPRAVYAVEASEMAQHTGQLVLQNGFADIITVYQQKVEDVVLPEKVDVLVSEWMGTCLLFEFMIESILYARDAWLKEDGVIWPTMAALHLVPCSADKDYRSKVLFWDNAYEFNLSALKSLAVKEFFSKPKYNHILKPEDCLSEPCTILQLDMRTVQISDLETLRGELRFDIRKAGTLHGFTAWFSVHFQSLQEGQPPQVLSTGPFHPTTHWKQTLFMMDDPVPVHTGDVVTGSVVLQRNPVWRRHMSVALSWAVTSRQDPTSQKVGEKVFPIWR

SEQ ID NO: 7199 - protein, 713 aa, Homo sapiens
MDELAGGGGGGPGMAAPPRQQQGPGGNLGLSPGGNGAAGGGGPPASEGAGPAAGPELSRPQQYTIPGILHYIQHEWARFEMERAHWEVERAELQARIAFLQGERKGQENLKKDLVRRIKMLEYALKQERAKYHKLKYGTELNQGDLKMPTFESEETKDTEAPTAPQNSQLTWKQGRQLLRQYLQEVGYTDTILDVRSQRVRSLLGLSNSEPNGSVETKNLEQILNGGESPKQKGQEIKRSSGDVLETFNFLENADDSDEDEENDMIEGIPEGKDKHRMNKHKIGNEGLAADLTDDPDTEEALKEFDFLVTAEDGEGAGEARSSGDGTEWAEPITFPSGGGKSFIMGSDDVLLSVLGLGDLADLTVTNDADYSYDLPANKDAFRKTWNPKYTLRSHFDGVRALAFHPVEPVLVTASEDHTLKLWNLQKTVPAKKSASLDVEPIYTFRAHIGPVLSLAISSNGEQCFSGGIDATIQWWNMPSPSVDPYDTYEPNVLAGTLVGHTDAVWGLAYSGIKNQLLSCSADGTVRLWNPQEKLPCICTYNGDKKHGIPTSVDFIGCDPAHMVTSFNTGSAVIYDLETSQSLVILSSQVDSGLQSNNHINRVVSHPTLPVTITAHEDRHIKFFDNKTGKMIHSMVAHLDAVTSLAVDPNGIYLMSGSHDCSIRLWNLDSKTCVQEITAHRKKLDESIYDVAFHSSKAYIASAGADALAKVFV

SEQ ID NO: 7200 - protein, 665 aa, Homo sapiens
MAGLSGAQIPDGEFTALVYRLIRDARYAEAVQLLGRELQRSPRSRAGLSLLGYCYYRLQEFALAAECYEQLGQLHPELEQYRLYQAQALYKACLYPEATRVAFLLLDNPAYHSRVLRLQAAIKYSEGDLPGSRSLVEQLLSGEGGEESGGDNETDGQVNLGCLLYKEGQYEAACSKFSATLQASGYQPDLSYNLALAYYSSRQYASALKHIAEIIERGIRQHPELGVGMTTEGFDVRSVGNTLVLHQTALVEAFNLKAAIEYQLRNYEVAQETLTDMPPRAEEELDPVTLHNQALMNMDARPTEGFEKLQFLLQQNPFPPETFGNLLLLYCKYEYFDLAADVLAENAHLTYKFLTPYLYDFLDALITCQTAPEEAFIKLDGLAGMLTEQLRRLTKQVQEARHNRDDEAIKKAVNEYDETMEKYIPVLMAQAKIYWNLENYPMVEKVFRKSVEFCNDHDVWKLNVAHVLFMQENKYKEAIGFYEPIVKKHYDNILNVSAIVLANLCVSYIMTSQNEEAEELMRKIEKEEEQLSYDDPNRKMYHLCIVNLVIGTLYCAKGNYEFGISRVIKSLEPYNKKLGTDTWYYAKRCFLSLLENMSKHMIVIHDSVIQECVQFLGHCELYGTNIPAVIEQPLEEERMHVGKNTVTDESRQLKALIYEIIGWNK

SEQ ID NO: 7201 - protein, 337 aa, Homo sapiens
MSLEQEEETQPGRLLGRRDAVPAFIEPNVRFWITERQSFIRRFLQWTELLDPTNVFISVESIENSRQLLCTNEDVSSPASADQRIQEAWKRSLATVHPDSSNLIPKLFRPAAFLPFMAPTVFLSMTPLKGIKSVILPQVFLCAYMAAFNSINGNRSYTCKPLERSLLMAGAVASSTFLGVIPQFVQMKYGLTGPWIKRLLPVIFLVQASGMNVYMSRSLESIKGIAVMDKEGNVLGHSRIAGTKAVRETLASRIVLFGTSALIPEVFTYFFKRTQYFRKNPGSLWILKLSCTVLAMGLMVPFSFSIFPQIGQIQYCSLEEKIQSPTEETEIFYHRGV

SEQ ID NO: 7202 - protein, 2034 aa, Homo sapiens
MGSQVLQILRQGVWASLTGGWFFDPHQSTFSNCFHLYVWIFLLIFPFLLYMVLPPSLMVAGVYCLVVAVIFATIKTVNYRLHAMFDQGEIVEKRSSTMGELEEEPAQGDSNPPRDPGVEMTVFRKVSSTPPVRCSSQHSVFGFNQVSELLPRMEDSGPLRDIKELVREQGSNNVIVTSADREMLKLSSQEKLIGDLPQTPPGAVPDPSLASTDSSEPSPLAGDGAPWSGSSMADTPMSPLLKGSLSQELSKSFLTLTQPDRALVRTSSRREQRRGAGGYQPLDRRGSGEPTPQKAGSSDSCFSGTDRETLSSFKSEKTNSTHLDSPPGGPAPEGSDTDPPSEAELPASPDAGVPSDDTLRSFDTVIGAGTPPGLAEPLLVVRPKDLALLRPSKRQPPLRRHSPPGRAPRRPLLEGGGFFEDEDTSEGSELSPASSLRSQRRYSTDSSSSTSCYSPESSRGAAGGPRKRRAPHGAEEGTAVPPKRPYGTQRTPSTASAKTHARVLSMDGAGGDVLRPPLAGCKAELEAQVGVEQAASEPVVLPAEARRGPAANQPGWRGELQEEGAVGGAAEETGRRDRSSSVRRTQAIRRRHNAGSNPTPPASVMGSPPSSLQEAQRGRAASHSRALTLPSALHFASSLLLTRAGANVHEACTFDDTSEGAVHYFYDESGVRRSYTFGLAGGGYENPVGQQGEQTANGAWDRHSHSSSFHSADVPEATGGLNLLQPRPVVLQGMQVRRVPLEIPEEQTLMEEAPPRAQHSYKYWLLPGRWTSVRYERLALLALLDRTRGVLENIFGVGLSSLVAFLGYLLLLKGFFTDIWVFQFCLVIASCQYSLLKSVQPDAASPMHGHNWVIAYSRPVYFCICCLLIWLLDALGSAQPFPPVSLYGLTLFSASFFFCARDVATVFTLCFPFVFLLGLLPQVNTCLMYLLEQIDMHGFGGTAATSPLTAVFSLSRSLLAAALLYGFCLGAIKTPWPEQHVPVLFSVFCGLLVALSYHLSRQSSDPTVLWSLIRSKLFPELEERSLETARAEPPDPLPDKMRQSVREVLHSDLVMCVVIAVLTFAISASTVFIALKSVLGFVLYALAGAVGFFTHYLLPQLRKQLPWFCLSQPVLKPLEYSQYEVRGAAQVMWFEKLYAGLQCVEKYLIYPAVVLNALTVDAHTVVSHPDKYCFYCRALLMTVAGLKLLRSAFCCPPQQYLTLAFTVLLFHFDYPRLSQGFLLDYFLMSLLCSKLWDLLYKLRFVLTYIAPWQITWGSAFHAFAQPFAVPHSAMLFVQALLSGLFSTPLNPLLGSAVFIMSYARPLKFWERDYNTKRVDHSNTRLVTQLDRNPGADDNNLNSIFYEHLTRSLQHTLCGDLVLGRWGNYGPGDCFVLASDYLNALVHLIEVGNGLVTFQLRGLEFRGTYCQQREVEAITEGVEEDEGCCCCEPGHLPRVLSFNAAFGQRWLAWEVTASKYVLEGYSISDNNAASMLQVFDLRKILITYYVKSIIYYVSRSPKLEVWLSHEGITAALRPVRVPGYADSDPTFSLSVDEDYDLRLSGLSLPSFCAVHLEWIQYCASRRSQPVDQDWNSPLVTLCFGLCVLGRRALGTASHSMSASLEPFLYGLHALFKGDFRITSPRDEWVFADMDLLHRVVAPGVRMALKLHQDHFTSPDEYEEPAALYDAIAANEERLVISHEGDPAWRSAILSNTPSLLALRHVLDDASDEYKIIMLNRRHLSFRVIKVNRECVRGLWAGQQQELVFLRNRNPERGSIQNAKQALRNMINSSCDQPLGYPIYVSPLTTSLAGSHPQLRALWGGPISLGAIAHWLLRTWERLHKGCGAGCNSGGNVDDSDCSGGGGLTSLSNNPPVAHPTPENTAGNGDQPLPPGPGWGPRSSLSGSGDGRPPPLLQWPPPRLPGPPPASPIPTEGPRTSRPPGPGLLSSEGPSGKWSLGGRKGLGGSDGEPASGSPKGGTPKSQAPLDLSLSLSLSLSPDVSTEASPPRASQDIPCLDSSAPESGTPMGALGDWPAPIEERESPAAQPLLEHQY

SEQ ID NO: 7203 - protein, 96 aa, Homo sapiens
MEHKEVVLLLLLFLKSGQGEPLDDYVNTQGPSLFSVTKKQLGAGSREECAAKCEEDKEFTCRAFQYHSKEQQCVIMAENRKSSIIIRMRDAVLFEK

SEQ ID NO: 7204 - protein, 283 aa, Homo sapiens
MEPPGDWGPPPWRSTPKTDVLRLVLYLTFLGAPCYAPALPSCKEDEYPVGSECCPKCSPGYRVKEACGELTGTVCEPCPPGTYIAHLNGLSKCLQCQMCDPAMGLRASRNCSRTENAVCGCSPGHFCIVQDGDHCAACRAYATSSPGQRVQKGGTESQDTLCQNCPPGTFSPNGTLEECQHQTKCSWLVTKAGAGTSSSHWVWWFLSGSLVIVIVCSTVGLIICVKRRKPRGDVVKVIVSVQRKRQEAEGEATVIEALQAPPDVTTVAVEETIPSFTGRSPNH

SEQ ID NO: 7205 - protein, 197 aa, Homo sapiens
MLGIWTLLPLVLTSVARLSSKSVNAQVTDINSKGLELRKTVTTVETQNLEGLHHDGQFCHKPCPPGERKARDCTVNGDEPDCVPCQEGKEYTDKAHFSSKCRRCRLCDEGHGLEVEINCTRTQNTKCRCKPNFFCNSTVCEHCDPCTKCEHGIIKECTLTSNTKCKEEGSRSNLGWLCLLLLPIPLIVWGNSGNKFI

SEQ ID NO: 7206 - protein, 116 aa, Homo sapiens
MAGVLKKTTGLVGLAVCNTPHERLRILYTKILDVLEEIPKNAAYRKYTEQITNEKLAMVKAEPDVKKLEDQLQGGQLEEVILQAEHELNLARKMREWKLWEPLVEEPPADQWKWPI

SEQ ID NO: 7207 - protein, 495 aa, Homo sapiens
MRSPVRDLARNDGEESTDRTPLLPGAPRAEAAPVCCSARYNLAILAFFGFFIVYALRVNLSVALVDMVDSNTTLEDNRTSKACPEHSAPIKVHHNQTGKKYQWDAETQGWILGSFFYGYIITQIPGGYVASKIGGKMLLGFGILGTAVLTLFTPIAADLGVGPLIVLRALEGLGEGVTFPAMHAMWSSWAPPLERSKLLSISYAGAQLGTVISLPLSGIICYYMNWTYVFYFFGTIGIFWFLLWIWLVSDTPQKHKRISHYEKEYILSSLRNQLSSQKSVPWVPILKSLPLWAIVVAHFSYNWTFYTLLTLLPTYMKEILRFNVQENGFLSSLPYLGSWLCMILSGQAADNLRAKWNFSTLCVRRIFSLIGMIGPAVFLVAAGFIGCDYSLAVAFLTISTTLGGFCSSGFSINHLDIAPSYAGILLGITNTFATIPGMVGPVIAKSLTPDNTVGEWQTVFYIAAAINVFGAIFFTLFAKGEVQNWALNDHHGHRH

SEQ ID NO: 7208 - protein, 1453 aa, Homo sapiens
MIKCLSVEVQAKLRSGLAISSLGQCVEELALNSIDAEAKCVAVRVNMETFQVQVIDNGFGMGSDDVEKVGNRYFTSKCHSVQDLENPRFYGFRGEALANIADMASAVEISSKKNRTMKTFVKLFQSGKALKACEADVTRASAGTTVTVYNLFYQLPVRRKCMDPRLEFEKVRQRIEALSLMHPSISFSLRNDVSGSMVLQLPKTKDVCSRFCQIYGLGKSQKLREISFKYKEFELSGYISSEAHYNKNMQFLFVNKRLVLRTKLHKLIDFLLRKESIICKPKNGPTSRQMNSSLRHRSTPELYGIYVINVQCQFCEYDVCMEPAKTLIEFQNWDTLLFCIQEGVKMFLKQEKLFVELSGEDIKEFSEDNGFSLFDATLQKRVTSDERSNFQEACNNILDSYEMFNLQSKAVKRKTTAENVNTQSSRDSEATRKNTNDAFLYIYESGGPGHSKMTEPSLQNKDSSCSESKMLEQETIVASEAGENEKHKKSFLEHSSLENPCGTSLEMFLSPFQTPCHFEESGQDLEIWKESTTVNGMAANILKNNRIQNQPKRFKDATEVGCQPLPFATTLWGVHSAQTEKEKKKESSNCGRRNVFSYGRVKLCSTGFITHVVQNEKTKSTETEHSFKNYVRPGPTRAQETFGNRTRHSVETPDIKDLASTLSKESGQLPNKKNCRTNISYGLENEPTATYTMFSAFQEGSKKSQTDCILSDTSPSFPWYRHVSNDSRKTDKLIGFSKPIVRKKLSLSSQLGSLEKFKRQYGKVENPLDTEVEESNGVTTNLSLQVEPDILLKDKNRLENSDVCKITTMEHSDSDSSCQPASHILNSEKFPFSKDEDCLEQQMPSLRESPMTLKELSLFNRKPLDLEKSSESLASKLSRLKGSERETQTMGMMSRFNELPNSDSSRKDSKLCSVLTQDFCMLFNNKHEKTENGVIPTSDSATQDNSFNKNSKTHSNSNTTENCVISETPLVLPYNNSKVTGKDSDVLIRASEQQIGSLDSPSGMLMNPVEDATGDQNGICFQSEESKARACSETEESNTCCSDWQRHFDVALGRMVYVNKMTGLSTFIAPTEDIQAACTKDLTTVAVDVVLENGSQYRCQPFRSDLVLPFLPRARAERTVMRQDNRDTVDDTVSSESLQSLFSEWDNPVFARYPEVAVDVSSGQAESLAVKIHNILYPYRFTKGMIHSMQVLQQVDNKFIACLMSTKTEENGEAGGNLLVLVDQHAAHERIRLEQLIIDSYEKQQAQGSGRKKLLSSTLIPPLEITVTEEQRRLLWCYHKNLEDLGLEFVFPDTSDSLVLVGKVPLCFVEREANELRRGRSTVTKSIVEEFIREQLELLQTTGGIQGTLPLTVQKVLASQACHGAIKFNDGLSLQESCRLIEALSSCQLPFQCAHGRPSMLPLADIDHLEQEKQIKPNLTKLRKMAQAWRLFGKAECDTRQSLQQSMPPCEPP

SEQ ID NO: 7209 - protein, 204 aa, Homo sapiens
MEAPAELLAALPALATALALLLAWLLVRRGAAASPEPARAPPEPAPPAEATGAPAPSRPCAPEPAASPAGPEEPGEPAGLGELGEPAGPGEPEGPGDPAAAPAEAEEQAVEARQEEEQDLDGEKGPSSEGPEEEDGEGFSFKYSPGKLRGNQYKKMMTKEELEEEQRVQKEQLAAIFKLMKDNKETFGEMSDGDVQEQLRLYDM

SEQ ID NO: 7210 - protein, 98 aa, Homo sapiens
MEASSEPPLDAKSDVTNQLVDFQWKLGMAVSSDTCRSLKYPYVAVMLKVADHSGQVKTKCFEMTIPQFQPQLLATSSLLSASNFYRQFKEIAAVIETV

SEQ ID NO: 7211 - protein, 233 aa, Homo sapiens
MLLLVTSLLLCELPHPAFLLIPEKSDLRTVAPASSLNVRFDSRTMNLSWDCQENTTFSKCFLTDKKNRVVEPRLSNNECSCTFREICLHEGVTFEVHVNTSQRGFQQKLLYPNSGREGTAAQNFSCFIYNADLMNCTWARGPTAPRDVQYFLYIRNSKRRREIRCPYYIQDSGTHVGCHLDNLSGLTSRNYFLVNGTSREIGIQFFDSLLDTKKIGSLGYSGCSRQFHRSKTN

SEQ ID NO: 7212 - protein, 389 aa, Homo sapiens
MKTGHFEIVTMLLATMILVDIFQVKAEVLDMADNAFDDEYLKCTDRMEIKYVPQLLKEEKASHQQLDTVWENAKAKWAARKTQIFLPMNFKDNHGIALMAYISEAQEQTPFYHLFSEAVKMAGQSREDYIYGFQFKAFHFYLTRALQLLRKPCEASSKTVVYRTSQGTSFTFGGLNQARFGHFTLAYSAKPQAANDQLTVLSIYTCLGVDIENFLDKESERITLIPLNEVFQVSQEGAGNNLILQSINKTCSHYECAFLGGLKTENCIENLEYFQPIYVYNPGEKNQKLEDHSEKNWKLEDHGEKNQKLEDHGVKILEPTQIPGMKIPEPFPLPEDKSQGNINNPTPGPVPVPGPKSHPSASSGKLLLPQFGMVIILISVSAINLFVAL

SEQ ID NO: 7213 - protein, 418 aa, Homo sapiens
MPSSVSWGILLLAGLCCLVPVSLAEDPQGDAAQKTDTSHHDQDHPTFNKITPNLAEFAFSLYRQLAHQSNSTNIFFSPVSIATAFAMLSLGTKADTHDEILEGLNFNLTEIPEAQIHEGFQELLRTLNQPDSQLQLTTGNGLFLSEGLKLVDKFLEDVKKLYHSEAFTVNFGDTEEAKKQINDYVEKGTQGKIVDLVKELDRDTVFALVNYIFFKGKWERPFEVKDTEEEDFHVDQVTTVKVPMMKRLGMFNIQHCKKLSSWVLLMKYLGNATAIFFLPDEGKLQHLENELTHDIITKFLENEDRRSASLHLPKLSITGTYDLKSVLGQLGITKVFSNGADLSGVTEEAPLKLSKAVHKAVLTIDEKGTEAAGAMFLEAIPMSIPPEVKFNKPFVFLMIEQNTKSPLFMGKVVNPTQK

SEQ ID NO: 7214 - protein, 1177 aa, Homo sapiens
MDEPPFSEAALEQALGEPCDLDAALLTDIEGEVGAGRGRANGLDAPRAGADRGAMDCTFEDMLQLINNQDSDFPGLFDPPYAGSGAGGTDPASPDTSSPGSLSPPPATLSSSLEAFLSGPQAAPSPLSPPQPAPTPLKMYPSMPAFSPGPGIKEESVPLSILQTPTPQPLPGALLPQSFPAPAPPQFSSTPVLGYPSPPGGFSTGSPPGNTQQPLPGLPLASPPGVPPVSLHTQVQSVVPQQLLTVTAAPTAAPVTTTVTSQIQQVPVLLQPHFIKADSLLLTAMKTDGATVKAAGLSPLVSGTTVQTGPLPTLVSGGTILATVPLVVDAEKLPINRLAAGSKAPASAQSRGEKRTAHNAIEKRYRSSINDKIIELKDLVVGTEAKLNKSAVLRKAIDYIRFLQHSNQKLKQENLSLRTAVHKSKSLKDLVSACGSGGNTDVLMEGVKTEVEDTLTPPPSDAGSPFQSSPLSLGSRGSGSGGSGSDSEPDSPVFEDSKAKPEQRPSLHSRGMLDRSRLALCTLVFLCLSCNPLASLLGARGLPSPSDTTSVYHSPGRNVLGTESRDGPGWAQWLLPPVVWLLNGLLVLVSLVLLFVYGEPVTRPHSGPAVYFWRHRKQADLDLARGDFAQAAQQLWLALRALGRPLPTSHLDLACSLLWNLIRHLLQRLWVGRWLAGRAGGLQQDCALRVDASASARDAALVYHKLHQLHTMGKHTGGHLTATNLALSALNLAECAGDAVSVATLAEIYVAAALRVKTSLPRALHFLTRFFLSSARQACLAQSGSVPPAMQWLCHPVGHRFFVDGDWSVLSTPWESLYSLAGNPVDPLAQVTQLFREHLLERALNCVTQPNPSPGSADGDKEFSDALGYLQLLNSCSDAAGAPAYSFSISSSMATTTGVDPVAKWWASLTAVVIHWLRRDEEAAERLCPLVEHLPRVLQESERPLPRAALHSFKAARALLGCAKAESGPASLTICEKASGYLQDSLATTPASSSIDKAVQLFLCDLLLVVRTSLWRQQQPPAPAPAAQGTSSRPQASALELRGFQRDLSSLRRLAQSFRPAMRRVFLHEATARLMAGASPTRTHQLLDRSLRRRAGPGGKGGAVAELEPRPTRREHAEALLLASCYLPPGFLSAPGQRVGMLAEAARTLEKLGDRRLLHDCQQMLMRLGGGTTVTSS

SEQ ID NO: 7215 - protein, 1056 aa, Homo sapiens
MAGALRRGRALGSRPSGPTVSSRRSPQCPVAQEGLGARSRPRVAPRSLARCGPSSRLMGWKPSEARGQSQSFQASGLQPRSLKAARRATGRPDRSRAAPPNMDPDPQAGVQVGMRVVRGVDWKWGQQDGGEGGVGTVVELGRHGSPSTPDRTVVVQWDQGTRTNYRAGYQGAHDLLLYDNAQIGVRHPNIICDCCKKHGLRGMRWKCRVCLDYDLCTQCYMHNKHELAHAFDRYETAHSRPVTLSPRQGLPRIPLRGIFQGAKVVRGPDWEWGSQDGGEGKPGRVVDIRGWDVETGRSVASVTWADGTTNVYRVGHKGKVDLKCVGEAAGGFYYKDHLPRLGKPAELQRRVSADSQPFQHGDKVKCLLDTDVLREMQEGHGGWNPRMAEFIGQTGTVHRITDRGDVRVQFNHETRWTFHPGALTKHHSFWVGDVVRVIGDLDTVKRLQAGHGEWTDDMAPALGRVGKVVKVFGDGNLRVAVAGQRWTFSPSCLVAYRPEEDANLDVAERARENKSSLSVALDKLRAQKSDPEHPGRLVVEVALGNAARALDLLRRRPEQVDTKNQGRTALQVAAYLGQVELIRLLLQARAGVDLPDDEGNTALHYAALGNQPEATRVLLSAGCRADAINSTQSTALHVAVQRGFLEVVRALCERGCDVNLPDAHSDTPLHSAISAGTGASGIVEVLTEVPNIDVTATNSQGFTLLHHASLKGHALAVRKILARARQLVDAKKEDGFTALHLAALNNHREVAQILIREGRCDVNVRNRKLQSPLHLAVQQAHVGLVPLLVDAGCSVNAEDEEGDTALHVALQRHQLLPLVADGAGGDPGPLQLLSRLQASGLPGSAELTVGAAVACFLALEGADVSYTNHRGRSPLDLAAEGRVLKALQGCAQRFRERQAGGGAAPGPRQTLGTPNTVTNLHVGAAPGPEAAECLVCSELALLVLFSPCQHRTVCEECARRMKKCIRCQVVVSKKLRPDGSEVASAAPAPGPPRQLVEELQSRYRQMEERITCPICIDSHIRLVFQCGHGACAPCGSALSACPICRQPIRDRIQIFV

SEQ ID NO: 7216 - protein, 1493 aa, Homo sapiens
MPNEGIPHSSQTQEQDCLQSQPVSNNEEMAIKQESGGDGEVEEYLSFRSVGDGLSTSAVGCASAAPRRGPALLHIDRHQIQAVEPSAQALELQGLGVDVYDQDVLEQGVLQQVDNAIHEASRASQLVDVEKEYRSVLDDLTSCTTSLRQINKIIEQLSPQAATSRDINRKLDSVKRQKYNKEQQLKKITAKQKHLQAILGGAEVKIELDHASLEEDAEPGPSSLGSMLMPVQETAWEELIRTGQMTPFGTQIPQKQEKKPRKIMLNEASGFEKYLADQAKLSFERKKQGCNKRAARKAPAPVTPPAPVQNKNKPNKKARVLSKKEERLKKHIKKLQKRALQFQGKVGLPKARRPWESDMRPEAEGDSEGEESEYFPTEEEEEEEDDEVEGAEADLSGDGTDYELKPLPKGGKRQKKVPVQEIDDDFFPSSGEEAEAASVGEGGGGGRKVGRYRDDGDEDYYKQRLRRWNKLRLQDKEKRLKLEDDSEESDAEFDEGFKVPGFLFKKLFKYQQTGVRWLWELHCQQAGGILGDEMGLGKTIQIIAFLAGLSYSKIRTRGSNYRFEGLGPTVIVCPTTVMHQWVKEFHTWWPPFRVAILHETGSYTHKKEKLIRDVAHCHGILITSYSYIRLMQDDISRYDWHYVILDEGHKIRNPNAAVTLACKQFRTPHRIILSGSPMQNNLRELWSLFDFIFPGKLGTLPVFMEQFSVPITMGGYSNASPVQVKTAYKCACVLRDTINPYLLRRMKSDVKMSLSLPDKNEQVLFCRLTDEQHKVYQNFVDSKEVYRILNGEMQIFSGLIALRKICNHPDLFSGGPKNLKGLPDDELEEDQFGYWKRSGKMIVVESLLKIWHKQGQRVLLFSQSRQMLDILEVFLRAQKYTYLKMDGTTTIASRQPLITRYNEDTSIFVFLLTTRVGGLGVNLTGANRVVIYDPDWNPSTDTQARERAWRIGQKKQVTVYRLLTAGTIEEKIYHRQIFKQFLTNRVLKDPKQRRFFKSNDLYELFTLTSPDASQSTETSAIFAGTGSDVQTPKCHLKRRIQPAFGADHDVPKRKKFPASNISVNDATSSEEKSEAKGAEVNAVTSNRSDPLKDDPHMSSNVTSNDRLGEETNAVSGPEELSVISGNGECSNSSGTGKTSMPSGDESIDEKLGLSYKRERPSQAQTEAFWENKQMENNFYKHKSKTKHHSVAEEETLEKHLRPKQKPKNSKHCRDAKFEGTRIPHLVKKRRYQKQDSENKSEAKEQSNDDYVLEKLFKKSVGVHSVMKHDAIMDGASPDYVLVEAEANRVAQDALKALRLSRQRCLGAVSGVPTWTGHRGISGAPAGKKSRFGKKRNSNFSVQHPSSTSPTEKCQDGIMKKEGKDNVPEHFSGRAEDADSSSGPLASSSLLAKMRARNHLILPERLESESGHLQEASALLPTTEHDDLLVEMRNFIAFQAHTDGQASTREILQEFESKLSASQSCVFRELLRNLCTFHRTSGGEGIWKLKPEYC

SEQ ID NO: 7217 - protein, 285 aa, Homo sapiens
MSEAGEEQPMETTGATENGHEAVPEGESPAGAGTGAAAGAGGATAAPPSGNQNGAEGDQINASKNEEDAGKMFVGGLSWDTSKKDLKDYFTKFGEVVDCTIKMDPNTGRSRGFGFILFKDAASVEKVLDQKEHRLDGRVIDPKKAMAMKKDPVKKIFVGGLNPEATEEKIREYFGEFGEIEAIELPMDPKLNKRRGFVFITFKEEEPVKKVLEKKFHTVSGSKCEIKVAQPKEVYQQQQYGSGGRGNRNRGNRGSGGGGGGGGQGSTNYGKSQRRGGHQNNYKPY

SEQ ID NO: 7218 - protein, 987 aa, Homo sapiens
MAAAAAVEAAAPMGALWGLVHDFVVGQQEGPADQVAADVKSGNYTVLQVVEALGSSLENPEPRTRARAIQLLSQVLLHCHTLLLEKEVVHLILFYENRLKDHHLVIPSVLQGLKALSLCVALPPGLAVSVLKAIFQEVHVQSLPQVDRHTVYNIITNFMRTREEGPFVEELFEVTSCYFPIDFTPPPNDPHGIQREDLILSLRAVLASTPRFAEFLLPLLIEKVDSEVLSAKLDSLQTLNACCAVYGQKELKDFLPSLWASIRREVFQTASERVEAEGLAALHSLTACLSRSVLRADAEDLLDSFLSNILQDCRHHLCEPDMKLVWPSAKLLQAAAGASARACDSVTSNVLPLLLEQFHKHSQSSQRRTILEMLLGFLKLQQKWSYEDKDQRPLNGFKDQLCSLVFMALTDPSTQLQLVGIRTLTVLGAQPDLLSYEDLELAVGHLYRLSFLKEDSQSCRVAALEASGTLAALYPVAFSSHLVPKLAEELRVGESNLTNGDEPTQCSRHLCCLQALSAVSTHPSIVKETLPLLLQHLWQVNRGNMVAQSSDVIAVCQSLRQMAEKCQQDPESCWYFHQTAIPCLLALAVQASMPEKEPSVLRKVLLEDEVLAAMVSVIGTATTHLSPELAAQSVTHIVPLFLDGNVSFLPENSFPSRFQPFQDGSSGQRRLIALLMAFVCSLPRNVEIPQLNQLMRELLELSCCHSCPFSSTAAAKCFAGLLNKHPAGQQLDEFLQLAVDKVEAGLGSGPCRSQAFTLLLWVTKALVLRYHPLSSCLTARLMGLLSDPELGPAAADGFSLLMSDCTDVLTRAGHAEVRIMFRQRFFTDNVPALVQGFHAAPQDVKPNYLKGLSHVLNRLPKPVLLPELPTLLSLLLEALSCPDCVVQLSTLSCLQPLLLEAPQVMSLHVDTLVTKFLNLSSSPSMAVRIAALQCMHALTRLPTPVLLPYKPQVIRALAKPLDDKKRLVRKEAVSARGEWFLLGSPGS

SEQ ID NO: 7219 - protein, 457 aa, Homo sapiens
MDSFKVVLEGPAPWGFRLQGGKDFNVPLSISRLTPGGKAAQAGVAVGDWVLSIDGENAGSLTHIEAQNKIRACGERLSLGLSRAQPVQSKPQKASAPAADPPRYTFAPSVSLNKTARPFGAPPPADSAPQQNGQPLRPLVPDASKQRLMENTEDWRPRPGTGQSRSFRILAHLTGTEFMQDPDEEHLKKSSQVPRTEAPAPASSTPQEPWPGPTAPSPTSRPPWAVDPAFAERYAPDKTSTVLTRHSQPATPTPLQSRTSIVQAAAGGVPGGGSNNGKTPVCHQCHKVIRGRYLVALGHAYHPEEFVCSQCGKVLEEGGFFEEKGAIFCPPCYDVRYAPSCAKCKKKITGEIMHALKMTWHVHCFTCAACKTPIRNRAFYMEEGVPYCERDYEKMFGTKCHGCDFKIDAGDRFLEALGFSWHDTCFVCAICQINLEGKTFYSKKDRPLCKSHAFSHV

SEQ ID NO: 7220 - protein, 662 aa, Homo sapiens
MNGDSRAAVVTSPPPTTAPHKERYFDRVDENNPEYLRERNMAPDLRQDFNMMEQKKRVSMILQSPAFCEELESMIQEQFKKGKNPTGLLALQQIADFMTTNVPNVYPAAPQGGMAALNMSLGMVTPVNDLRGSDSIAYDKGEKLLRCKLAAFYRLADLFGWSQLIYNHITTRVNSEQEHFLIVPFGLLYSEVTASSLVKINLQGDIVDRGSTNLGVNQAGFTLHSAIYAARPDVKCVVHIHTPAGAAVSAMKCGLLPISPEALSLGEVAYHDYHGILVDEEEKVLIQKNLGPKSKVLILRNHGLVSVGESVEEAFYYIHNLVVACEIQVRTLASAGGPDNLVLLNPEKYKAKSRSPGSPVGEGTGSPPKWQIGEQEFEALMRMLDNLGYRTGYPYRYPALREKSKKYSDVEVPASVTGYSFASDGDSGTCSPLRHSFQKQQREKTRWLNSGRGDEASEEGQNGSSPKSKTKWTKEDGHRTSTSAVPNLFVPLNTNPKEVQEMRNKIREQNLQDIKTAGPQSQVLCGVVMDRSLVQDAPLSDCTETIEGLELTEQTFSPAKSLSFRKGELVTASKAIIEKEYQPHVIVSTTGPNPFTTLTDRELEEYRREVERKQKGSEENLDEAREQKEKSPPDQPAVPHPPPSTPIKLEEGDGCAREYLLP

SEQ ID NO: 7221 - protein, 375 aa, Homo sapiens
MFSNANSRSKMWLLLTMASLISVLGTTHGLFGKLHPGSPEVTMNISQMITYWGYPNEEYEVVTEDGYILEVNRIPYGKKNSGNTDAGYDVWLGNSRGNTWARRNLYYSPDSVEFWAFSFDEMAKYDLPATIDFIVKKTGQKQLHYVGHSQGTTIGFIAFSTNPSLAKRIKTFYALAPVATVKYTKSLINKLRFVPQSLFKFIFGDKIFYPHNFFDQFLATEVCSREMLNLLCSNALFIICGFDSKNFNTSRLDVYLSHNPAGTSVQNMFHWTQAVKSGKFQAYDWGSPVQNRMHYDQSQPPYYNVTAMNVPIAVWNGGKDLLADPQDVGLLLPKLPNLIYHKEIPFYNHLDFIWAMDAPQEVYNDIVSMISEDKK

SEQ ID NO: 7222 - protein, 346 aa, Homo sapiens
MEEKYLPELMAEKDSLDPSFTHALRLVNQEIEKFQKGEGKDEEKYIDVVINKNMKLGQKVLIPVKQFPKFNFVGKLLGPRGNSLKRLQEETLTKMSILGKGSMRDKAKEEELRKSGEAKYFHLNDDLHVLIEVFAPPAEAYARMGHALEEIKKFLIPDYNDEIRQAQLQELTYLNGGSENADVPVVRGKPTLRTRGVPAPAITRGRGGVTARPVGVVVPRGTPTPRGVLSTRGPVSRGRGLLTPRARGVPPTGYRPPPPPPTQETYGEYDYDDGYGTAYDEQSYDSYDNSYSTPAQSGADYYDYGHGLSEETYDSYGQEEWTNSRHKAPSARTAKGVYRDQPYGRY

SEQ ID NO: 7223 - protein, 189 aa, Homo sapiens
MAALRYAGLDDTDSEDELPPGWEERTTKDGWVYYANHTEEKTQWEHPKTGKRKRVAGDLPYGWEQETDENGQVFFVDHINKRTTYLDPRLAFTVDDNPTKPTTRQRYDGSTTAMEILQGRDFTGKVVVVTGANSGIGFETAKSFALHGAHVILACRNMARASEAVSRILEEWKTKYHPPPEKCRIKIFH

SEQ ID NO: 7224 - protein, 630 aa, Homo sapiens
MDEMATTQISKDELDELKEAFAKVDLNSNGFICDYELHELFKEANMPLPGYKVREIIQKLMLDGDRNKDGKISFDEFVYIFQEVKSSDIAKTFRKAINRKEGICALGGTSELSSEGTQHSYSEEEKYAFVNWINKALENDPDCRHVIPMNPNTDDLFKAVGDGIVLCKMINLSVPDTIDERAINKKKLTPFIIQENLNLALNSASAIGCHVVNIGAEDLRAGKPHLVLGLLWQIIKIGLFADIELSRNEALAALLRDGETLEELMKLSPEELLLRWANFHLENSGWQKINNFSADIKDSKAYFHLLNQIAPKGQKEGEPRIDINMSGFNETDDLKRAESMLQQADKLGCRQFVTPADVVSGNPKLNLAFVANLFNKYPALTKPENQDIDWTLLEGETREERTFRNWMNSLGVNPHVNHLYADLQDALVILQLYERIKVPVDWSKVNKPPYPKLGANMKKLENCNYAVELGKHPAKFSLVGIGGQDLNDGNQTLTLALVWQLMRRYTLNVLEDLGDGQKANDDIIVNWVNRTLSEAGKSTSIQSFKDKTISSSLAVVDLIDAIQPGCINYDLVKSGNLTEDDKHNNAKYAVSMARRIGARVYALPEDLVEVKPKMVMTVFACLMGRGMKRV

SEQ ID NO: 7225 - protein, 291 aa, Homo sapiens
MDPSLLRERELFKKRALSTPVVEKRSASSESSSSSSKKKKTKVEHGGSSGSKQNSDHSNGSFNLKALSGSSGYKFGVLAKIVNYMKTRHQRGDTHPLTLDEILDETQHLDIGLKQKQWLMTEALVNNPKIEVIDGKYAFKPKYNVRDKKALLRLLDQHDQRGLGGILLEDIEEALPNSQKAVKALGDQILFVNRPDKKKILFFNDKSCQFSVDEEFQKLWRSVTVDSMDEEKIEEYLKRQGISSMQESGPKKVAPIQRRKKPASQKKRRFKTHNEHLAGVLKDYSDITSSK

SEQ ID NO: 7226 - protein, 406 aa, Homo sapiens
MSALGAVIALLLWGQLFAVDSGNDVTDIADDGCPKPPEIAHGYVEHSVRYQCKNYYKLRTEGDGVYTLNDKKQWINKAVGDKLPECEADDGCPKPPEIAHGYVEHSVRYQCKNYYKLRTEGDGVYTLNNEKQWINKAVGDKLPECEAVCGKPKNPANPVQRILGGHLDAKGSFPWQAKMVSHHNLTTGATLINEQWLLTTAKNLFLNHSENATAKDIAPTLTLYVGKKQLVEIEKVVLHPNYSQVDIGLIKLKQKVSVNERVMPICLPSKDYAEVGRVGYVSGWGRNANFKFTDHLKYVMLPVADQDQCIRHYEGSTVPEKKTPKSPVGVQPILNEHTFCAGMSKYQEDTCYGDAGSAFAVHDLEEDTWYATGILSFDKSCAVAEYGVYVKVTSIQDWVQKTIAEN

SEQ ID NO: 7227 - protein, 136 aa, Homo sapiens
MQTAGALFISPALIRCCTRGLIRPVSASFLNSPVNSSKQPSYSNFPLQVARREFQTSVVSRDIDTAAKFIGAGAATVGVAGSGAGIGTVFGSLIIGYARNPSLKQQLFSYAILGFALSEAMGLFCLMVAFLILFAM

SEQ ID NO: 7228 - protein, 194 aa, Homo sapiens
MKIWTSEHVFDHPWETVTTAAMQKYPNPMNPSVVGVDVLDRHIDPSGKLHSHRLLSTEWGLPSIVKSLIGAARTKTYVQEHSVVDPVEKTMELKSTNISFTNMVSVDERLIYKPHPQDPEKTVLTQEAIITVKGVSLSSYLEGLMASTISSNASKGREAMEWVIHKLNAEIEELTASARGTIRTPMAAAAFAEK

SEQ ID NO: 7229 - protein, 1105 aa, Homo sapiens
MLAYCVQDATVVDVEKRRNPSKHYVYIINVTWSDSTSQTIYRRYSKFFDLQMQLLDKFPIEGGQKDPKQRIIPFLPGKILFRRSHIRDVAVKRLKPIDEYCRALVRLPPHISQCDEVFRFFEARPEDVNPPKEDYGSSKRKSVWLSSWAESPKKDVTGADATAEPMILEQYVVVSNYKKQENSELSLQAGEVVDVIEKNESGWWFVSTSEEQGWVPATYLEAQNGTRDDSDINTSKTGEEEKYVTVQPYTSQSKDEIGFEKGVTVEVIRKNLEGWWYIRYLGKEGWAPASYLKKAKDDLPTRKKNLAGPVEIIGNIMEISNLLNKKASGDKETPPAEGEGHEAPIAKKEISLPILCNASNGSAVGVPDRTVSRLAQGSPAVARIAPQRAQISSPNLRTRPPPRRESSLGFQLPKPPEPPSVEVEYYTIAEFQSCISDGISFRGGQKAEVIDKNSGGWWYVQIGEKEGWAPASYIDKRKKPNLSRRTSTLTRPKVPPPAPPSKPKEAEEGPTGASESQDSPRKLKYEEPEYDIPAFGFDSEPELSEEPVEDRASGERRPAQPHRPSPASSLQRARFKVGESSEDVALEEETIYENEGFRPYAEDTLSARGSSGDSDSPGSSSLSLTRKNSPKSGSPKSSSLLKLKAEKNAQAEMGKNHSSASFSSSITINTTCCSSSSSSSSSLSKTSGDLKPRSASDAGIRGTPKVRAKKDADANAGLTSCPRAKPSVRPKPFLNRAESQSQEKMDISTLRRQLRPTGQLRGGLKGSKSEDSELPPQTASEAPSEGSRRSSSDLITLPATTPPCPTKKEWEGPATSYMTCSAYQKVQDSEISFPAGVEVQVLEKQESGWWYVRFGELEGWAPSHYLVLDENEQPDPSGKELDTVPAKGRQNEGKSDSLEKIERRVQALNTVNQSKKATPPIPSKPPGGFGKTSGTPAVKMRNGVRQVAVRPQSVFVSPPPKDNNLSCALRRNESLTATDGLRGVRRNSSFSTARSAAAEAKGRLAERAASQGSDSPLLPAQRNSIPVSPVRPKPIEKSQFIHNNLKDVYVSIADYEGDEETAGFQEGVSMEVLERNPNGWWYCQILDGVKPFKGWVPSNYLEKKN

SEQ ID NO: 7230 - protein, 500 aa, Homo sapiens
MEAEDIQEELTCPICLDYFQDPVSIECGHNFCRGCLHRNWAPGGGPFPCPECRHPSAPAALRPNWALARLTEKTQRRRLGPVPPGLCGRHWEPLRLFCEDDQRPVCLVCRESQEHQTHAMAPIDEAFESYRTGNFDIHVDEWKRRLIRLLLYHFKQEEKLLKSQRNLVAKMKKVMHLQDVEVKNATQWKDKIKSQRMRISTEFSKLHNFLVEEEDLFLQRLNKEEEETKKKLNENTLKLNQTIASLKKLILEVGEKSQAPTLELLQNPKEVLTRSEIQDVNYSLEAVKVKTVCQIPLMKEMLKRFQVAVNLAEDTAHPKLVFSQEGRYVKNTASASSWPVFSSAWNYFAGWRNPQKTAFVERFQHLPCVLGKNVFTSGKHYWEVESRDSLEVAVGVCREDVMGITDRSKMSPDVGIWAIYWSAAGYWPLIGFPGTPTQQEPALHRVGVYLDRGTGNVSFYSAVDGVHLHTFSCSSVSRLRPFFWLSPLASLVIPPVTDRK

SEQ ID NO: 7231 - protein, 839 aa, Homo sapiens
MRLALLWALGLLGAGSPLPSWPLPNIGGTEEQQAESEKAPREPLEPQVLQDDLPISLKKVLQTSLPEPLRIKLELDGDSHILELLQNRELVPGRPTLVWYQPDGTRVVSEGHTLENCCYQGRVRGYAGSWVSICTCSGLRGLVVLTPERSYTLEQGPGDLQGPPIISRIQDLHLPGHTCALSWRESVHTQKPPEHPLGQRHIRRRRDVVTETKTVELVIVADHSEAQKYRDFQHLLNRTLEVALLLDTFFRPLNVRVALVGLEAWTQRDLVEISPNPAVTLENFLHWRRAHLLPRLPHDSAQLVTGTSFSGPTVGMAIQNSICSPDFSGGVNMDHSTSILGVASSIAHELGHSLGLDHDLPGNSCPCPGPAPAKTCIMEASTDFLPGLNFSNCSRRALEKALLDGMGSCLFERLPSLPPMAAFCGNMFVEPGEQCDCGFLDDCVDPCCDSLTCQLRPGAQCASDGPCCQNCQLRPSGWQCRPTRGDCDLPEFCPGDSSQCPPDVSLGDGEPCAGGQAVCMHGRCASYAQQCQSLWGPGAQPAAPLCLQTANTRGNAFGSCGRNPSGSYVSCTPRDAICGQLQCQTGRTQPLLGSIRDLLWETIDVNGTELNCSWVHLDLGSDVAQPLLTLPGTACGPGLVCIDHRCQRVDLLGAQECRSKCHGHGVCDSNRHCYCEEGWAPPDCTTQLKATSSLTTGLLLSLLVLLVLVMLGASYWYRARLHQRLCQLKGPTCQYRAAQSGPSERPGPPQRALLARGTKQASALSFPAPPSRPLPPDPVSKRLQSQGPAKPPPPRKPLPADPQGRCPSGDLPGPGAGIPPLVVPSRPAPPPPTVSSLYL

SEQ ID NO: 7232 - protein, 454 aa, Homo sapiens [sequence omitted]

SEQ ID NO: 7233 - protein, 511 aa, Homo sapiens
MDEESLESALQTYRAQLQQVELALGAGLDSSEQADLRQLQGDLKELIELTEASLVSVRKSSLLAALDEERPGRQEDAEYQAFREAITEAVEAPAAARGSGSETVPKAEAGPESAAGGQEEEEGEDEEELSGTKVSAPYYSSWGTLEYHNAMVVGTEEAEDGSAGVRVLYLYPTHKSLKPCPFFLEGKCRFKENCRFSHGQVVSLDELRPFQDPDLSSLQAGSACLAKHQDGLWHAARITDVDNGYYTVKFDSLLLREAVVEGDGILPPLRTEATESDSDSDGTGDSSYARVVGSDAVDSGTCSSAFAGWEVHTRGIGSRLLTKMGYEFGKGLGRHAEGRVEPIHAVVLPRGKSLDQCVETLQKQTRVGKAGTNKPPRCRGRGARPGGRPAPRNVFDFLNEKLQGQAPGALEAGAAPAGRRSKDMYHASKSAKRALSLRLFQTEEKIERTQRDIRSIQEALARNAGRHSVASAQLQEKLAGAQRQLGQLRAQEAGLQQEQRKADTHKKMTEF

SEQ ID NO: 7234 - protein, 844 aa, Homo sapiens
MGPGAPFARVGWPLPLLVVMAAGVAPVWASHSPHLPRPHSRVPPHPSSERRAVYIGALFPMSGGWPGGQACQPAVEMALEDVNSRRDILPDYELKLIHHDSKCDPGQATKYLYELLYNDPIKIILMPGCSSVSTLVAEAARMWNLIVLSYGSSSPALSNRQRFPTFFRTHPSATLHNPTRVKLFEKWGWKKIATIQQTTEVFTSTLDDLEERVKEAGIEITFRQSFFSDPAVPVKNLKRQDARIIVGLFYETEARKVFCEVYKERLFGKKYVWFLIGWYADNWFKIYDPSINCTVDEMTEAVEGHITTEIVMLNPANTRSISNMTSQEFVEKLTKRLKRHPEETGGFQEAPLAYDAIWALALALNKTSGGGGRSGVRLEDFNYNNQTITDQIYRAMNSSSFEGVSGHVVFDASGSRMAWTLIEQLQGGSYKKIGYYDSTKDDLSWSKTDKWIGGSPPADQTLVIKTFRFLSQKLFISVSVLSSLGIVLAVVCLSFNIYNSHVRYIQNSQPNLNNLTAVGCSLALAAVFPLGLDGYHIGRNQFPFVCQARLWLLGLGFSLGYGSMFTKIWWVHTVFTKKEEKKEWRKTLEPWKLYATVGLLVGMDVLTLAIWQIVDPLHRTIETFAKEEPKEDIDVSILPQLEHCSSRKMNTWLGIFYGYKGLLLLLGIFLAYETKSVSTEKINDHRAVGMAIYNVAVLCLITAPVTMILSSQQDAAFAFASLAIVFSSYITLVVLFVPKMRRLITRGEWQSEAQDTMKTGSSTNNNEEEKSRLLEKENRELEKIIAEKEERVSELRHQLQSRQQLRSRRHPPTPPEPSGGLPRGPPEPPDRLSCDGSRVHLLYK

SEQ ID NO: 7235 - protein, 619 aa, Homo sapiens
MPQLNGGGGDDLGANDELISFKDEGEQEEKSSENSSAERDLADVKSSLVNESETNQNSSSDSEAERRPPPRSESFRDKSRESLEEAAKRQDGGLFKGPPYPGYPFIMIPDLTSPYLPNGSLSPTARTLHFQSGSTHYSAYKTIEHQIAVQYLQMKWPLLDVQAGSLQSRQALKDARSPSPAHIVSNKVPVVQHPHHVHPLTPLITYSNEHFTPGNPPPHLPADVDPKTGIPRPPHPPDISPYYPLSPGTVGQIPHPLGWLVPQQGQPVYPITTGGFRHPYPTALTVNASMSRFPPHMVPPHHTLHTTGIPHPAIVTPTVKQESSQSDVGSLHSSKHQDSKKEEEKKKPHIKKPLNAFMLYMKEMRAKVVAECTLKESAAINQILGRRWHALSREEQAKYYELARKERQLHMQLYPGWSARDNYGKKKKRKRDKQPGETNEHSECFLNPCLSLPPITDLSAPKKCRARFGLDQQNNWCGPCRRKKKCVRYIQGEGSCLSPPSSDGSLLDSPPPSPNLLGSPPRDAKSQTEQTQPLSLSLKPDPLAHLSMMPPPPALLLAEATHKASALCPNGALDLPPAALQPAAPSSSIAQPSTSSLHSHSSLAGTQPQPLSLVTKSLE

SEQ ID NO: 7236 - protein, 597 aa, Homo sapiens
MRVFLLCAYILLLMVSQLRAVSFPEDDEPLNTVDYHYSRQYPVFRGRPSGNESQHRLDFQLMLKIRDTLYIAGRDQVYTVNLNEMPKTEVIPNKKLTWRSRQQDRENCAMKGKHKDECHNFIKVFVPRNDEMVFVCGTNAFNPMCRYYRLSTLEYDGEEISGLARCPFDARQTNVALFADGKLYSATVADFLASDAVIYRSMGDGSALRTIKYDSKWIKEPHFLHAIEYGNYVYFFFREIAVEHNNLGKAVYSRVARICKNDMGGSQRVLEKHWTSFLKARLNCSVPGDSFFYFDVLQSITDIIQINGIPTVVGVFTTQLNSIPGSAVCAFSMDDIEKVFKGRFKEQKTPDSVWTAVPEDKVPKPRPGCCAKHGLAEAYKTSIDFPDETLSFIKSHPLMDSAVPPIADEPWFTKTRVRYRLTAISVDHSAGPYQNYTVIFVGSEAGMVLKVLAKTSPFSLNDSVLLEEIEAYNHAKCSAENEEDKKVISLQLDKDHHALYVAFSSCIIRIPLSRCERYGSCKKSCIASRDPYCGWLSQGSCGRVTPGMLAEGYEQDTEFGNTAHLGDCHDMEVSSSSVTTMVYDGKSSLESPTRWST

SEQ ID NO: 7237 - protein, 545 aa, Homo sapiens
MAEPSGSPVHVQLPQQAAPVTAAAAAAPAAATAAPAPAAPAAPAPAPAPAAQAVGWPICRDAYELQEVIGSGATAVVQAALCKPRQERVAIKRINLEKCQTSMDELLKEIQAMSQCSHPNVVTYYTSFVVKDELWLVMKLLSGGSMLDIIKYIVNRGEHKNGVLEEAIIATILKEVLEGLDYLHRNGQIHRDLKAGNILLGEDGSVQIADFGVSAFLATGGDVTRNKVRKTFVGTPCWMAPEVMEQVRGYDFKADMWSFGITAIELATGAAPYHKYPPMKVLMLTLQNDPPTLETGVEDKEMMKKYGKSFRKLLSLCLQKDPSKRPTAAELLKCKFFQKAKNREYLIEKLLTRTPDIAQRAKKVRRVPGSSGHLHKTEDGDWEWSDDEMDEKSEEGKAAFSQEKSRRVKEENPEIAVSASTIPEQIQSLSVHDSQGPPNANEDYREASSCAVNLVLRLRNSRKELNDIRFEFTPGRDTADGVSQELFSAGLVDGHDVVIVAANLQKIVDDPKALKTLTFKLASGCDGSEIPDEVKLIGFAQLSVS

SEQ ID NO: 7238 - protein, 2296 aa, Homo sapiens
MLRGPGPGLLLLAVQCLGTAVPSTGASKSKRQAQQMVQPQSPVAVSQSKPGCYDNGKHYQINQQWERTYLGNALVCTCYGGSRGFNCESKPEAEETCFDKYTGNTYRVGDTYERPKDSMIWDCTCIGAGRGRISCTIANRCHEGGQSYKIGDTWRRPHETGGYMLECVCLGNGKGEWTCKPIAEKCFDHAAGTSYVVGETWEKPYQGWMMVDCTCLGEGSGRITCTSRNRCNDQDTRTSYRIGDTWSKKDNRGNLLQCICTGNGRGEWKCERHTSVQTTSSGSGPFTDVRAAVYQPQPHPQPPPYGHCVTDSGVVYSVGMQWLKTQGNKQMLCTCLGNGVSCQETAVTQTYGGNSNGEPCVLPFTYNGRTFYSCTTEGRQDGHLWCSTTSNYEQDQKYSFCTDHTVLVQTRGGNSNGALCHFPFLYNNHNYTDCTSEGRRDNMKWCGTTQNYDADQKFGFCPMAAHEEICTTNEGVMYRIGDQWDKQHDMGHMMRCTCVGNGRGEWTCIAYSQLRDQCIVDDITYNVNDTFHKRHEEGHMLNCTCFGQGRGRWKCDPVDQCQDSETGTFYQIGDSWEKYVHGVRYQCYCYGRGIGEWHCQPLQTYPSSSGPVEVFITETPSQPNSHPIQWNAPQPSHISKYILRWRPKNSVGRWKEATIPGHLNSYTIKGLKPGVVYEGQLISIQQYGHQEVTRFDFTTTSTSTPVTSNTVTGETTPFSPLVATSESVTEITASSFVVSWVSASDTVSGFRVEYELSEEGDEPQYLDLPSTATSVNIPDLLPGRKYIVNVYQISEDGEQSLILSTSQTTAPDAPPDTTVDQVDDTSIVVRWSRPQAPITGYRIVYSPSVEGSSTELNLPETANSVTLSDLQPGVQYNITIYAVEENQESTPVVIQQETTGTPRSDTVPSPRDLQFVEVTDVKVTIMWTPPESAVTGYRVDVIPVNLPGEHGQRLPISRNTFAEVTGLSPGVTYYFKVFAVSHGRESKPLTAQQTTKLDAPTNLQFVNETDSTVLVRWTPPRAQITGYRLTVGLTRRGQPRQYNVGPSVSKYPLRNLQPASEYTVSLVAIKGNQESPKATGVFTTLQPGSSIPPYNTEVTETTIVITWTPAPRIGFKLGVRPSQGGEAPREVTSDSGSIVVSGLTPGVEYVYTIQVLRDGQERDAPIVNKVVTPLSPPTNLHLEANPDTGVLTVSWERSTTPDITGYRITTTPTNGQQGNSLEEVVHADQSSCTFDNLSPGLEYNVSVYTVKDDKESVPISDTIIPAVPPPTDLRFTNIGPDTMRVTWAPPPSIDLTNFLVRYSPVKNEEDVAELSISPSDNAVVLTNLLPGTEYVVSVSSVYEQHESTPLRGRQKTGLDSPTGIDFSDITANSFTVHWIAPRATITGYRIRHHPEHFSGRPREDRVPHSRNSITLTNLTPGTEYVVSIVALNGREESPLLIGQQSTVSDVPRDLEVVAATPTSLLISWDAPAVTVRYYRITYGETGGNSPVQEFTVPGSKSTATISGLKPGVDYTITVYAVTGRGDSPASSKPISINYRTEIDKPSQMQVTDVQDNSISVKWLPSSSPVTGYRVTTTPKNGPGPTKTKTAGPDQTEMTIEGLQPTVEYVVSVYAQNPSGESQPLVQTAVTTIPAPTDLKFTQVTPTSLSAQWTPPNVQLTGYRVRVTPKEKTGPMKEINLAPDSSSVVVSGLMVATKYEVSVYALKDTLTSRPAQGVVTTLENVSPPRRARVTDATETTITISWRTKTETITGFQVDAVPANGQTPIQRTIKPDVRSYTITGLQPGTDYKIYLYTLNDNARSSPVVIDASTAIDAPSNLRFLATTPNSLLVSWQPPRARITGYIIKYEKPGSPPREVVPRPRPGVTEATITGLEPGTEYTIYVIALKNNQKSEPLIGRKKTDELPQLVTLPHPNLHGPEILDVPSTVQKTPFVTHPGYDTGNGIQLPGTSGQQPSVGQQMIFEEHGFRRTTPPTTATPIRHRPRPYPPNVGEEIQIGHIPREDVDYHLYPHGPGLNPNASTGQEALSQTTISWAPFQDTSEYIISCHPVGTDEEPLQFRVPGTSTSATLTGLTRGATYNVIVEALKDQQRHKVREEVVTVGNSVNEGLNQPTDDSCFDPYTVSHYAVGDEWERMSESGFKLLCQCLGFGSGHFRCDSSRWCHDNGVNYKIGEKWDRQGENGQMMSCTCLGNGKGEFKCDPHEATCYDDGKTYHVGEQWQKEYLGAICSCTCFGGQRGWRCDNCRRPGGEPSPEGTTGQSYNQYSQRYHQRTNTNVNCPIECFMPLDVQADREDSRE

SEQ ID NO: 7239 - protein, 504 aa, Homo sapiens
MEPAGPAPGRLGPLLCLLLAASCAWSGVAGEEELQVIQPDKSVLVAAGETATLRCTATSLIPVGPIQWFRGAGPGRELIYNQKEGHFPRVTTVSDLTKRNNMDFSIRIGNITPADAGTYYCVKFRKGSPDDVEFKSGAGTELSVRAKPSAPVVSGPAARATPQHTVSFTCESHGFSPRDITLKWFKNGNELSDFQTNVDPVGESVSYSIHSTAKVVLTREDVHSQVICEVAHVTLQGDPLRGTANLSETIRVPPTLEVTQQPVRAENQVNVTCQVRKFYPQRLQLTWLENGNVSRTETASTVTENKDGTYNWMSWLLVNVSAHRDDVKLTCQVEHDGQPAVSKSHDLKVSAHPKEQGSNTAAENTGSNERNIYIVVGVVCTLLVALLMAALYLVRIRQKKAQGSTSSTRLHEPEKNAREITQDTNDITYADLNLPKGKKPAPQAAEPNNHTEYASIQTSPQPASEDTLTYADLDMVHLNRTPKQPAPKPEPSFSEYASVQVPRK

SEQ ID NO: 7240 - protein, 2548 aa, Homo sapiens
MNINDGGRRRFEDNEHTLRIYPGAISEGTIYCPIPARKNSTAAEVIESLINKLHLDKTKCYVLAEVKEFGGEEWILNPTDCPVQRMMLWPRMALENRLSGEDYRFLLREKNLDGSIHYGSLQSWLRVTEERRRMMERGFLPQPQQKDFDDLCSLPDLNEKTLLENLRNRFKHEKIYTYVGSILIVINPFKFLPIYNPKYVKMYDNHQLGKLEPHIYAVADVAYHAMLQRKKNQCIVISGESGSGKTQSTNFLIHHLTALSQKGFASGVEQIILGAGPVLEAFGNAKTAHNNNSSRFGKFIQVNYQETGTVLGAYVEKYLLEKSRLVYQEHNERNYHVFYYLLAGASEDERSAFHLKQPEEYHYLNQITKKPLRQSWDDYCYDSEPDCFTVEGEDLRHDFERLQLAMEMVGFLPKTRRQIFSLLSAILHLGNICYKKKTYRDDSIDICNPEVLPIVSELLEVKEEMLFEALVTRKTVTVGEKLILPYKLAEAVTVRNSMAKSLYSALFDWIVFRINHALLNSKDLEHNTKTLSIGVLDIFGFEDYENNSFEQFCINFANERLQHYFNQHIFKLEQEEYRTEGISWHNIDYIDNTCCINLISKKPTGLLHLLDEESNFPQATNQTLLDKFKHQHEDNSYIEFPAVMEPAFIIKHYAGKVKYGVKDFREKNTDHMRPDIVALLRSSKNAFISGMIGIDPVAVFRWAILRAFFRAMVAFREAGKRNIHRKTGHDDTAPCAILKSMDSFSFLQHPVHQRSLEILQRCKEEKYSITRKNPRTPLSDLQGMNALNEKNQHDTFDIAWNGRTGIRQSRLSSGTSLLDKDGIFANSTSSKLLERAHGILTRNKNFKSKPALPKHLLEVNSLKHLTRLTLQDRITKSLLHLHKKKKPPSISAQFQASLSKLMETLGQAEPYFVKCIRSNAEKLPLRFSDVLVLRQLRYTGMLETVRIRQSGYSSKYSFQDFVSHFHVLLPRNIIPSKFNIQDFFRKINLNPDNYQVGKTMVFLKEQERQHLQDLLHQEVLRRIILLQRWFRVLLCRQHFLHLRQASVIIQRFWRNYLNQKQVRDAAVQKDAFVMASAAALLQASWRAHLERQRYLELRAAAIVIQQKWRDYYRRRHMAAICIQARWKAYRESKRYQEQRKKIILLQSTCRGFRARQRFKALKEQRLRETKPEVGLVNIKGYGSLEIQGSDPSGWEDCSFDNRIKAIEECKSVIESNRISRESSVDCLKESPNKQQERAQSQSGVDLQEDVLVRERPRSLEDLHQKKVGRAKRESRRMRELEQAIFSLELLKVRSLGGISPSEDRRWSTELVPEGLQSPRGTPDSESSQGSLELLSYEESQKSKLESVISDEGDLQFPSPKISSSPKFDSRDNALSASNETSSAEHLKDGTMKEMVVCSSESITCKPQLKDSFISNSLPTFFYIPQQDPLKTNSQLDTSIQRNKLLENEDTAGEALTLDINRETRRYHCSGKDQIVPSLNTESSNPVLKKLEKLNTEKEERQKQLQQQNEKEMMEQIRQQTDILEKERKAFKTIEKPRIGECLVAPSSYQSKQRVERPSSLLSLNTSNKGELNVLGSLSLKDAALAQKDSSSAHLPPKDRPVTVFFERKGSPCQSSTVKELSKTDRMGTQLNVACKLSNNRISKREHFRPTQSYSHNSDDLSREGNARPIFFTPKDNMSIPLVSKEALNSKNPQLHKEDEPAWKPVKLAGPGQRETSQRFSSVDEQAKLHKTMSQGEITKLAVRQKASDSDIRPQRAKMRFWAKGKQGEKKTTRVKPTTQSEVSPLFAGTDVIPAHQFPDELAAYHPTPPLSPELPGSCRKEFKENKEPSPKAKRKRSVKISNVALDSMHWQNDSVQIIASVSDLKSMDEFLLKKVNDLDNEDSKKDTLVDVVFKKALKEFRQNIFSFYSSALAMDDGKSIRYKDLYALFEQILEKTMRLEQRDSLGESPVRVWVNTFKVFLDEYMNEFKTSDCTATKVPKTERKKRRKKETDLVEEHNGHIFKATQYSIPTYCEYCSSLIWIMDRASVCKLCKYACHKKCCLKTTAKCSKKYDPELSSRQFGVELSRLTSEDRTVPLVVEKLINYIEMHGLYTEGIYRKSGSTNKIKELRQGLDTDAESVNLDDYNIHVIASVFKQWLRDLPNPLMTFELYEEFLRAMGLQERKETIRGVYSVIDQLSRTHLNTLERLIFHLVRIALQEDTNRMSANALAIVFAPCILRCPDTTDPLQSVQDISKTTTCVELIVVEQMNKYKARLKDISSLEFAENKAKTRLSLIRRSMGKGRIRRGNYPGPSSPVVVRLPSVSDVSEETLTSEAAMETDITEQQQAAMQQEERVLTEQIENLQKEKEELTFEMLVLEPRASDDETLESEASIGTADSSENLNMESEYAISEKSERSLALSSLKTAGKSEPSSKLRKQLKKQQDSLDVVDSSVSSLCLSNTASSHGTRKLFQIYSKSPFYRAASGNEALGMEGPLGQTKFLEDKPQFISRGTFNPEKGKQKLKNVKNSPQKTKETPEGTVMSGRRKTVDPDCTSNQQLALFGNNEFMV

SEQ ID NO: 7241 - protein, 341 aa, Homo sapiens
MAQESPKNSAAEIPVTSNGEVDDSREHSFNRDLKHSLPSGLGLSETQITSHGFDNTKEGVIEAGAFQGGQRTQTKSGPVILADEIKNPAMEKLELVRKWSLNTYKCTRQIISEKLGRGSRTVDLELEAQIDILRDNKKKYENILKLAQTLSTQLFQMVHTQRQLGDAFADLSLKSLELHEEFGYNADTQKLLAKNGETLLGAINFFIASVNTLVNKTIEDTLMTVKQYESARIEYDAYRTDLEELNLGPRDANTLPKIEQSQHLFQAHKEKYDKMRNDVSVKLKFLEENKVKVLHNQLVLFHNAIAAYFAGNQKQLEQTLKQFHIKLKTPGVDAPSWLEEQ

SEQ ID NO: 7242 - protein, 667 aa, Homo sapiens
MHHQQRMAALGTDKELSDLLDFSAMFSPPVSSGKNGPTSLASGHFTGSNVEDRSSSGSWGNGGHPSPSRNYGDGTPYDHMTSRDLGSHDNLSPPFVNSRIQSKTERGSYSSYGRESNLQGCHQQSLLGGDMDMGNPGTLSPTKPGSQYYQYSSNNPRRRPLHSSAMEVQTKKVRKVPPGLPSSVYAPSASTADYNRDSPGYPSSKPATSTFPSSFFMQDGHHSSDPWSSSSGMNQPGYAGMLGNSSHIPQSSSYCSLHPHERLSYPSHSSADINSSLPPMSTFHRSGTNHYSTSSCTPPANGTDSIMANRGSGAAGSSQTGDALGKALASIYSPDHTNNSFSSNPSTPVGSPPSLSAGTAVWSRNGGQASSSPNYEGPLHSLQSRIEDRLERLDDAIHVLRNHAVGPSTAMPGGHGDMHGIIGPSHNGAMGGLGSGYGTGLLSANRHSLMVGTHREDGVALRGSHSLLPNQVPVPQLPVQSATSPDLNPPQDPYRGMPPGLQGQSVSSGSSEIKSDDEGDENLQDTKSSEDKKLDDDKKDIKSITSNNDDEDLTPEQKAEREKERRMANNARERLRVRDINEAFKELGRMVQLHLKSDKPQTKLLILHQAVAVILSLEQQVRERNLNPKAACLKRREEEKVSSEPPPLSLAGPHPGMGDASNHMGQM

SEQ ID NO: 7243 - protein, 462 aa, Homo sapiens
MLDFAIFAVTFLLALVGAVLYLYPASRQAAGIPGITPTEEKDGNLPDIVNSGSLHEFLVNLHERYGPVVSFWFGRRLVVSLGTVDVLKQHINPNKTSDPFETMLKSLLRYQSGGGSVSENHMRKKLYENGVTDSLKSNFALLLKLSEELLDKWLSYPETQHVPLSQHMLGFAMKSVTQMVMGSTFEDDQEVIRFQKNHGTVWSEIGKGFLDGSLDKNMTRKKQYEDALMQLESVLRNIIKERKGRNFSQHIFIDSLVQGNLNDQQILEDSMIFSLASCIITAKLCTWAICFLTTSEEVQKKLYEEINQVFGNGPVTPEKIEQLRYCQHVLCETVRTAKLTPVSAQLQDIEGKIDRFIIPRETLVLYALGVVLQDPNTWPSPHKFDPDRFDDELVMKTFSSLGFSGTQECPELRFAYMVTTVLLSVLVKRLHLLSVEGQVIETKYELVTSSREEAWITVSKRY

SEQ ID NO: 7244 - protein, 706 aa, Homo sapiens
MSSDASQGVITTPPPPSMPHKERYFDRINENDPEYIRERNMSPDLRQDFNMMEQRKRVTQILQSPAFREDLECLIQEQMKKGHNPTGLLALQQIADYIMANSFSGFSSPPLSLGMVTPINDLPGADTSSYVKGEKLTRCKLASLYRLVDLFGWAHLANTYISVRISKEQDHIIIIPRGLSFSEATASNLVKVNIIGEVVDQGSTNLKIDHTGFSPHAAIYSTRPDVKCVIHIHTLATAAVSSMKCGILPISQESLLLGDVAYYDYQGSLEEQEERIQLQKVLGPSCKVLVLRNHGVVALGETLEEAFHYIFNVQLACEIQVQALAGAGGVDNLHVLDFQKYKAFTYTVAASGGGGVNMGSHQKWKVGEIEFEGLMRTLDNLGYRTGYAYRHPLIREKPRHKSDVEIPATVTAFSFEDDTVPLSPLKYMAQRQQREKTRWLNSPNTYMKVNVPEESRNGETSPRTKITWMKAEDSSKVSGGTPIKIEDPNQFVPLNTNPNEVLEKRNKIREQNRYDLKTAGPQSQLLAGIVVDKPPSTMQFEDDDHGPPAPPNPFSHLTEGELEEYKRTIERKQQGLEDAEQELLSDDASSVSQIQSQTQSPQNVPEKLEENHELFSKSFISMEVPVMVVNGKDDMHDVEDELAKRVSRLSTSTTIENIEITIKSPEKIEEVLSPEGSPSKSPSKKKKKFRTPSFLKKNKKKEKVEA

SEQ ID NO: 7245 - protein, 1172 aa, Homo sapiens [sequence omitted]

SEQ ID NO: 7246 - protein, 729 aa, Homo sapiens
MSCCDLAAAGQLGKASIMASDCEPALNQAEGRNPTLERYLGALREAKNDSEQFAALLLVTKAVKAGDIDAKTRRRIFDAVGFTFPNRLLTTKEAPDGCPDHVLRALGVALLACFCSDPELAAHPQVLNKIPILSTFLTARGDPDDAARRSMIDDTYQCLTAVAGTPRGPRHLIAGGTVSALCQAYLGHGYGFDQALALLVGLLAAAETQCWKEAEPDLLAVLRGLSEDFQKAEDASKFELCQLLPLFLPPTTVPPECYRDLQAGLARILGSKLSSWQRNPALKLAARLAHACGSDWIPAGSSGSKFLALLVNLACVEVRLALEETGTEVKEDVVTACYALMELGIQECTRCEQSLLKEPQKVQLVSVMKEAIGAVIHYLLQVGSEKQKEPFVFASVRILGAWLAEETSSLRKEVCQLLPFLVRYAKTLYEEAEEANDLSQQVANLAISPTTPGPTWPGDALRLLLPGWCHLTVEDGPREILIKEGAPSLLCKYFLQQWELTSPGHDTSVLPDSVEIGLQTCCHIFLNLVVTAPGLIKRDACFTSLMNTLMTSLPALVQQQGRLLLAANVATLGLLMARLLSTSPALQGTPASRGFFAAAILFLSQSHVARATPGSDQAVLALSPEYEGIWADLQELWFLGMQAFTGCVPLLPWLAPAALRSRWPQELLQLLGSVSPNSVKPEMVAAYQGVLVELARANRLCREAMRLQAGEETASHYRMAALEQCLSEP

SEQ ID NO: 7247 - protein, 523 aa, Homo sapiens
MANVGLQFQASAGDSDPQSRPLLLLGQLHHLHRVPWSHVRGKLQPRVTEELWQAALSTLNPNPTDSCPLYLNYATVAALPCRVSRHNSPSAAHFITRLVRTCLPPGAHRCIVMVCEQPEVFASACALARAFPLFTHRSGASRRLEKKTVTVEFFLVGQDNGPVEVSTLQCLANATDGVRLAARIVDTPCNEMNTDTFLEEINKVGKELGIIPTIIRDEELKTRGFGGIYGVGKAALHPPALAVLSHTPDGATQTIAWVGKGIVYDTGGLSIKGKTTMPGMKRDCGGAAAVLGAFRAAIKQGFKDNLHAVFCLAENSVGPNATRPDDIHLLYSGKTVEINNTDAEGRLVLADGVSYACKDLGADIILDMATLTGAQGIATGKYHAAVLTNSAEWEAACVKAGRKCGDLVHPLVYCPELHFSEFTSAVADMKNSVADRDNSPSSCAGLFIASHIGFDWPGVWVHLDIAAPVHAGERATGFGVALLLALFGRASEDPLLNLVSPLGCEVDVEEGDLGRDSKRRRLV

SEQ ID NO: 7248 - protein, 1450 aa, Homo sapiens
MASLAALALSLLLRLQLPPLPGARAQSAAGGCSFDEHYSNCGYSVALGTNGFTWEQINTWEKPMLDQAVPTGSFMMVNSSGRASGQKAHLLLPTLKENDTHCIDFHYYFSSRDRSSPGALNVYVKVNGGPQGNPVWNVSGVVTEGWVKAELAISTFWPHFYQVIFESVSLKGHPGYIAVDEVRVLAHPCRKAPHFLRLQNVEVNVGQNATFQCIAGGKWSQHDKLWLQQWNGRDTALMVTRVVNHRRFSATVSVADTAQRSVSKYRCVIRSDGGSGVSNYAELIVKEPPTPIAPPELLAVGATYLWIKPNANSIIGDGPIILKEVEYRTTTGTWAETHIVDSPNYKLWHLDPDVEYEIRVLLTRPGEGGTGPPGPPLTTRTKCADPVHGPQNVEIVDIRARQLTLQWEPFGYAVTRCHSYNLTVQYQYVFNQQQYEAEEVIQTSSHYTLRGLRPFMTIRLRLLLSNPEGRMESEELVVQTEEDVPGAVPLESIQGGPFEEKIYIQWKPPNETNGVITLYEINYKAVGSLDPSADLSSQRGKVFKLRNETHHLFVGLYPGTTYSFTIKASTAKGFGPPVTTRIATKISAPSMPEYDTDTPLNETDTTITVMLKPAQSRGAPVSVYQLVVKEERLQKSRRAADIIECFSVPVSYRNASSLDSLHYFAAELKPANLPVTQPFTVGDNKTYNGYWNPPLSPLKSYSIYFQALSKANGETKINCVRLATKAPMGSAQVTPGTPLCLLTTGASTQNSNTVEPEKQVDNTVKMAGVIAGLLMFIIILLGVMLTIKRRKLAKKQKETQSGAQREMGPVASADKPTTKLSASRNDEGFSSSSQDVNGFTDGSRGELSQPTLTIQTHPYRTCDPVEMSYPRDQFQPAIRVADLLQHITQMKRGQGYGFKEEYEALPEGQTASWDTAKEDENRNKNRYGNIISYDHSRVRLLVLDGDPHSDYINANYIDGYHRPRHYIATQGPMQETVKDFWRMIWQENSASIVMVTNLVEVGRVKCVRYWPDDTEVYGDIKVTLIETEPLAEYVIRTFTVQKKGYHEIRELRLFHFTSWPDHGVPCYATGLLGFVRQVKFLNPPEAGPIVVHCSAGAGRTGCFIAIDTMLDMAENEGVVDIFNCVRELRAQRVNLVQTEEQYVFVHDAILEACLCGNTAIPVCEFRSLYYNISRLDPQTNSSQIKDEFQTLNIVTPRVRPEDCSIGLLPRNHDKNRSMDVLPLDRCLPFLISVDGESSNYINAALMDSHKQPAAFVVTQHPLPNTVADFWRLVFDYNCSSVVMLNEMDTAQFCMQYWPEKTSGCYGPIQVEFVSADIDEDIIHRIFRICNMARPQDGYRIVQHLQYIGWPAYRDTPPSKRSLLKVVRRLEKWQEQYDGREGRTVVHCLNGGGRSGTFCAICSVCEMIQQQNIIDVFHIVKTLRNNKSNMVETLEQYKFVYEVALEYLSSF

SEQ ID NO: 7249 - protein, 1768 aa, Homo sapiens
MSARAAAAKSTAMEETAIWEQHTVTLHRAPGFGFGIAISGGRDNPHFQSGETSIVISDVLKGGPAEGQLQENDRVAMVNGVSMDNVEHAFAVQQLRKSGKNAKITIRRKKKVQIPVSRPDPEPVSDNEEDSYDEEIHDPRSGRSGVVNRRSEKIWPRDRSASRERSLSPRSDRRSVASSQPAKPTKVTLVKSRKNEEYGLRLASHIFVKEISQDSLAARDGNIQEGDVVLKINGTVTENMSLTDAKTLIERSKGKLKMVVQRDERATLLNVPDLSDSIHSANASERDDISEIQSLASDHSGRSHDRPPRRSRSRSPDQRSEPSDHSRHSPQQPSNGSLRSRDEERISKPGAVSTPVKHADDHTPKTVEEVTVERNEKQTPSLPEPKPVYAQVGQPDVDLPVSPSDGVLPNSTHEDGILRPSMKLVKFRKGDSVGLRLAGGNDVGIFVAGVLEDSPAAKEGLEEGDQILRVNNVDFTNIIREEAVLFLLDLPKGEEVTILAQKKKDVYRRIVESDVGDSFYIRTHFEYEKESPYGLSFNKGEVFRVVDTLYNGKLGSWLAIRIGKNHKEVERGIIPNKNRAEQLASVQYTLPKTAGGDRADFWRFRGLRSSKRNLRKSREDLSAQPVQTKFPAYERVVLREAGFLRPVTIFGPIADVAREKLAREEPDIYQIAKSEPRDAGTDQRSSGIIRLHTIKQIIDQDKHALLDVTPNAVDRLNYAQWYPIVVFLNPDSKQGVKTMRMRLCPESRKSARKLYERSHKLRKNNHHLFTTTINLNSMNDGWYGALKEAIQQQQNQLVWVSEGKADGATSDDLDLHDDRLSYLSAPGSEYSMYSTDSRHTSDYEDTDTEGGAYTDQELDETLNDEVGTPPESAITRSSEPVREDSSGMHHENQTYPPYSPQAQPQPIHRIDSPGFKPASQQKAEASSPVPYLSPETNPASSTSAVNHNVNLTNVRLEEPTPAPSTSYSPQADSLRTPSTEAAHIMLRDQEPSLSSHVDPTKVYRKDPYPEEMMRQNHVLKQPAVSHPGHRPDKEPNLTYEPQLPYVEKQASRDLEQPTYRYESSSYTDQFSRNYEHRLRYEDRVPMYEEQWSYYDDKQPYPSRPPFDNQHSQDLDSRQHPEESSERGYFPRFEEPAPLSYDSRPRYEQAPRASALRHEEQPAPGYDTHGRLRPEAQPHPSAGPKPAESKQYFEQYSRSYEQVPPQGFTSRAGHFEPLHGAAAVPPLIPSSQHKPEALPSNTKPLPPPPTQTEEEEDPAMKPQSVLTRVKMFENKRSASLETKKDVNDTGSFKPPEVASKPSGAPIIGPKPTSQNQFSEHDKTLYRIPEPQKPQLKPPEDIVRSNHYDPEEDEEYYRKQLSYFDRRSFENKPPAHIAASHLSEPAKPAHSQNQSNFSSYSSKGKPPEADGVDRSFGEKRYEPIQATPPPPPLPSQYAQPSQPVTSASLHIHSKGAHGEGNSVSLDFQNSLVSKPDPPPSQNKPATFRPPNREDTAQAAFYPQKSFPDKAPVNGTEQTQKTVTPAYNRFTPKPYTSSARPFERKFESPKFNHNLLPSETAHKPDLSSKTPTSPKTLVKSHSLAQPPEFDSGVETFSIHAEKPKYQINNISTVPKAIPVSPSAVEEDEDEDGHTVVATARGIFNSNGGVLSSIETGVSIIIPQGAIPEGVEQEIYFKVCRDNSILPPLDKEKGETLLSPLVMCGPHGLKFLKPVELRLPHCASMTPDGWSFALKSSDSSSGDPKTWQNKCLPGDPNYLVGANCVSVLIDHF

SEQ ID NO: 7250 - protein, 739 aa, Homo sapiens
MDALKPPCLWRNHERGKKDRDSCGRKNSEPGSPHSLEALRDAAPSQGLNFLLLFTKMLFIFNFLFSPLPTPALICILTFGAAIFLWLITRPQPVLPLLDLNNQSVGIEGGARKGVSQKNNDLTSCCFSDAKTMYEVFQRGLAVSDNGPCLGYRKPNQPYRWLSYKQVSDRAEYLGSCLLHKGYKSSPDQFVGIFAQNRPEWIISELACYTYSMVAVPLYDTLGPEAIVHIVNKADIAMVICDTPQKALVLIGNVEKGFTPSLKVIILMDPFDDDLKQRGEKSGIEILSLYDAENLGKEHFRKPVPPSPEDLSVICFTSGTTGDPKGAMITHQNIVSNAAAFLKCVEHAYEPTPDDVAISYLPLAHMFERIVQAVVYSCGARVGFFQGDIRLLADDMKTLKPTLFPAVPRLLNRIYDKVQNEAKTPLKKFLLKLAVSSKFKELQKGIIRHDSFWDKLIFAKIQDSLGGRVRVIVTGAAPMSTSVMTFFRAAMGCQVYEAYGQTECTGGCTFTLPGDWTSGHVGVPLACNYVKLEDVADMNYFTVNNEGEVCIKGTNVFKGYLKDPEKTQEALDSDGWLHTGDIGRWLPNGTLKIIDRKKNIFKLAQGEYIAPEKIENIYNRSQPVLQIFVHGESLRSSLVGVVVPDTDVLPSFAAKLGVKGSFEELCQNQVVREAILEDLQKIGKESGLKTFEQVKAIFLHPEPFSIENGLLTPTLKAKRGELSKYFRTQIDSLYEHIQD

SEQ ID NO: 7251 - protein, 456 aa, Homo sapiens
MADGGSERADGRIVKMEVDYSATVDQRLPECAKLAKEGRLQEVIETLLSLEKQTRTASDMVSTSRILVAVVKMCYEAKEWDLLNENIMLLSKRRSQLKQAVAKMVQQCCTYVEEITDLPIKLRLIDTLRMVTEGKIYVEIERARLTKTLATIKEQNGDVKEAASILQELQVETYGSMEKKERVEFILEQMRLCLAVKDYIRTQIISKKINTKFFQEENTEKLKLKYYNLMIQLDQHEGSYLSICKHYRAIYDTPCIQAESEKWQQALKSVVLYVILAPFDNEQSDLVHRISGDKKLEEIPKYKDLLKLFTTMELMRWSTLVEDYGMELRKGSLESPATDVFGSTEEGEKRWKDLKNRVVEHNIRIMAKYYTRITMKRMAQLLDLSVDESEAFLSNLVVNKTIFAKVDRLAGIINFQRPKDPNNLLNDWSQKLNSLMSLVNKTTHLIAKEEMIHNLQ

SEQ ID NO: 7252 - protein, 699 aa, Homo sapiens
MSASASVGGPVPQPPPGPAAALPPGSAARALHVELPSQQRRLRHLRNIAARNIVNRNGHQLLDTYFTLHLCSTEKIYKEFYRSEVIKNSLNPTWRSLDFGIMPDRLDTSVSCFVVKIWGGKENIYQLLIEWKVCLDGLKYLGQQIHARNQNEIIFGLNDGYYGAPFEHKGYSNAQKTILLQVDQNCVRNSYDVFSLLRLHRAQCAIKQTQVTVQKIGKEIEEKLRLTSTSNELKKKSECLQLKILVLQNELERQKKALGREVALLHKQQIALQDKGSAFSAEHLKLQLQKESLNELRKECTAKRELFLKTNAQLTIRCRQLLSELSYIYPIDLNEHKDYFVCGVKLPNSEDFQAKDDGSIAVALGYTAHLVSMISFFLQVPLRYPIIHKGSRSTIKDNINDKLTEKEREFPLYPKGGEKLQFDYGVYLLNKNIAQLRYQHGLGTPDLRQTLPNLKNFMEHGLMVRCDRHHTSSAIPVPKRQSSIFGGADVGFSGGIPSPDKGHRKRASSENERLQYKTPPPSYNSALAQPVTTVPSMGETERKITSLSSSLDTSLDFSKENKKKGEDLVGSLNGGHANVHPSQEQGEALSGHRATVNGTLLPSEQAGSASVQLPGEFHPVSEAELCCTVEQAEEIIGLEATGFASGDQLEAFNCIPVDSAVAVECDEQVLGEFEEFSRRIYALNENVSSFRRPRRSSDK

SEQ ID NO: 7253 - protein, 211 aa, Homo sapiens
MQAIKCVVVGDGAVGKTCLLISYTTNAFPGEYIPTVFDNYSANVMVDGKPVNLGLWDTAGQEDYDRLRPLSYPQTVGETYGKDITSRGKDKPIADVFLICFSLVSPASFENVRAKWYPEVRHHCPNTPIILVGTKLDLRDDKDTIEKLKEKKLTPITYPQGLAMAKEIGAVKYLECSALTQRGLKTVFDEAIRAVLCPPPVKKRKRKCLLL

SEQ ID NO: 7254 - protein, 578 aa, Homo sapiens
MAFMEKPPAGKVLLDDTVPLTAAIEASQSLQSHTEYIIRVQRGISVENSWQIVRRYSDFDLLNNSLQIAGLSLPLPPKKLIGNMDREFIAERQKGLQNYLNVITTNHILSNCELVKKFLDPNNYSANYTEIALQQVSMFFRSEPKWEVVEPLKDIGWRIRKKYFLMKIKNQPKERLVLSWADLGPDKYLSDKDFQCLIKLLPSCLHPYIYRVTFATANESSALLIRMFNEKGTLKDLIYKAKPKDPFLKKYCNPKKIQGLELQQIKTYGRQILEVLKFLHDKGFPYGHLHASNVMLDGDTCRLLDLENSLLGLPSFYRSYFSQFRKINTLESVDVHCFGHLLYEMTYGRPPDSVPVDSFPPAPSMAVVAVLESTLSCEACKNGMPTISRLLQMPLFSDVLLTTSEKPQFKIPTKLKEALRIAKECIEKRLIEEQKQIHQHRRLTRAQSHHGSEEERKKRKILARKKSKRSALENSEEHSAKYSNSNNSAGSGASSPLTSPSSPTPPSTSGISALPPPPPPPPPPAAPLPPASTEAPAQLSSQAVNGMSRGALLSSIQNFQKGTLRKAKTCDHSAPKIG

SEQ ID NO: 7255 - protein, 980 aa, Homo sapiens
METAAAAAPGPGWAAEGERRRRRCSRRDRDREQRRRRGPGGDAPRALLAAPRGSSSSSSPPPPARPWSSASSGERPGGPRRRRPRPRPRPPRPRARKRPAGSGSRGEEEEEEEEEGGADDGEAEEEPEEEEEEEEDLIDGFAIASFATLEALQKDASLQPPERLEHRLKHSGKRKRGGSSGATGEPGDSSDREPGRPPGDRARKWPNKRRRKEASSRHSLEAGYICDAESDLDERVSDDDLDPSFTVSTSKASGPHGAFNGNCEAKLSVVPKVSGLERSQEQPPGPDPLLVPFPPKEPPPPPVPRPPVSPPAPLPATPSLPPPPQPQLQLRVSPFGLRTSPYGSSLDLSTGSSSRPPPKAPAPPVAQPPPSSSSSSSSSSSASSSSAQLTHRPPTPSLPLPLSTHSFPPPGLRPPPPPHHPSLFSPGPTLPPPPPLLQVPGHPGASAANALSEQDLIGQDLNSRYLNAQGGPEVVGAGGSARPLAFQFHQHNHQHQHTHQHTHQHFTPYPPGLLPPHGPHMFEKYPGKMEGLFRHNPYTAFPPAVPGLPPGLPPAVSFGSLQGAFQPKSTNPELPPRLGPVPSGLSQKGTQIPDHFRPPLRKPGKWCAMHVRVAYMILRHQEKMKGDSHKLDFRNDLLPCLPGPYGALPPGQELSHPASLFTATGAVHAAANPFTAAPGAHGPFLSPSTHIDPFGRPTSFASLAALSNGAFGGLGSPTFNSGAVFAQKESPGAPPAFASPPDPWGRLHRSPLTFPAWVRPPEAARTPGSDKERPVERREPSITKEEKDRDLPFSRPQLRVSPATPKARAGEEGPRPTKESVRVKEERKEEAAAAAAAAAAAAAAAAAAATGPQGLHLLFERPRPPPFLGPSPPDRCAGFLEPTWLAAPPRLARPPRFYEAGEELTGPGAVAAARLYGLEPAHPLLYSRLAPPPPPAAAPGTPHLLSKTPPGALLGAPPPLVPAPRPSSPPRGPGPARADR

SEQ ID NO: 7256 - protein, 2818 aa, Homo sapiens
MAAHRPVEWVQAVVSRFDEQLPIKTGQQNTHTKVSTEHNKECLINISKYKFSLVISGLTTILKNVNNMRIFGEAAEKNLYLSQLIILDTLEKCLAGQPKDTMRLDETMLVKQLLPEICHFLHTCREGNQHAAELRNSASGVLFSLSCNNFNAVFSRISTRLQELTVCSEDNVDVHDIELLQYINVDCAKLKRLLKETAFKFKALKKVAQLAVINSLEKAFWNWVENYPDEFTKLYQIPQTDMAECAEKLFDLVDGFAESTKRKAAVWPLQIILLILCPEIIQDISKDVVDENNMNKKLFLDSLRKALAGHGGSRQLTESAAIACVKLCKASTYINWEDNSVIFLLVQSMVVDLKNLLFNPSKPFSRGSQPADVDLMIDCLVSCFRISPHNNQHFKICLAQNSPSTFHYVLVNSLHRIITNSALDWWPKIDAVYCHSVELRNMFGETLHKAVQGCGAHPAIRMAPSLTFKEKVTSLKFKEKPTDLETRSYKYLLLSMVKLIHADPKLLLCNPRKQGPETQGSTAELITGLVQLVPQSHMPEIAQEAMEALLVLHQLDSIDLWNPDAPVETFWEISSQMLFYICKKLTSHQMLSSTEILKWLREILICRNKFLLKNKQADRSSCHFLLFYGVGCDIPSSGNTSQMSMDHEELLRTPGASLRKGKGNSSMDSAAGCSGTPPICRQAQTKLEVALYMFLWNPDTEAVLVAMSCFRHLCEEADIRCGVDEVSVHNLLPNYNTFMEFASVSNMMSTGRAALQKRVMALLRRIEHPTAGNTEAWEDTHAKWEQATKLILNYPKAKMEDGQAAESLHKTIVKRRMSHVSGGGSIDLSDTDSLQEWINMTGFLCALGGVCLQQRSNSGLATYSPPMGPVSERKGSMISVMSSEGNADTPVSKFMDRLLSLMVCNHEKVGLQIRTNVKDLVGLELSPALYPMLFNKLKNTISKFFDSQGQVLLTDTNTQFVEQTIAIMKNLLDNHTEGSSEHLGQASIETMMLNLVRYVRVLGNMVHAIQIKTKLCQLVEVMMARRDDLSFCQEMKFRNKMVEYLTDWVMGTSNQAADDDVKCLTRDLDQASMEAVVSLLAGLPLQPEEGDGVELMEAKSQLFLKYFTLFMNLLNDCSEVEDESAQTGGRKRGMSRRLASLRHCTVLAMSNLLNANVDSGLMHSIGLGYHKDLQTRATFMEVLTKILQQGTEFDTLAETVLADRFERLVELVTMMGDQGELPIAMALANVVPCSQWDELARVLVTLFDSRHLLYQLLWNMFSKEVELADSMQTLFRGNSLASKIMTFCFKVYGATYLQKLLDPLLRIVITSSDWQHVSFEVDPTRLEPSESLEENQRNLLQMTEKFFHAIISSSSEFPPQLRSVCHCLYQVVSQRFPQNSIGAVGSAMFLRFINPAIVSPYEAGILDKKPPPRIERGLKLMSKILQSIANHVLFTKEEHMRPFNDFVKSNFDAARRFFLDIASDCPTSDAVNHSLSFISDGNVLALHRLLWNNQEKIGQYLSSNRDHKAVGRRPFDKMATLLAYLGPPEHKPVADTHWSSLNLTSSKFEEFMTRHQVHEKEEFKALKTLSIFYQAGTSKAGNPIFYYVARRFKTGQINGDLLIYHVLLTLKPYYAKPYEIVVDLTHTGPSNRFKTDFLSKWFVVFPGFAYDNVSAVYIYNCNSWVREYTKYHERLLTGLKGSKRLVFIDCPGKLAEHIEHEQQKLPAATLALEEDLKVFHNALKLAHKDTKVSIKVGSTAVQVTSAERTKVLGQSVFLNDIYYASEIEEICLVDENQFTLTIANQGTPLTFMHQECEAIVQSIIHIRTRWELSQPDSIPQHTKIRPKDVPGTLLNIALLNLGSSDPSLRSAAYNLLCALTCTFNLKIEGQLLETSGLCIPANNTLFIVSISKTLAANEPHLTLEFLEECISGFSKSSIELKHLCLEYMTPWLSNLVRFCKHNDDAKRQRVTAILDKLITMTINEKQMYPSIQAKIWGSLGQITDLLDVVLDSFIKTSATGGLGSIKAEVMADTAVALASGNVKLVSSKVIGRMCKIIDKTCLSPTPTLEQHLMWDDIAILARYMLMLSFNNSLDVAAHLPYLFHVVTFLVATGPLSLRASTHGLVINIIHSLCTCSQLHFSEETKQVLRLSLTEFSLPKFYLLFGISKVKSAAVIAFRSSYRDRSFSPGSYERETFALTSLETVTEALLEIMEACMRDIPTCKWLDQWTELAQRFAFQYNPSLQPRALVVFGCISKRVSHGQIKQIIRILSKALESCLKGPDTYNSQVLIEATVIALTKLQPLLNKDSPLHKALFWVAVAVLQLDEVNLYSAGTALLEQNLHTLDSLRIFNDKSPEEVFMAIRNPLEWHCKQMDHFVGLNFNSNFNFALVGHLLKGYRHPSPAIVARTVRILHTLLTLVNKHRNCDKFEVNTQSVAYLAALLTVSEEVRSRCSLKHRKSLLLTDISMENVPMDTYPIHHGDPSYRTLKETQPWSSPKGSEGYLAATYPTVGQTSPRARKSMSLDMGQPSQANTKKLLGTRKSFDHLISDTKAPKRQEMESGITTPPKMRRVAETDYEMETQRISSSQQHPHLRKVSVSESNVLLDEEVLTDPKIQALLLTVLATLVKYTTDEFDQRILYEYLAEASVVFPKVFPVVHNLLDSKINTLLSLCQDPNLLNPIHGIVQSVVYHEESPPQYQTSYLQSFGFNGLWRFAGPFSKQTQIPDYAELIVKFLDALIDTYLPGIDEETSEESLLTPTSPYPPALQSQLSITANLNLSNSMTSLATSQHSPGIDKENVELSPTTGHCNSGRTRHGSASQVQKQRSAGSFKRNSIKKIV

SEQ ID NO: 7257 - protein, 2109 aa, Homo sapiens
MDALESLLDEVALEGLDGLCLPALWSRLETRVPPFPLPLEPCTQEFLWRALATHPGISFYEEPRERPDLQLQDRYEEIDLETGILESRRDPVALEDVYPIHMILENKDGIQGSCRYFKERKNITNDIRTKSLQPRCTMVEAFDRWGKKLIIVASQAMRYRALIGQEGDPDLKLPDFSYCILERLGRSRWQGELQRDLHTTAFKVDAGKLHYHRKILNKNGLITMQSHVIRLPTGAQQHSILLLLNRFHVDRRSKYDILMEKLSVMLSTRTNHIETLGKLREELGLCERTFKRLYQYMLNAGLAKVVSLRLQEIHPECGPCKTKKGTDVMVRCLKLLKEFKRNDHDDDEDEEVISKTVPPVDIVFERDMLTQTYDLIERRGTKGISQAEIRVAMNVGKLEARMLCRLLQRFKVVKGFMEDEGRQRTTKYISCVFAEESDLSRQYQREKARSELLTTVSLASMQEESLLPEGEDTFLSESDSEEERSSSKRRGRGSQKDTRASANLRPKTQPHHSTPTKGGWKVVNLHPLKKQPPSFPGAAEERACQSLASRDSLLDTSSVSEPNVSFVSHCADSNSGDIAVIEEVRMENPKESSSSLKTGRHSSGQDKPHETYRLLKRRNLIIEAVTNLRLIESLFTIQKMIMDQEKQEGVSTKCCKKSIVRLVRNLSEEGLLRLYRTTVIQDGIKKKVDLVVHPSMDQNDPLVRSAIEQVRFRISNSSTANRVKTSQPPVPQGEAEEDSQGKEGPSGSGDSQLSASSRSESGRMKKSDNKMGITPLRNYHPIVVPGLGRSLGFLPKMPRLRVVHMFLWYLIYGHPASNTVEKPSFISERRTIKQESGRAGVRPSSSGSAWEACSEAPSKGSQDGVTWEAEVELATETVYVDDASWMRYIPPIPVHRDFGFGWALVSDILLCLPLSIFIQIVQVSYKVDNLEEFLNDPLKKHTLIRFLPRPIRQQLLYKRRYIFSVVENLQRLCYMGLLQFGPTEKFQDKDQVFIFLKKNAVIVDTTICDPHYNLARSSRPFERRLYVLNSMQDVENYWFDLQCVCLNTPLGVVRCPRVRKNSSTDQGSDEEGSLQKEQESAMDKHNLERKCAMLEYTTGSREVVDEGLIPGDGLGAAGLDSSFYGHLKRNWIWTSYIINQAKKENTAAENGLTVRLQTFLSKRPMPLSARGNSRLNIWGEARVGSELCAGWEEQFEVDREPSLDRNRRVRGGKSQKRKRLKKDPGKKIKRKKKGEFPGEKSKRLRYHDEADQSALQRMTRLRVTWSMQEDGLLVLCRIASNVLNTKVKGPFVTWQVVRDILHATFEESLDKTSHSVGRRARYIVKNPQAYLNYKVCLAEVYQDKALVGDFMNRRGDYDDPKVCANEFKEFVEKLKEKFSSALRNSNLEIPDTLQELFARYRVLAIGDEKDQTRKEDELNSVDDIHFLVLQNLIQSTLALSDSQMKSYQSFQTFRLYREYKDHVLVKAFMECQKRSLVNRRRVNHTLGPKKNRALPFVPMSYQLSQTYYRIFTWRFPSTICTESFQFLDRMRAAGKLDQPDRFSFKDQDNNEPTNDMVAFSLDGPGGNCVAVLTLFSLGLISVDVRIPEQIIVVDSSMVENEVIKSLGKDGSLEDDEDEEDDLDEGVGGKRRSMEVKPAQASHTNYLLMRGYYSPGIVSTRNLNPNDSIVVNSCQMKFQLRCTPVPARLRPAAAPLEELTMGTSCLPDTFTKLINPQENTCSLEEFVLQLELSGYSPEDLTAALEILEAIIATGCFGIDKEELRRRFSALEKAGGGRTRTFADCIQALLEQHQVLEVGGNTARLVAMGSAWPWLLHSVRLKDREDADIQREDPQARPLEGSSSEDSPPEGQAPPSHSPRGTKRRASWASENGETDAEGTQMTPAKRPALQDSNLAPSLGPGAEDGAEAQAPSPPPALEDTAAAGAAQEDQEGVGEFSSPGQEQLSGQAQPPEGSEDPRGFTESFGAANISQAARERDCESVCFIGRPWRVVDGHLNLPVCKGMMEAMLYHIMTRPGIPESSLLRHYQGVLQPVAVLELLQGLESLGCIRKRWLRKPRPVSLFSTPVVEEVEVPSSLDESPMAFYEPTLDCTLRLGRVFPHEVNWNKWIHL

SEQ ID NO: 7258 - protein, 390 aa, Homo sapiens
MDSYSAPESTPSASSRPEDYFIGATPLQKRLESVRKQSSFILTPPRRKIPQCSQLQEDVDPQKVAFLLHKQWTLYSLTPLYKFSYSNLKEYSRLLNAFIVAEKQKGLAVEVGEDFNIKVIFSTLLGMKGTQRDPEAFLVQGLILSPRLEYSGTILVDCNLCLLGSSDPSTLAFQVAGTAGACHHTRIVSKSQLPSENREGKVLWTGWFCCVFGDSLLETVSEDFTCLPLFLANGAESNTAIIGTWFQKTFDCYFSPLAINAFNLSWMAAMWTACKMDHYVATTEFLWSVPCSPQSLDISFAIHPEDAKALWDSVHKTPGEVTQEEVDLFMDCLYSHFHRHFKIHLSATRLVRVSTSVASAHTDGKIKILCHKYLIGVLAYLTELAIFQIE

SEQ ID NO: 7259 - protein, 733 aa, Homo sapiens
MWSWKCLLFWAVLVTATLCTARPSPTLPEQDALPSSEDDDDDDDSSSEEKETDNTKPNRMPVAPYWTSPEKMEKKLHAVPAAKTVKFKCPSSGTPNPTLRWLKNGKEFKPDHRIGGYKVRYATWSIIMDSVVPSDKGNYTCIVENEYGSINHTYQLDVVERSPHRPILQAGLPANKTVALGSNVEFMCKVYSDPQPHIQWLKHIEVNGSKIGPDNLPYVQILKTAGVNTTDKEMEVLHLRNVSFEDAGEYTCLAGNSIGLSHHSAWLTVLEALEERPAVMTSPLYLEIIIYCTGAFLISCMVGSVIVYKMKSGTKKSDFHSQMAVHKLAKSIPLRRQVTVSADSSASMNSGVLLVRPSRLSSSGTPMLAGVSEYELPEDPRWELPRDRLVLGKPLGEGCFGQVVLAEAIGLDKDKPNRVTKVAVKMLKSDATEKDLSDLISEMEMMKMIGKHKNIINLLGACTQDGPLYVIVEYASKGNLREYLQARRPPGLEYCYNPSHNPEEQLSSKDLVSCAYQVARGMEYLASKKCIHRDLAARNVLVTEDNVMKIADFGLARDIHHIDYYKKTTNGRLPVKWMAPEALFDRIYTHQSDVWSFGVLLWEIFTLGGSPYPGVPVEELFKLLKEGHRMDKPSNCTNELYMMMRDCWHAVPSQRPTFKQLVEDLDRIVALTSNQEYLDLSMPLDQYSPSFPDTRSSTCSSGEDSVFSHEPLPEEPCLPRHPAQLANGGLKRR

SEQ ID NO: 7260 - protein, 614 aa, Homo sapiens
MNKLNFHNNRVMQDRRSVCIFLPNDESLNIIINVKILCHQLLVQVCDLLRLKDCHLFGLSVIQNNEHVYMELSQKLYKYCPKEWKKEASKGIDQFGPPMIIHFRVQYYVENGRLISDRAARYYYYWHLRKQVLHSQCVLREEAYFLLAAFALQADLGNFKRNKHYGKYFEPEAYFPSWVVSKRGKDYILKHIPNMHKDQFALTASEAHLKYIKEAVRLDDVAVHYYRLYKDKREIEASLTLGLTMRGIQIFQNLDEEKQLLYDFPWTNVGKLVFVGKKFEILPDGLPSARKLIYYTGCPMRSRHLLQLLSNSHRLYMNLQPVLRHIRKLEENEEKKQYRESYISDNLDLDMDQLEKRSRASGSSAGSMKHKRLSRHSTASHSSSHTSGIEADTKPRDTGPEDSYSSSAIHRKLKTCSSMTSHGSSHTSGVESGGKDRLEEDLQDDEIEMLVDDPRDLEQMNEESLEVSPDMCIYITEDMLMSRKLNGHSGLIVKEIGSSTSSSSETVVKLRGQSTDSLPQTICRKPKTSTDRHSLSLDDIRLYQKDFLRIAGLCQDTAQSYTFGCGHELDEEGLYCNSCLAQQCINIQDAFPVKRTSKYFSLDLTHDEVPEFVV

SEQ ID NO: 7261 - protein, 620 aa, Homo sapiens
MNLERLRKRVRQYLDQQQYQSALFWADKVASLSREEPQDIYWLAQCLYLTAQYHRAAHALRSRKLDKLYEACRYLAARCHYAAKEHQQALDVLDMEEPINKRLFEKYLKDESGFKDPSSDWEMSQSSIKSSICLLRGKIYDALDNRTLATYSYKEALKLDVYCFEAFDLLTSHHMLTAQEEKELLESLPLSKLCNEEQELLRFLFENKLKKYNKPSETVIPESVDGLQENLDVVVSLAERHYYNCDFKMCYKLTSVVMEKDPFHASCLPVHIGTLVELNKANELFYLSHKLVDLYPSNPVSWFAVGCYYLMVGHKNEHARRYLSKATTLEKTYGPAWIAYGHSFAVESEHDQAMAAYFTAAQLMKGCHLPMLYIGLEYGLTNNSKLAERFFSQALSIAPEDPFVMHEVGVVAFQNGEWKTAEKWFLDALEKIKAIGNEVTVDKWEPLLNNLGHVCRKLKKYAEALDYHRQALVLIPQNASTYSAIGYIHSLMGNFENAVDYFHTALGLRRDDTFSVTMLGHCIEMYIGDSEAYIGADIKDKLKCYDFDVHTMKTLKNIISPPWDFREFEVEKQTAEETGLTPLETSRKTPDSRPSLEETFEIEMNESDMMLETSMSDHST

SEQ ID NO: 7262 - protein, 704 aa, Homo sapiens
MVSWGRFICLVVVTMATLSLARPSFSLVEDTTLEPEGAPYWTNTEKMEKRLHAVPAANTVKFRCPAGGNPMPTMRWLKNGKEFKQEHRIGGYKVRNQHWSLIMESVVPSDKGNYTCVVENEYGSINHTYHLDVVERSPHRPILQAGLPANASTVVGGDVEFVCKVYSDAQPHIQWIKHVEKNGSKYGPDGLPYLKVLKAAGVNTTDKEIEVLYIRNVTFEDAGEYTCLAGNSIGISFHSAWLTVLPAPGREKEITASPDYLEIAIYCIGVFLIACMVVTVILCRMKNTTKKPDFSSQPAVHKLTKRIPLRRQVSAESSSSMNSNTPLVRITTRLSSTADTPMLAGVSEYELPEDPKWEFPRDKLTLGKPLGEGCFGQVVMAEAVGIDKDKPKEAVTVAVKMLKDDATEKDLSDLVSEMEMMKMIGKHKNIINLLGACTQDGPLYVIVEYASKGNLREYLRARRPPGMEYSYDINRVPEEQMTFKDLVSCTYQLARGMEYLASQKCIHRDLAARNVLVTENNVMKIADFGLARDINNIDYYKKTTNGRLPVKWMAPEALFDRVYTHQSDVWSFGVLMWEIFTLGGSPYPGIPVEELFKLLKEGHRMDKPANCTNELYMMMRDCWHAVPSQRPTFKQLVEDLDRILTLTTNEEYLDLSQPLEQYSPSYPDTRSSCSSGDDSVFSPDPMPYEPCLPQYPHINGSVKT

SEQ ID NO: 7263 - protein, 1227 aa, Homo sapiens
MAAVLESLLREEVSVAAVVRWIARSTQGSEDNAGEAAALSSLRALRKEFVPFLLNFLREQSSRVLPQGPPTPAKTPGASAALPGRPGGPPRGSRGARSQLFPPTEAQSTAAEAPLARRGGRRRGPGPARERGGRGLEEGVSGESLPGAGGRRLRGSGSPSRPSLTLSDPPNLSNLEEFPPVGSVPPGPTGTKPSRRINPTPVSEERSLSKPKTCFTSPPISCVPSSQPSALDTSPWGLGLPPGCRSLQEEREMLRKERSKQLQQSPTPTCPTPELGSPLPSRTGSLTDEPADPARVSSRQRLELVALVYSSCIAENLVPNLFLELFFVFQLLTARRMVTAKDSDPELSPAVLDSLESPLFQSIHDCVFFAVQVLECHFQVLSNLDKGTLKLLAENERLLCFSPALQGRLRAAYEGSVAKVSLVMPPSTQAVSFQPETDNRANFSSDRAFHTFKKQRDVFYEVLREWEDHHEEPGWDFEKGLGSRIRAMMGQLSAACSHSHFVRLFQKQLLQMCQSPGGAGGTVLGEAPDVLSMLGADKLGRLWRLQERLMAPQSSGGPCPPPTFPGCQGFFRDFILSASSFQFNQHLMDSLSLKIQELNGLALPQHEPNDEDGESDVDWQGERKQFAVVLLSLRLLAKFLGFVAFLPYRGPEPPPTGELQDSILALRSQVPPVLDVRTLLQRGLQARRAVLTVPWLVEFLSFADHVVPLLEYYRDIFTLLLRLHRSLVLSQESEGKMCFLNKLLLLAVLGWLFQIPTVPEDLFFLEEGPSYAFEVDTVAPEHGLDNAPVVDQQLLYTCCPYIGELRKLLASWVSGSSGRSGGFMRKITPTTTTSLGAQPSQTSQGLQAQLAQAFFHNQPPSLRRTVEFVAERIGSNCVKHIKATLVADLVRQAESLLQEQLVTQGEEGGDPAQLLEILCSQLCPHGAQALALGREFCQRKSPGAVRALLPEETPAAVLSSAENIAVGLATEKACAWLSANITALIRREVKAAVSRTLRAQGPEPAARGERRGCSRACEHHAPLPSHLISEIKDVLSLAVGPRDPDEGVSPEHLEQLLGQLGQTLRCRQFLCPPAEQHLAKCSVELASLLVADQIPILGPPAQYRLERGQARRLLHMLLSLWKEDFQGPVPLQLLLSPRNVGLLADTRPREWDLLLFLLRELVEKGLMGRMEIEACLGSLHQAQWPGDFAEELATLSNLFLAEPHLPEPQLRACELVQPNRGTVLAQS

SEQ ID NO: 7264 - protein, 404 aa, Homo sapiens
MAESVERLQQRVQELERELAQERSLQVPRSGDGGGGRVRIEKMSSEVVDSNPYSRLMALKRMGIVSDYEKIRTFAVAIVGVGGVGSVTAEMLTRCGIGKLLLFDYDKVELANMNRLFFQPHQAGLSKVQAAEHTLRNINPDVLFEVHNYNITTVENFQHFMDRISNGGLEEGKPVDLVLSCVDNFEARMTINTACNELGQTWMESGVSENAVSGHIQLIIPGESACFACAPPLVVAANIDEKTLKREGVCAASLPTTMGVVAGILVQNVLKFLLNFGTVSFYLGYNAMQDFFPTMSMKPNPQCDDRNCRKQQEEYKKKVAALPKQEVIQEEEEIIHEDNEWGIELVSEVSEEELKNFSGPVPDLPEGITVAYTIPKKQEDSVTELTVEDSGESLEDLMAKMKNM

SEQ ID NO: 7265 - protein, 3907 aa, Homo sapiens
MEDEERQKKLEAGKAKLAQFRQRKAQSDGQSPSKKQKKKRKTSSSKHDVSAHHDLNIDQSQCNEMYINSSQRVESTVIPESTIMRTLHSGEITSHEQGFSVELESEISTTADDCSSEVNGCSFVMRTGKPTNLLREEEFGVDDSYSEQGAQDSPTHLEMMESELAGKQHEIEELNRELEEMRVTYGTEGLQQLQEFEAAIKQRDGIITQLTANLQQARREKDETMREFLELTEQSQKLQIQFQQLQASETLRNSTHSSTAADLLQAKQQILTHQQQLEEQDHLLEDYQKKKEDFTMQISFLQEKIKVYEMEQDKKVENSNKEEIQEKETIIEELNTKIIEEEKKTLELKDKLTTADKLLGELQEQIVQKNQEIKNMKLELTNSKQKERQSSEEIKQLMGTVEELQKRNHKDSQFETDIVQRMEQETQRKLEQLRAELDEMYGQQIVQMKQELIRQHMAQMEEMKTRHKGEMENALRSYSNITVNEDQIKLMNVAINELNIKLQDTNSQKEKLKEELGLILEEKCALQRQLEDLVEELSFSREQIQRARQTIAEQESKLNEAHKSLSTVEDLKAEIVSASESRKELELKHEAEVTNYKIKLEMLEKEKNAVLDRMAESQEAELERLRTQLLFSHEEELSKLKEDLEIEHRINIEKLKDNLGIHYKQQIDGLQNEMSQKIETMQFEKDNLITKQNQLILEISKLKDLQQSLVNSKSEEMTLQINELQKEIEILRQEEKEKGTLEQEVQELQLKTELLEKQMKEKENDLQEKFAQLEAENSILKDEKKTLEDMLKIHTPVSQEERLIFLDSIKSKSKDSVWEKEIEILIEENEDLKQQCIQLNEEIEKQRNTFSFAEKNFEVNYQELQEEYACLLKVKDDLEDSKNKQELEYKSKLKALNEELHLQRINPTTVKMKSSVFDEDKTFVAETLEMGEVVEKDTTELMEKLEVTKREKLELSQRLSDLSEQLKQKHGEISFLNEEVKSLKQEKEQVSLRCRELEIIINHNRAENVQSCDTQVSSLLDGVVTMTSRGAEGSVSKVNKSFGEESKIMVEDKVSFENMTVGEESKQEQLILDHLPSVTKESSLRATQPSENDKLQKELNVLKSEQNDLRLQMEAQRICLSLVYSTHVDQVREYMENEKDKALCSLKEELIFAQEEKIKELQKIHQLELQTMKTQETGDEGKPLHLLIGKLQKAVSEECSYFLQTLCSVLGEYYTPALKCEVNAEDKENSGDYISENEDPELQDYRYEVQDFQENMHTLLNKVTEEYNKLLVLQTRLSKIWGQQTDGMKLEFGEENLPKEETEFLSIHSQMTNLEDIDVNHKSKLSSLQDLEKTKLEEQVQELESLISSLQQQLKETEQNYEAEIHCLQKRLQAVSESTVPPSLPVDSVVITESDAQRTMYPGSCVKKNIDGTIEFSGEFGVKEETNIVKLLEKQYQEQLEEEVAKVIVSMSIAFAQQTELSRISGGKENTASSKQAHAVCQQEQHYFNEMKLSQDQIGFQTFETVDVKFKEEFKPLSKELGEHGKEILLSNSDPHDIPESKDCVLTISEEMFSKDKTFIVRQSIHDEISVSSMDASRQLMLNEEQLEDMRQELVRQYQEHQQATELLRQAHMRQMERQREDQEQLQEEIKRLNRQLAQRSSIDNENLVSERERVLLEELEALKQLSLAGREKLCCELRNSSTQTQNGNENQGEVEEQTFKEKELDRKPEDVPPEILSNERYALQKANNRLLKILLEVVKTTAAVEETIGRHVLGILDRSSKSQSSASLIWRSEAEASVKSCVHEEHTRVTDESIPSYSGSDMPRNDINMWSKVTEEGTELSQRLVRSGFAGTEIDPENEELMLNISSRLQAAVEKLLEAISETSSQLEHAKVTQTELMRESFRQKQEATESLKCQEELRERLHEESRAREQLAVELSKAEGVIDGYADEKTLFERQIQEKTDIIDRLEQELLCASNRLQELEAEQQQIQEERELLSRQKEAMKAEAGPVEQQLLQETEKLMKEKLEVQCQAEKVRDDLQKQVKALEIDVEEQVSRFIELEQEKNTELMDLRQQNQALEKQLEKMRKFLDEQAIDREHERDVFQQEIQKLEQQLKVVPRFQPISEHQTREVEQLANHLKEKTDKCSELLLSKEQLQRDIQERNEEIEKLEFRVRELEQALLVSADTFQKVEDRKHFGAVEAKPELSLEVQLQAERDAIDRKEKEITNLEEQLEQFREELENKNEEVQQLHMQLEIQKKESTTRLQELEQENKLFKDDMEKLGLAIKESDAMSTQDQHVLFGKFAQIIQEKEVEIDQLNEQVTKLQQQLKITTDNKVIEEKNELIRDLETQIECLMSDQECVKRNREEEIEQLNEVIEKLQQELANIGQKTSMNAHSLSEEADSLKHQLDVVIAEKLALEQQVETANEEMTFMKNVLKETNFKMNQLTQELFSLKRERESVEKIQSIPENSVNVAIDHLSKDKPELEVVLTEDALKSLENQTYFKSFEENGKGSIINLETRLLQLESTVSAKDLELTQCYKQIKDMQEQGQFETEMLQKKIVNLQKIVEEKVAAALVSQIQLEAVQEYAKFCQDNQTISSEPERTNIQNLNQLREDELGSDISALTLRISELESQVVEMHTSLILEKEQVEIAEKNVLEKEKKLLELQKLLEGNEKKQREKEKKRSPQDVEVLKTTTELFHSNEESGFFNELEALRAESVATKAELASYKEKAEKLQEELLVKETNMTSLQKDLSQVRDHLAEAKEKLSILEKEDETEVQESKKACMFEPLPIKLSKSIASQTDGTLKISSSNQTPQILVKNAGIQINLQSECSSEEVTEIISQFTEKIEKMQELHAAEILDMESRHISETETLKREHYVAVQLLKEECGTLKAVIQCLRSKEGSSIPELAHSDAYQTREICSSDSGSDWGQGIYLTHSQGFDIASEGRGEESESATDSFPKKIKGLLRAVHNEGMQVLSLTESPYSDGEDHSIQQVSEPWLEERKAYINTISSLKDLITKMQLQREAEVYDSSQSHESFSDWRGELLLALQQVFLEERSVLLAAFRTELTALGTTDAVGLLNCLEQRIQEQGVEYQAAMECLQKADRRSLLSEIQALHAQMNGRKITLKREQESEKPSQELLEYNIQQKQSQMLEMQVELSSMKDRATELQEQLSSEKMVVAELKSELAQTKLELETTLKAQHKHLKELEAFRLEVKDKTDEVHLLNDTLASEQKKSRELQWALEKEKAKLGRSEERDKEELEDLKFSLESQKQRNLQLNLLLEQQKQLLNESQQKIESQRMLYDAQLSEEQGRNLELQVLLESEKVRIREMSSTLDRERELHAQLQSSDGTGQSRPPLPSEDLLKELQKQLEEKHSRIVELLNETEKYKLDSLQTRQQMEKDRQVHRKTLQTEQEANTEGQKKMHELQSKVEDLQRQLEEKRQQVYKLDLEGQRLQGIMQEFQKQELEREEKRESRRILYQNLNEPTTWSLTSDRTRNWVLQQKIEGETKESNYAKLIEMNGGGTGCNHELEMIRQKLQCVASKLQVLPQKASERLQFETADDEDFIWVQENIDEIILQLQKLTGQQGEEPSLVSPSTSCGSLTERLLRQNAELTGHISQLTEEKNDLRNMVMKLEEQIRWYRQTGAGRDNSSRFSLNGGANIEAIIASEKEVWNREKLTLQKSLKRAEAEVYKLKAELRNDSLLQTLSPDSEHVTLKRIYGKYLRAESFRKALIYQKKYLLLLLGGFQECEDATLALLARMGGQPAFTDLEVITNRPKGFTRFRSAVRVSIAISRMKFLVRRWHRVTGSVSININRDGFGLNQGAEKTDSFYHSSGGLELYGEPRHTTYRSRSDLDYIRSPLPFQNRYPGTPADFNPGSLACSQLQNYDPDRALTDYITRLEALQRRLGTIQSGSTTQFHAGMRR

SEQ ID NO: 7266 - protein, 587 aa, Homo sapiens
MASEDIAKLAETLAKTQVAGGQLSFKGKSLKLNTAEDAKDVIKEIEDFDSLEALRLEGNTVGVEAARVIAKALEKKSELKRCHWSDMFTGRLRTEIPPALISLGEGLITAGAQLVELDLSDNAFGPDGVQGFEALLKSSACFTLQELKLNNCGMGIGGGKILAAALTECHRKSSAQGKPLALKVFVAGRNRLENDGATALAEAFRVIGTLEEVHMPQNGINHPGITALAQAFAVNPLLRVINLNDNTFTEKGAVAMAETLKTLRQVEVINFGDCLVRSKGAVAIADAIRGGLPKLKELNLSFCEIKRDAALAVAEAMADKAELEKLDLNGNTLGEEGCEQLQEVLEGFNMAKVLASLSDDEDEEEEEEGEEEEEEAEEEEEEDEEEEEEEEEEEEEEPQQRGQGEKSATPSRKILDPNTGEPAPVLSSPPPADVSTFLAFPSPEKLLRLGPKSSVLIAQQTDTSDPEKVVSAFLKVSSVFKDEATVRMAVQDAVDALMQKAFNSSSFNSNTFLTRLLVHMGLLKSEDKVKAIANLYGPLMALNHMVQQDYFPKALAPLLLAFVTKPNSALESCSFARHSLLQTLYKV

SEQ ID NO: 7267 - protein, 466 aa, Homo sapiens
MVMEKPSPLLVGREFVRQYYTLLNQAPDMLHRFYGKNSSYVHGGLDSNGKPADAVYGQKEIHRKVMSQNFTNCHTKIRHVDAHATLNDGVVVQVMGLLSNNNQALRRFMQTFVLAPEGSVANKFYVHNDIFRYQDEVFGGFVTEPQEESEEEVEEPEERQQTPEVVPDDSGTFYDQAVVSNDMEEHLEEPVAEPEPDPEPEPEQEPVSEIQEEKPEPVLEETAPEDAQKSSSPAPADIAQTVQEDLRTFSWASVTSKNLPPSGAVPVTGIPPHVVKVPASQPRPESKPESQIPPQRPQRDQRVREQRINIPPQRGPRPIREAGEQGDIEPRRMVRHPDSHQLFIGNLPHEVDKSELKDFFQSYGNVVELRINSGGKLPNFGFVVFDDSEPVQKVLSNRPIMFRGEVRLNVEEKKTRAAREGDRRDNRLRGPGGPRGGLGGGMRGPPRGGMVQKPGFGVGRGLAPRQ

SEQ ID NO: 7268 - protein, 1103 aa, Homo sapiens
MAAGCLLALTLTLFQSLLIGPSSEEPFPSAVTIKSWVDKMQEDLVTLAKTASGVNQLVDIYEKYQDLYTVEPNNARQLVEIAARDIEKLLSNRSKALVRLALEAEKVQAAHQWREDFASNEVVYYNAKDDLDPEKNDSEPGSQRIKPVFIEDANFGRQISYQHAAVHIPTDIYEGSTIVLNELNWTSALDEVFKKNREEDPSLLWQVFGSATGLARYYPASPWVDNSRTPNKIDLYDVRRRPWYIQGAASPKDMLILVDVSGSVSGLTLKLIRTSVSEMLETLSDDDFVNVASFNSNAQDVSCFQHLVQANVRNKKVLKDAVNNITAKGITDYKKGFSFAFEQLLNYNVSRANCNKIIMLFTDGGEERAQEIFNKYNKDKKVRVFTFSVGQHNYDRGPIQWMACENKGYYYEIPSIGAIRINTQEYLDVLGRPMVLAGDKAKQVQWTNVYLDALELGLVITGTLPVFNITGQFENKTNLKNQLILGVMGVDVSLEDIKRLTPRFTLCPNGYYFAIDPNGYVLLHPNLQPKPIGVGIPTINLRKRRPNIQNPKSQEPVTLDFLDAELENDIKVEIRNKMIDGESGEKTFRTLVKSQDERYIDKGNRTYTWTPVNGTDYSLALVLPTYSFYYIKAKLEETITQARYSETLKPDNFEESGYTFIAPRDYCNDLKISDNNTEFLLNFNEFIDRKTPNNPSCNADLINRVLLDAGFTNELVQNYWSKQKNIKGVKARFVVTDGGITRVYPKEAGENWQENPETYEDSFYKRSLDNDNYVFTAPYFNKSGPGAYESGIMVSKAVEIYIQGKLLKPAVVGIKIDVNSWIENFTKTSIRDPCAGPVCDCKRNSDVMDCVILDDGGFLLMANHDDYTNQIGRFFGEIDPSLMRHLVNISVYAFNKSYDYQSVCEPGAAPKQGAGHRSAYVPSVADILQIGWWATAAAWSILQQFLLSLTFPRLLEAVEMEDDDFTASLSKQSCITEQTQYFFDNDSKSFSGVLDCGNCSRIFHGEKLMNTNLIFIMVESKGTCPCDTRLLIQAEQTSDGPNPCDMVKQPRYRKGPDVCFDNNVLEDYTDCGGVSGLNPSLWYIIGIQFLLLWLVSGSTHRLL

SEQ ID NO: 7269 - protein, 687 aa, Homo sapiens
MSNRNNNKLPSNLPQLQNLIKRDPPAYIEEFLQQYNHYKSNVEIFKLQPNKPSKELAELVMFMAQISHCYPEYLSNFPQEVKDLLSCNHTVLDPDLRMTFCKALILLRNKNLINPSSLLELFFELFRCHDKLLRKTLYTHIVTDIKNINAKHKNNKVNVVLQNFMYTMLRDSNATAAKMSLDVMIELYRRNIWNDAKTVNVITTACFSKVTKILVAALTFFLGKDEDEKQDSDSESEDDGPTARDLLVQYATGKKSSKNKKKLEKAMKVLKKQKKKKKPEVFNFSAIHLIHDPQDFAEKLLKQLECCKERFEVKMMLMNLISRLVGIHELFLFNFYPFLQRFLQPHQREVTKILLFAAQASHHLVPPEIIQSLLMTVANNFVTDKNSGEVMTVGINAIKEITARCPLAMTEELLQDLAQYKTHKDKNVMMSARTLIHLFRTLNPQMLQKKFRGKPTEASIEARVQEYGELDAKDYIPGAEVLEVEKEENAENDEDGWESTSLSEEEDADGEWIDVQHSSDEEQQEISKKLNSMPMEERKAKAAAISTSRVLTQEDFQKIRMAQMRKELDAAPGKSQKRKYIEIDSDEEPRGELLSLRDIERLHKKPKSDKETRLATAMAGKTDRKEFVRKKTKTNPFSSSTNKEKKKQKNFMMMRYSQNVRSKNKRSFREKQLALRDALLKKRKRMK

SEQ ID NO: 7270 - protein, 695 aa, Homo sapiens
MADIKTGIFAKNVQKRLNRAQEKVLQKLGKADETKDEQFEEYVQNFKRQEAEGTRLQRELRGYLAAIKGMQEASMKLTESLHEVYEPDWYGREDVKMVGEKCDVLWEDFHQKLVDGSLLTLDTYLGQFPDIKNRIAKRSRKLVDYDSARHHLEALQSSKRKDESRISKAEEEFQKAQKVFEEFNVDLQEELPSLWSRRVGFYVNTFKNVSSLEAKFHKEIAVLCHKLYEVMTKLGDQHADKAFTIQGAPSDSGPLRIAKTPSPPEEPSPLPSPTASPNHTLAPASPAPARPRSPSQTRKGPPVPPLPKVTPTKELQQENIISFFEDNFVPEISVTTPSQNEVPEVKKEETLLDLDFDPFKPEVTPAGSAGVTHSPMSQTLPWDLWTTSTDLVQPASGGSFNGFTQPQDTSLFTMQTDQSMICNLAESEQAPPTEPKAEEPLAAVTPAVGLDLGMDTRAEEPVEEAVIIPGADADAAVGTLVSAAEGAPGEEAEAEKATVPAGEGVSLEEAKIGTETTEGAESAQPEAEELEATVPQEKVIPSVVIEPASNHEEEGENEITIGAEPKETTEDAAPPGPTSETPELATEQKPIQDPQPTPSAPAMGAADQLASAREASQELPPGFLYKVETLHDFEAANSDELTLQRGDVVLVVPSDSEADQDAGWLVGVKESDWLQYRDLATYKGLFPENFTRRLD

SEQ ID NO: 7271 - protein, 89 aa, Homo sapiens
MALLLCFVLLCGVVDFARSLSITTPEEMIEKAKGETAYLPCKFTLSPEDQGPLDIEWLISPADNQKVDQVGRCATSKEPYVHCQKLHRQ

SEQ ID NO: 7272 - protein, 446 aa, Homo sapiens
MLLPQLCWLPLLAGLLPPVPAQKFSALTFLRVDQDKDKDCSLDCAGSPQKPLCASDGRTFLSRCEFQRAKCKDPQLEIAYRGNCKDVSRCVAERKYTQEQARKEFQQVFIPECNDDGTYSQVQCHSYTGYCWCVTPNGRPISGTAVAHKTPRCPGSVNEKLPQREGTGKTDDAAAPALETQPQGDEEDIASRYPTLWTEQVKSRQNKTNKNSVSSCDQEHQSALEEAKQPKNDNVVIPECAHGGLYKPVQCHPSTGYCWCVLVDTGRPIPGTSTRYEQPKCDNTARAHPAKARDLYKGRQLQGCPGAKKHEFLTSVLDALSTDMVHAASDPSSSSGRLSEPDPSHTLEERVVHWYFKLLDKNSSGDIGKKEIKPFKRFLRKKSKPKKCVKKFVEYCDVNNDKSISVQELMGCLGVAKEDGKADTKKRHTPRGHAESTSNRQPRKQG

SEQ ID NO: 7273 - protein, 510 aa, Homo sapiens
MDEKTKKAEEMALSLTRAVAGGDEQVAMKCAIWLAEQRVPLSVQLKPEVSPTQDIRLWVSVEDAQMHTVTIWLTVRPDMTVASLKDMVFLDYGFPPVLQQWVIGQRLARDQETLHSHGVRQNGDSAYLYLLSARNTSLNPQELQRERQLRMLEDLGFKDLTLQPRGPLEPGPPKPGVPQEPGRGQPDAVPEPPPVGWQCPGCTFINKPTRPGCEMCCRARPEAYQVPASYQPDEEERARLAGEEEALRQYQQRKQQQQEGNYLQHVQLDQRSLVLNTEPAECPVCYSVLAPGEAVVLRECLHTFCRECLQGTIRNSQEAEVSCPFIDNTYSCSGKLLEREIKALLTPEDYQRFLDLGISIAENRSAFSYHCKTPDCKGWCFFEDDVNEFTCPVCFHVNCLLCKAIHEQMNCKEYQEDLALRAQNDVAARQTTEMLKVMLQQGEAMRCPQCQIVVQKKDGCDWIRCTVCHTEICWVTKGPRWGPGGPGDTSGGCRCRVNGIPCHPSCQNCH

SEQ ID NO: 7274 - protein, 394 aa, Homo sapiens
MFCPLKLILLPVLLDYSLGLNDLNVSPPELTVHVGDSALMGCVFQSTEDKCIFKIDWTLSPGEHAKDEYVLYYYSNLSVPIGRFQNRVHLMGDILCNDGSLLLQDVQEADQGTYICEIRLKGESQVFKKAVVLHVLPEEPKELMVHVGGLIQMGCVFQSTEVKHVTKVEWIFSGRRAKEEIVFRYYHKLRMSVEYSQSWGHFQNRVNLVGDIFRNDGSIMLQGVRESDGGNYTCSIHLGNLVFKKTIVLHVSPEEPRTLVTPAALRPLVLGGNQLVIIVGIVCATILLLPVLILIVKKTCGNKSSVNSTVLVKNTKKTNPEIKEKPCHFERCEGEKHIYSPIIVREVIEEEEPSEKSEATYMTMHPVWPSLRSDRNNSLEKKSGGGMPKTQQAF

SEQ ID NO: 7275 - protein, 1463 aa, Homo sapiens
MEPRLFCWTTLFLLAGWCLPGLPCPSRCLCFKSTVRCMHLMLDHIPQVPQQTTVLDLRFNRIREIPGSAFKKLKNLNTLLLNNNHIRKISRNAFEGLENLLYLYLYKNEIHALDKQTFKGLISLEHLYIHFNQLEMLQPETFGDLLRLERLFLHNNKLSKIPAGSFSNLDSLKRLRLDSNALVCDCDLMWLGELLQGFAQHGHTQAAATCEYPRRLHGRAVASVTVEEFNCQSPRITFEPQDVEVPSGNTVYFTCRAEGNPKPEIIWIHNNHSLDLEDDTRLNVFDDGTLMIRNTRESDQGVYQCMARNSAGEAKTQSAMLRYSSLPAKPSFVIQPQDTEVLIGTSTTLECMATGHPHPLITWTRDNGLELDGSRHVATSSGLYLQNITQRDHGRFTCHANNSHGTVQAAANIIVQAPPQFTVTPKDQVVLEEHAVEWLCEADGNPPPVIVWTKTGGQLPVEGQHTVLSSGTLRIDRAAQHDQGQYECQAVSSLGVKKVSVQLTVKPKALAVFTQLPQDTSVEVGKNINISCHAQGEPQPIITWNKEGVQITESGKFHVDDEGTLTIYDAGFPDQGRYECVARNSFGLAVTNMFLTVTAIQGRQAGDDFVESSILDAVQRVDSAINSTRRHLFSQKPHTSSDLLAQFHYPRDPLIVEMARAGEIFEHTLQLIRERVKQGLTVDLEGKEFRYNDLVSPRSLSLIANLSGCTARRPLPNCSNRCFHAKYRAHDGTCNNLQQPTWGAALTAFARLLQPAYRDGIRAPRGLGLPVGSRQPLPPPRLVATVWARAAAVTPDHSYTRMLMHWGWFLEHDLDHTVPALSTARFSDGRPCSSVCTNDPPCFPMNTRHADPRGTHAPCMLFARSSPACASGRPSATVDSVYAREQINQQTAYIDGSNVYGSSERESQALRDPSVPRGLLKTGFPWPPSGKPLLPFSTGPPTECARQEQESPCFLAGDHRANEHLALAAMHTLWFREHNRMATELSALNPHWEGNTVYQEARKIVGAELQHITYSHWLPKVLGDPGTRMLRGYRGYNPNVNAGIINSFATAAFRFGHTLINPILYRLNATLGEISEGHLPFHKALFSPSRIIKEGGIDPVLRGLFGVAAKWRAPSYLLSPELTQRLFSAAYSAAVDSAATIIQRGRDHGIPPYVDFRVFCNLTSVKNFEDLQNEIKDSEIRQKLRKLYGSPGDIDLWPALMVEDLIPGTRVGPTLMCLFVTQFQRLRDGDRFWYENPGVFTPAQLTQLKQASLSRVLCDNGDSIQQVQADVFVKAEYPQDYLNCSEIPKVDLRVWQDCCADCRSRGQFRAVTQESQKKRSAQYSYPVDKDMELSHLRSRQQDKIYVGEDARNVTVLAKTKFSQDFSTFAAEIQETITALREQINKLEARLRQAGCTDVRGVPRKAEERWMKEDCTHCICESGQVTCVVEICPPAPCPSPELVKGTCCPVCRDRGMPSDSPEKR

SEQ ID NO: 7276 - protein, 1143 aa, Homo sapiens
MEKRETFVQAVSKELVGEFLQFVQLDKEASDPFSLNELLDELSRKQKEELWQRLKNLLTDVLLESPVDGWQVVEAQGEDNMETEHGSKMRKSIEIIYAITSVILASVSVINESENYEALLECVIILNGILYALPESERKLQSSIQDLCVTWWEKGLPAKEDTGKTAFVMLLRRSLETKTGADVCRLWRIHQALYCFDYDLEESGEIKDMLLECFININYIKKEEGRRFLSCLFNWNINFIKMIHGTIKNQLQGLQKSLMVYIAEIYFRAWKKASGKILEAIENDCIQDFMFHGIHLPRRSPVHSKVREVLSYFHHQKKVRQGVEEMLYRLYKPILWRGLKARNSEVRSNAALLFVEAFPIRDPNLHAIEMDSEIQKQFEELYSLLEDPYPMVRSTGILGVCKITSKYWEMMPPTILIDLLKKVTGELAFDTSSADVRCSVFKCLPMILDNKLSHPLLEQLLPALRYSLHDNSEKVRVAFVDMLLKIKAVRAAKFWKICPMEHILVRLETDSRPVSRRLVSLIFNSFLPVNQPEEVWCERCVTLVQMNHAAARRFYQYAHEHTACTNIAKLIHVIRHCLNACIQRAVREPPEDEEEEDGREKENVTVLDKTLSVNDVACMAGLLEIIVILWKSIDRSMENNKEAKLYTINKFASVLPEYLKVFKDDRCKIPLFMLMSFMPASAVPPFSCGVISTLRSREEGAVDKSYCTLLDCLCSWGQVGHILELVDNWLPTEHAQAKSNTASKGRVQIHDTRPVKPELALVYIEYLLTHPKNRECLLSAPRKKLNHLLKALETSKADLESLLQTPGGKPRGFSEAAAPRAFGLHCRLSIHLQHKFCSEGKVYLSMLEDTGFWLESKILSFIQDQEEDYLKLHRVIYQQIIQTYLTVCKDVVMVGLGDHQFQMQLLQRSLGIMQTVKGFFYVSLLLDILKEITGSSLIQKTDSDEEVAMLLDTVQKVFQKMLECIARSFRKQPEEGLRLLYSVQRPLHEFITAVQSRHTDTPVHRGVLSTLIAGPVVEISHQLRKVSDVEELTPPEHLSDLPPFSRCLIGIIIKSSNVVRSFLDELKACVASNDIEGIVCLTAAVHIILVINAGKHKSSKVREVAATVHRKLKTFMEITLEEDSIERFLYESSSRTLGELLNS

SEQ ID NO: 7277 - protein, 222 aa, Homo sapiens
MNEVKESLRSIEQKYKLFQQQQLTFTAALEHCRENAHDKIRPISSIGQVQSYMEHYCNSSTDRRVLLMFLDICSELNKLCQHFEAVHSGTPVTNNLLEKCKTLVSQSNDLSSLRAKYPHDVVNHLSCDEARNHYGGVVSLIPLILDLMKEWIAHSEKLPRKVLQHVSEPQAHQESTRGAARPAQAIGTQPRATKHKCRQLTKASLKPRGCSKPPWRPPGGKL

SEQ ID NO: 7278 - protein, 1036 aa, Homo sapiens
MSLKNEPRVNTSALQKIAADMSNIIENLDTRELHFEGEEVDYDVSPSDPKIQEVYIPFSAIYNTQGFKEPNIQTYLSGCPIKAQVLEVERFTSTTRVPSINLYTIELTHGEFKWQVKRKFKHFQEFHRELLKYKAFIRIPIPTRRHTFRRQNVREEPREMPSLPRSSENMIREEQFLGRRKQLEDYLTKILKMPMYRNYHATTEFLDISQLSFIHDLGPKGIEGMIMKRSGGHRIPGLNCCGQGRACYRWSKRWLIVKDSFLLYMKPDSGAIAFVLLVDKEFKIKVGKKETETKYGIRIDNLSRTLILKCNSYRHARWWGGAIEEFIQKHGTNFLKDHRFGSYAAIQENALAKWYVNAKGYFEDVANAMEEANEEIFITDWWLSPEIFLKRPVVEGNRWRLDCILKRKAQQGVRIFIMLYKEVELALGINSEYTKRTLMRLHPNIKVMRHPDHVSSTVYLWAHHEKLVIIDQSVAFVGGIDLAYGRWDDNEHRLTDVGSVKRVTSGPSLGSLPPAAMESMESLRLKDKNEPVQNLPIQKSIDDVDSKLKGIGKPRKFSKFSLYKQLHRHHLHDADSISSIDSTSNTGSIRSLQTGVGELHGETRFWHGKDYCNFVFKDWVQLDKPFADFIDRYSTPRMPWHDIASAVHGKAARDVARHFIQRWNFTKIMKSKYRSLSYPFLLPKSQTTAHELRYQVPGSVHANVQLLRSAADWSAGIKYHEESIHAAYVHVIENSRHYIYIENQFFISCADDKVVFNKIGDAIAQRILKAHRENQKYRVYVVIPLLPGFEGDISTGGGNALQAIMHFNYRTMCRGENSILGQLKAELGNQWINYISFCGLRTHAELEGNLVTELIYVHSKLLIADDNTVIIGSANINDRSMLGKRDSEMAVIVQDTETVPSVMDGKEYQAGRFARGLRLQCFRVVLGYLDDPSEDIQDPVSDKFFKEVWVSTAARNATIYDKVFRCLPNDEVHNLIQLRDFINKPVLAKEDPIRAEEELKKIRGFLVQFPFYFLSEESLLPSVGTKEAIVPMEVWT

SEQ ID NO: 7279 - protein, 561 aa, Homo sapiens
MAAEEMHWPVPMKAIGAQNLLTMPGGVAKAGYLHKKGGTQLQLLKWPLRFVIIHKRCVYYFKSSTSASPQGAFSLSGYNRVMRAAEETTSNNVFPFKIIHISKKHRTWFFSASSEEERKSWMALLRREIGHFHEKKDLPLDTSDSSSDTDSFYGAVERPVDISLSPYPTDNEDYEHDDEDDSYLEPDSPEPGRLEDALMHPPAYPPPPVPTPRKPAFSDMPRAHSFTSKGPGPLLPPPPPKHGLPDVGLAAEDSKRDPLCPRRAEPCPRVPATPRRMSDPPLSTMPTAPGLRKPPCFRESASPSPEPWTPGHGACSTSSAAIMATATSRNCDKLKSFHLSPRGPPTSEPPPVPANKPKFLKIAEEDPPREAAMPGLFVPPVAPRPPALKLPVPEAMARPAVLPRPEKPQLPHLQRSPPDGQSFRSFSFEKPRQPSQADTGGDDSDEDYEKVPLPNSVFVNTTESCEVERLFKATSPRGEPQDGLYCIRNSSTKSGKVLVVWDETSNKVRNYRIFEKDSKFYLEGEVLFVSVGSMVEHYHTHVLPSHQSLLLRHPYGYTGPR

SEQ ID NO: 7280 - protein, 1828 aa, Homo sapiens
MAASELYTKFARVWIPDPEEVWKSAELLKDYKPGDKVLLLHLEEGKDLEYHLDPKTKELPHLRNPDILVGENDLTALSYLHEPAVLHNLRVRFIDSKLIYTYCGIVLVAINPYEQLPIYGEDIINAYSGQNMGDMDPHIFAVAEEAYKQMARDERNQSIIVSGESGAGKTVSAKYAMRYFATVSGSASEANVEEKVLASNPIMESIGNAKTTRNDNSSRFGKYIEIGFDKRYRIIGANMRTYLLEKSRVVFQAEEERNYHIFYQLCASAKLPEFKMLRLGNADNFNYTKQGGSPVIEGVDDAKEMAHTRQACTLLGISESHQMGIFRILAGILHLGNVGFTSRDADSCTIPPKHEPLCIFCELMGVDYEEMCHWLCHRKLATATETYIKPISKLQATNARDALAKHIYAKLFNWIVDNVNQALHSAVKQHSFIGVLDIYGFETFEINSFEQFCINYANEKLQQQFNMHVFKLEQEEYMKEQIPWTLIDFYDNQPCINLIESKLGILDLLDEECKMPKGTDDTWAQKLYNTHLNKCALFEKPRLSNKAFIIQHFADKVEYQCEGFLEKNKDTVFEEQIKVLKSSKFKMLPELFQDDEKAISPTSATSSGRTPLTRTPAKPTKGRPGQMAKEHKKTVGHQFRNSLHLLMETLNATTPHYVRCIKPNDFKFPFTFDEKRAVQQLRACGVLETIRISAAGFPSRWTYQEFFSRYRVLMKQKDVLSDRKQTCKNVLEKLILDKDKYQFGKTKIFFRAGQVAYLEKLRADKLRAACIRIQKTIRGWLLRKKYLRMRKAAITMQRYVRGYQARCYAKFLRRTKAATIIQKYWRMYVVRRRYKIRRAATIVLQSYLRGFLARNRYRKILREHKAVIIQKRVRGWLARTHYKRSMHAIIYLQCCFRRMMAKRELKKLKIEARSVERYKKLHIGMENKIMQLQRKVDEQNKDYKCLVEKLTNLEGIYNSETEKLRSDLERLQLSEEEAKVATGRVLSLQEEIAKLRKDLEQTRSEKKCIEEHADRYKQETEQLVSNLKEENTLLKQEKEALNHRIVQQAKEMTETMEKKLVEETKQLELDLNDERLRYQNLLNEFSRLEERYDDLKEEMTLMVHVPKPGHKRTDSTHSSNESEYIFSSEIAEMEDIPSRTEEPSEKKVPLDMSLFLKLQKRVTELEQEKQVMQDELDRKEEQVLRSKAKEEERPQIRGAELEYESLKRQELESENKKLKNELNELRKALSEKSAPEVTAPGAPAYRVLMEQLTSVSEELDVRKEEVLILRSQLVSQKEAIQPKDDKNTMTDSTILLEDVQKMKDKGEIAQAYIGLKETNRLLESQLQSQKRSHENEAEALRGEIQSLKEENNRQQQLLAQNLQLPPEARIEASLQHEITRLTNENLDLMEQLEKQDKTVRKLKKQLKVFAKKIGELEVGQMENISPGQIIDEPIRPVNIPRKEKDFQGMLEYKKEDEQKLVKNLILELKPRGVAVNLIPGLPAYILFMCVRHADYLNDDQKVRSLLTSTINSIKKVLKKRGDDFETVSFWLSNTCRFLHCLKQYSGEEGFMKHNTSRQNEHCLTNFDLAEYRQVLSDLAIQIYQQLVRVLENILQPMIVSGMLEHETIQGVSGVKPTGLRKRTSSIADEGTYTLDSILRQLNSFHSVMCQHGMDPELIKQVVKQMFYIIGAITLNNLLLRKDMCSWSKGMQIRYNVSQLEEWLRDKNLMNSGAKETLEPLIQAAQLLQVKKKTDDDAEAICSMCNALTTAQIVKVLNLYTPVNEFEERVSVSFIRTIQMRLRDRKDSPQLLMDAKHIFPVTFPFNPSSLALETIQIPASLGLGFISRV

SEQ ID NO: 7281 - protein, 4533 aa, Homo sapiens
MAGPLPDEQDFIQAYEEVREKYKDERDRVQKKTFTKWVNKHLIKAQRHISDLYEDLRDGHNLISLLEVLSGDSLPREKGRMRFHKLQNVQIALDYLRHRQVKLVNIRNDDIADGNPKLTLGLIWTIILHFQISDIQVSGQSEDMTAKEKLLLWSQRMVEGYQGLRCDNFTSSWRDGRLFNAIIHRHKPLLIDMNKVYRQTNLENLDQAFSVAERDLGVTRLLDPEDVDVPQPDEKSIITYVSSLYDAMPRVPDVQDGVRANELQLRWQEYRELVLLLLQWMRHHTAAFEERRFPSSFEEIEILWSQFLKFKEMELPAKEADKNRSKGIYQSLEGAVQAGQLKVPPGYHPLDVEKEWGKLHVAILEREKQLRSEFERLECLQRIVTKLQMEAGLCEEQLNQADALLQSDVRLLAAGKVPQRAGEVERDLDKADSMIRLLFNDVQTLKDGRHPQGEQMYRRVYRLHERLVAIRTEYNLRLKAGVAAPATQVAQVTLQSVQRRPELEDSTLRYLQDLLAWVEENQHRVDGAEWGVDLPSVEAQLGSHRGLHQSIEEFRAKIERARSDEGQLSPATRGAYRDCLGRLDLQYAKLLNSSKARLRSLESLHSFVAAATKELMWLNEKEEEEVGFDWSDRNTNMTAKKESYSALMRELELKEKKIKELQNAGDRLLREDHPARPTVESFQAALQTQWSWMLQLCCCIEAHLKENAAYFQFFSDVREAEGQLQKLQEALRRKYSCDRSATVTRLEDLLQDAQDEKEQLNEYKGHLSGLAKRAKAVVQLKPRHPAHPMRGRLPLLAVCDYKQVEVTVHKGDECQLVGPAQPSHWKVLSSSGSEAAVPSVCFLVPPPNQEAQEAVTRLEAQHQALVTLWHQLHVDMKSLLAWQSLRRDVQLIRSWSLATFRTLKPEEQRQALHSLELHYQAFLRDSQDAGGFGPEDRLMAEREYGSCSHHYQQLLQSLEQGAQEESRCQRCISELKDIRLQLEACETRTVHRLRLPLDKEPARECAQRIAEQQKAQAEVEGLGKGVARLSAEAEKVLALPEPSPAAPTLRSELELTLGKLEQVRSLSAIYLEKLKTISLVIRGTQGAEEVLRAHEEQLKEAQAVPATLPELEATKASLKKLRAQAEAQQPTFDALRDELRGAQEVGERLQQRHGERDVEVERWRERVAQLLERWQAVLAQTDVRQRELEQLGRQLRYYRESADPLGAWLQDARRRQEQIQAMPLADSQAVREQLRQEQALLEEIERHGEKVEECQRFAKQYINAIKDYELQLVTYKAQLEPVASPAKKPKVQSGSESVIQEYVDLRTHYSELTTLTSQYIKFISETLRRMEEEERLAEQQRAEERERLAEVEAALEKQRQLAEAHAQAKAQAEREAKELQQRMQEEVVRREEAAVDAQQQKRSIQEELQQLRQSSEAEIQAKARQAEAAERSRLRIEEEIRVVRLQLEATERQRGGAEGELQALRARAEEAEAQKRQAQEEAERLRRQVQDESQRKRQAEVELASRVKAEAEAAREKQRALQALEELRLQAEEAERRLRQAEVERARQVQVALETAQRSAEAELQSKRASFAEKTAQLERSLQEEHVAVAQLREEAERRAQQQAEAERAREEAERELERWQLKANEALRLRLQAEEVAQQKSLAQAEAEKQKEEAEREARRRGKAEEQAVRQRELAEQELEKQRQLAEGTAQQRLAAEQELIRLRAETEQGEQQRQLLEEELARLQREAAAATQKRQELEAELAKVRAEMEVLLASKARAEEESRSTSEKSKQRLEAEAGRFRELAEEAARLRALAEEAKRQRQLAEEDAARQRAEAERVLAEKLAAIGEATRLKTEAEIALKEKEAENERLRRLAEDEAFQRRRLEEQAAQHKADIEERLAQLRKASDSELERQKGLVEDTLRQRRQVEEEILALKASFEKAAAGKAELELELGRIRSNAEDTLRSKEQAELEAARQRQLAAEEERRRREAEERVQKSLAAEEEAARQRKAALEEVERLKAKVEEARRLRERAEQESARQLQLAQEAAQKRLQAEEKAHAFAVQQKEQELQQTLQQEQSVLDQLRGEAEAARRAAEEAEEARVQAEREAAQSRRQVEEAERLKQSAEEQAQARAQAQAAAEKLRKEAEQEAARRAQAEQAALRQKQAADAEMEKHKKFAEQTLRQKAQVEQELTTLRLQLEETDHQKNLLDEELQRLKAEATEAARQRSQVEEELFSVRVQMEELSKLKARIEAENRALILRDKDNTQRFLQEEAEKMKQVAEEAARLSVAAQEAARLRQLAEEDLAQQRALAEKMLKEKMQAVQEATRLKAEAELLQQQKELAQEQARRLQEDKEQMAQQLAEETQGFQRTLEAERQRQLEMSAEAERLKLRVAEMSRAQARAEEDAQRFRKQAEEIGEKLHRTELATQEKVTLVQTLEIQRQQSDHDAERLREAIAELEREKEKLQQEAKLLQLKSEEMQTVQQEQLLQETQALQQSFLSEKDSLLQRERFIEQEKAKLEQLFQDEVAKAQQLREEQQRQQQQMEQERQRLVASMEEARRRQHEAEEGVRRKQEELQQLEQQRRQQEELLAEENQRLREQLQLLEEQHRAALAHSEEVTASQVAATKTLPNGRDALDGPAAEAEPEHSFDGLRRKVSAQRLQEAGILSAEELQRLAQGHTTVDELARREDVRHYLQGRSSIAGLLLKATNEKLSVYAALQRQLLSPGTALILLEAQAASGFLLDPVRNRRLTVNEAVKEGVVGPELHHKLLSAERAVTGYKDPYTGQQISLFQAMQKGLIVREHGIRLLEAQIATGGVIDPVHSHRVPVDVAYRRGYFDEEMNRVLADPSDDTKGFFDPNTHENLTYLQLLERCVEDPETGLCLLPLTDKAAKGGELVYTDSEARDVFEKATVSAPFGKFQGKTVTIWEIINSEYFTAEQRRDLLRQFRTGRITVEKIIKIIITVVEEQEQKGRLCFEGLRSLVPAAELLESRVIDRELYQQLQRGERSVRDVAEVDTVRRALRGANVIAGVWLEEAGQKLSIYNALKKDLLPSDMAVALLEAQAGTGHIIDPATSARLTVDEAVRAGLVGPEFHEKLLSAEKAVTGYRDPYTGQSVSLFQALKKGLIPREQGLRLLDAQLSTGGIVDPSKSHRVPLDVACARGCLDEETSRALSAPRADAKAYSDPSTGEPATYGELQQRCRPDQLTGLSLLPLSEKAARARQEELYSELQARETFEKTPVEVPVGGFKGRTVTVWELISSEYFTAEQRQELLRQFRTGKVTVEKVIKILITIVEEVETLRQERLSFSGLRAPVPASELLASGVLSRAQFEQLKDGKTTVKDLSELGSVRTLLQGSGCLAGIYLEDTKEKVSIYEAMRRGLLRATTAALLLEAQAATGFLVDPVRNQRLYVHEAVKAGVVGPELHEQLLSAEKAVTGYRDPYSGSTISLFQAMQKGLVLRQHGIRLLEAQIATGGIIDPVHSHRVPVDVAYQRGYFSEEMNRVLADPSDDTKGFFDPNTHENLTYRQLLERCVEDPETGLRLLPLKGAEKAEVVETTQVYTEEETRRAFEETQIDIPGGGSHGGSTMSLWEVMQSDLIPEEQRAQLMADFQAGRVTKERMIIIIIEIIEKTEIIRQQGLASYDYVRRRLTAEDLFEARIISLETYNLLREGTRSLREALEAESAWCYLYGTGSVAGVYLPGSRQTLSIYQALKKGLLSAEVARLLLEAQAATGFLLDPVKGERLTVDEAVRKGLVGPELHDRLLSAERAVTGYRDPYTEQTISLFQAMKKELIPTEEALRLLDAQLATGGIVDPRLGFHLPLEVAYQRGYLNKDTHDQLSEPSEVRSYVDPSTDERLSYTQLLRRCRRDDGTGQLLLPLSDARKLTFRGLRKQITMEELVRSQVMDEATALQLREGLTSIEEVTKNLQKFLEGTSCIAGVFVDATKERLSVYQAMKKGIIRPGTAFELLEAQAATGYVIDPIKGLKLTVEEAVRMGIVGPEFKDKLLSAERAVTGYKDPYSGKLISLFQAMKKGLILKDHGIRLLEAQIATGGIIDPEESHRLPVEVAYKRGLFDEEMNEILTDPSDDTKGFFDPNTEENLTYLQLMERCITDPQTGLCLLPLKEKKRERKTSSKSSVRKRRVVIVDPETGKEMSVYEAYRKGLIDHQTYLELSEQECEWEEITISSSDGVVKSMIIDRRSGRQYDIDDAIAKNLIDRSALDQYRAGTLSITEFADMLSGNAGGFRSRSSSVGSSSSYPISPAVSRTQLASWSDPTEETGPVAGILDTETLEKVSITEAMHRNLVDNITGQRLLEAQACTGGIIDPSTGERFPVTDAVNKGLVDKIMVDRINLAQKAFCGFEDPRTKTKMSAAQALKKGWLYYEAGQRFLEVQYLTGGLIEPDTPGRVPLDEALQRGTVDARTAQKLRDVGAYSKYLTCPKTKLKISYKDALDRSMVEEGTGLRLLEAAAQSTKGYYSPYSVSGSGSTAGSRTGSRTGSRAGSRRGSFDATGSGFSMTFSSSSYSSSGYGRRYASGSSASLGGPESAVA

SEQ ID NO: 7282 - protein, 1272 aa, Homo sapiens
MPAERKKPASMEEKDSLPNNKEKDCSERRTVSSKERPKDDIKLTAKKEVSKAPEDKKKRLEDDKRKKEDKERKKKDEEKVKAEEESKKKEEEEKKKHQEEERKKQEEQAKRQQEEEAAAQMKEKEESIQLHQEAWERHHLRKELRSKNQNAPDSRPEENFFSRLDSSLKKNTAFVKKLKTITEQQRDSLSHDFNGLNLSKYIAEAVASIVEAKLKISDVNCAVHLCSLFHQRYADFAPSLLQVWKKHFEARKEEKTPNITKLRTDLRFIAELTIVGIFTDKEGLSLIYEQLKNIINADRESHTHVSVVISFCRHCGDDIAGLVPRKVKSAAEKFNLSFPPSEIISPEKQQPFQNLLKEYFTSLTKHLKRDHRELQNTERQNRRILHSKGELSEDRHKQYEEFAMSYQKLLANSQSLADLLDENMPDLPQDKPTPEEHGPGIDIFTPGKPGEYDLEGGIWEDEDARNFYENLIDLKAFVPAILFKDNEKSCQNKESNKDDTKEAKESKENKEVSSPDDLELELENLEINDDTLELEGGDEAEDLTKKLLDEQEQEDEEASTGSHLKLIVDAFLQQLPNCVNRDLIDKAAMDFCMNMNTKANRKKLVRALFIVPRQRLDLLPFYARLVATLHPCMSDVAEDLCSMLRGDFRFHVRKKDQINIETKNKTVRFIGELTKFKMFTKNDTLHCLKMLLSDFSHHHIEMACTLLETCGRFLFRSPESHLRTSVLLEQMMRKKQAMHLDARYVTMVENAYYYCNPPPAEKTVKKKRPPLQEYVRKLLYKDLSKVTTEKVLRQMRKLPWQDQEVKDYVICCMINIWNVKYNSIHCVANLLAGLVLYQEDVGIHVVDGVLEDIRLGMEVNQPKFNQRRISSAKFLGELYNYRMVESAVIFRTLYSFTSFGVNPDGSPSSLDPPEHLFRIRLVCTILDTCGQYFDRGSSKRKLDCFLVYFQRYVWWKKSLEVWTKDHPFPIDIDYMISDTLELLRPKIKLCNSLEESIRQVQDLEREFLIKLGLVNDKDSKDSMTEGENLEEDEEEEEGGAETEEQSGNESEVNEPEEEEGSDNDDDEGEEEEEENTDYLTDSNKENETDEENTEVMIKGGGLKHVPCVEDEDFIQALDKMMLENLQQRSGESVKVHQLDVAIPLHLKSQLRKGPPLGGGEGEAESADTMPFVMLTRKGNKQQFKILNVPMSSQLAANHWNQQQAEQEERMRMKKLTLDINERQEQEDYQEMLQSLAQRPAPANTNRERRPRYQHPKGAPNADLIFKTGGRRR

SEQ ID NO: 7283 - protein, 632 aa, Homo sapiens
MSGQSLTDRITAAQHSVTGSAVSKTVCKATTHEIMGPKKKHLDYLIQCTNEMNVNIPQLADSLFERTTNSSWVVVFKSLITTHHLMVYGNERFIQYLASRNTLFNLSNFLDKSGLQGYDMSTFIRRYSRYLNEKAVSYRQVAFDFTKVKRGADGVMRTMNTEKLLKTVPIIQNQMDALLDFNVNSNELTNGVINAAFMLLFKDAIRLFAAYNEGIINLLEKYFDMKKNQCKEGLDIYKKFLTRMTRISEFLKVAEQVGIDRGDIPDLSQAPSSLLDALEQHLASLEGKKIKDSTAASRATTLSNAVSSLASTGLSLTKVDEREKQAALEEEQARLKALKEQRLKELAKKPHTSLTTAASPVSTSAGGIMTAPAIDIFSTPSSSNSTSKLPNDLLDLQQPTFHPSVHPMSTASQVASTWGDPFSATVDAVDDAIPSLNPFLTKSSGDVHLSISSDVSTFTTRTPTHEMFVGFTPSPVAQPHPSAGLNVDFESVFGNKSTNVIVDSGGFDELGGLLKPTVASQNQNLPVAKLPPSKLVSDDLDSSLANLVGNLGIGNGTTKNDVNWSQPGEKKLTGGSNWQPKVAPTTAWNAATMPPQMGSVPVMTQPTLIYSQPVMRPPNPFGPVSGAQIQFM

SEQ ID NO: 7284 - protein, 661 aa, Homo sapiens
MEMTEMTGVSLKRGALVVEDNDSGVPVEETKKQKLSECSLTKGQDGLQNDFLSISEDVPRPPDTVSTGKGGKNSEAQLEDEEEEEEDGLSEECEEEESESFADMMKHGLTEADVGITKFVSSHQGFSGILKERYSDFVVHEIGKDGRISHLNDLSIPVDEEDPSEDIFTVLTAEEKQRLEELQLFKNKETSVAIEVIEDTKEKRTIIHQAIKSLFPGLETKTEDREGKKYIVAYHAAGKKALANPRKHSWPKSRGSYCHFVLYKENKDTMDAINVLSKYLRVKPNIFSYMGTKDKRAITVQEIAVLKITAQRLAHLNKCLMNFKLGNFSYQKNPLKLGELQGNHFTVVLRNITGTDDQVQQAMNSLKEIGFINYYGMQRFGTTAVPTYQVGRAILQNSWTEVMDLILKPRSGAEKGYLVKCREEWAKTKDPTAALRKLPVKRCVEGQLLRGLSKYGMKNIVSAFGIIPRNNRLMYIHSYQSYVWNNMVSKRIEDYGLKPVPGDLVLKGATATYIEEDDVNNYSIHDVVMPLPGFDVIYPKHKIQEAYREMLTADNLDIDNMRHKIRDYSLSGAYRKIIIRPQNVSWEVVAYDDPKIPLFNTDVDNLEGKTPPVFASEGKYRALKMDFSLPPSTYATMAIREVLKMDTSIKNQTQLNTTWLR

SEQ ID NO: 7285 - protein, 334 aa, Homo sapiens
MKMASSLAFLLLNFHVSLLLVQLLTPCSAQFSVLGPSGPILAMVGEDADLPCHLFPTMSAETMELKWVSSSLRQVVNVYADGKEVEDRQSAPYRGRTSILRDGITAGKAALRIHNVTASDSGKYLCYFQDGDFYEKALVELKVAALGSNLHVEVKGYEDGGIHLECRSTGWYPQPQIQWSNAKGENIPAVEAPVVADGVGLYEVAASVIMRGGSGEGVSCIIRNSLLGLEKTASISIADPFFRSAQPWIAALAGTLPILLLLLAGASYFLWRQQKEITALSSEIESEQEMKEMGYAATEREISLRESLQEELKRKKIQYLTRGEESSSDTNKSA

SEQ ID NO: 7286 - protein, 254 aa, Homo sapiens
MSAELNVPIDPSAPACPEPGHKGMDYRDWVRRSYLELVTSNHHSVQALSWRKLYLSRAKLKASSRTSALLSGFAMVAMVEVQLETQYQYPRPLLIAFSACTTVLVAVHLFALLISTCILPNVEAVSNIHNLNSISESPHERMHPYIELAWGFSTVLGILLFLAEVVLLCWIKFLPVDARRQPGPPPGPGSHTGWQAALVSTIIMVPVGLIFVVFTIHFYRSLVRHKTERHNREIEELHKLKVQLDGHERSLQVL

SEQ ID NO: 7287 - protein, 732 aa, Homo sapiens
MTEGTCLRRRGGPYKTEPATDLGRWRLNCERGRQTWTYLQDERAGREQTGLEAYALGLDTKNYFKDLPKAHTAFEGALNGMTFYVGLQAEDGHWTGDYGGPLFLLPGLLITCHVARIPLPAGYREEIVRYLRSVQLPDGGWGLHIEDKSTVFGTALNYVSLRILGVGPDDPDLVRARNILHKKGGAVAIPSWGKFWLAVLNVYSWEGLNTLFPEMWLFPDWAPAHPSTLWCHCRQVYLPMSYCYAVRLSAAEDPLVQSLRQELYVEDFASIDWLAQRNNVAPDELYTPHSWLLRVVYALLNLYEHHHSAHLRQRAVQKLYEHIVADDRFTKSISIGPISKTINMLVRWYVDGPASTAFQEHVSRIPDYLWMGLDGMKMQGTNGSQIWDTAFAIQALLEAGGHHRPEFSSCLQKAHEFLRLSQVPDNPPDYQKYYRQMRKGGFSFSTLDCGWIVSDCTAEALKAVLLLQEKCPHVTEHIPRERLCDAVAVLLNMRNPDGGFATYETKRGGHLLELLNPSEVFGDIMIDYTYVECTSAVMQALKYFHKRFPEHRAAEIRETLTQGLEFCRRQQRADGSWEGSWGVCFTYGTWFGLEAFACMGQTYRDGTACAEVSRACDFLLSRQMADGGWGEDFESCEERRYLQSAQSQIHNTCWAMMGLMAVRHPDIEAQERGVRCLLEKQLPNGDWPQENIAGVFNKSCAISYTSYRNIFPIWALGRFSQLYPERALAGHP

SEQ ID NO: 7288 - protein, 493 aa, Homo sapiens
MSVDMNSQGSDSNEEDYDPNCEEEEEEEEDDPGDIEDYYVGVASDVEQQGADAFDPEEYQFTCLTYKESEGALNEHMTSLASVLKVSHSVAKLILVNFHWQVSEILDRYKSNSAQLLVEARVQPNPSKHVPTSHPPHHCAVCMQFVRKENLLSLACQHQFCRSCWEQHCSVLVKDGVGVGVSCMAQDCPLRTPEDFVFPLLPNEELREKYRRYLFRDYVESHYQLQLCPGADCPMVIRVQEPRARRVQCNRCNEVFCFKCRQMYHAPTDCATIRKWLTKCADDSETANYISAHTKDCPKCNICIEKNGGCNHMQCSKCKHDFCWMCLGDWKTHGSEYYECSRYKENPDIVNQSQQAQAREALKKYLFYFERWENHNKSLQLEAQTYQRIHEKIQERVMNNLGTWIDWQYLQNAAKLLAKCRYTLQYTYPYAYYMESGPRKKLFEYQQAQLEAEIENLSWKVERADSYDRGDLENQMHIAEQRRRTLLKDFHDT

SEQ ID NO: 7289 - protein, 700 aa, Homo sapiens
MASTVEGGDTALLPEFPRGPLDAYRARASFSWKELALFTEGEGMLRFKKTIFSALENDPLFARSPGADLSLEKYRELNFLRCKRIFEYDFLSVEDMFKSPLKVPALIQCLGMYDSSLAAKYLLHSLVFGSAVYSSGSERHLTYIQKIFRMEIFGCFALTELSHGSNTKAIRTTAHYDPATEEFIIHSPDFEAAKFWVGNMGKTATHAVVFAKLCVPGDQCHGLHPFIVQIRDPKTLLPMPGVMVGDIGKKLGQNGLDNGFAMFHKVRVPRQSLLNRMGDVTPEGTYVSPFKDVRQRFGASLGSLSSGRVSIVSLAILNLKLAVAIALRFSATRRQFGPTEEEEIPVLEYPMQQWRLLPYLAAVYALDHFSKSLFLDLVELQRGLASGDRSARQAELGREIHALASASKPLASWTTQQGIQECREACGGHGYLAMNRLGVLRDDNDPNCTYEGDNNILLQQTSNYLLGLLAHQVHDGACFRSPLKSVDFLDAYPGILDQKFEVSSVADCLDSAVALAAYKWLVCYLLRETYQKLNQEKRSGSSDFEARNKCQVSHGRPLALAFVELTVVQRFHEHVHQPSVPPSLRAVLGRLSALYALWSLSRHAALLYRGGYFSGEQAGEVLESAVLALCSQLKDDAVALVDVIAPPDFVLDSPIGRADGELYKNLWGAVLQESKVLERASWWPEFSVNKPVIGSLKSKL

SEQ ID NO: 7290 - protein, 339 aa, Homo sapiens
MAAEDELQLPRLPELFETGRQLLDEVEVATEPAGSRIVQEKVFKGLDLLEKAAEMLSQLDLFSRNEDLEEIASTDLKYLLVPAFQGALTMKQVNPSKRLDHLQRAREHFINYLTQCHCYHVAEFELPKTMNNSAENHTANSSMAYPSLVAMASQRQAKIQRYKQKKELEHRLSAMKSAVESGQADDERVREYYLLHLQRWIDISLEEIESIDQEIKILRERDSSREASTSNSSRQERPPVKPFILTRNMAQAKVFGAGYPSLPTMTVSDWYEQHRKYGALPDQGIAKAAPEEFRKAAQQQEEQEEKEEEDDEQTLHRAREWDDWKDTHPRGYGNRQNMG

SEQ ID NO: 7291 - protein, 184 aa, Homo sapiens
MREYKLVVLGSGGVGKSALTVQFVQGIFVEKYDPTIEDSYRKQVEVDCQQCMLEILDTAGTEQFTAMRDLYMKNGQGFALVYSITAQSTFNDLQDLREQILRVKDTEDVPMILVGNKCDLEDERVVGKEQGQNLARQWCNCAFLESSAKSKINVNEIFYDLVRQINRKTPVEKKKPKKKSCLLL

SEQ ID NO: 7292 - protein, 587 aa, Homo sapiens
MVSPRMSGLLSQTVILALIFLPQTRPAGVFELQIHSFGPGPGPGAPRSPCSARLPCRLFFRVCLKPGLSEEAAESPCALGAALSARGPVYTEQPGAPAPDLPLPDGLLQVPFRDAWPGTFSFIIETWREELGDQIGGPAWSLLARVAGRRRLAAGGPWARDIQRAGAWELRFSYRARCEPPAVGTACTRLCRPRSAPSRCGPGLRPCAPLEDECEAPLVCRAGCSPEHGFCEQPGECRCLEGWTGPLCTVPVSTSSCLSPRGPSSATTGCLVPGPGPCDGNPCANGGSCSETPRSFECTCPRGFYGLRCEVSGVTCADGPCFNGGLCVGGADPDSAYICHCPPGFQGSNCEKRVDRCSLQPCRNGGLCLDLGHALRCRCRAGFAGPRCEHDLDDCAGRACANGGTCVEGGGAHRCSCALGFGGRDCRERADPCAARPCAHGGRCYAHFSGLVCACAPGYMGARCEFPVHPDGASALPAAPPGLRPGDPQRYLLPPALGLLVAAGVAGAALLLVHVRRRGHSQDAGSRLLAGTPEPSVHALPDALNNLRTQEGSGDGPSSSVDWNRPEDVDPQGIYVISAPSIYAREA

SEQ ID NO: 7293 - protein, 1912 aa, Homo sapiens
MVHVARLLLLLLTFFLRTDAETPPRFTRTPVDQTGVSGGVASFICQATGDPRPKIVWNKKGKKVSNQRFEVIEFDDGSGSVLRIQPLRTPRDEAIYECVASNNVGEISVSTRLTVLREDQIPRGFPTIDMGPQLKVVERTRTATMLCAASGNPDPEITWFKDFLPVDTSNNNGRIKQLRSESIGGTPIRGALQIEQSEESDQGKYECVATNSAGTRYSAPANLYVRELREVRRVPPRFSIPPTNHEIMPGGSVNITCVAVGSPMPYVKWMLGAEDLTPEDDMPIGRNVLELNDVRQSANYTCVAMSTLGVIEAIAQITVKALPKPPGTPVVTESTATSITLTWDSGNPEPVSYYIIQHKPKNSEELYKEIDGVATTRYSVAGLSPYSDYEFRVVAVNNIGRGPPSEPVLTQTSEQAPSSAPRDVQARMLSSTTILVQWKEPEEPNGQIQGYRVYYTMDPTQHVNNWMKHNVADSQITTIGNLVPQKTYSVKVLAFTSIGDGPLSSDIQVITQTGVPGQPLNFKAEPESETSILLSWTPPRSDTIANYELVYKDGEHGEEQRITIEPGTSYRLQGLKPNSLYYFRLAARSPQGLGASTAEISARTMQSKPSAPPQDISCTSPSSTSILVSWQPPPVEKQNGIITEYSIKYTAVDGEDDKPHEILGIPSDTTKYLLEQLEKWTEYRITVTAHTDVGPGPESLSVLIRTNEDVPSGPPRKVEVEAVNSTSVKVSWRSPVPNKQHGQIRGYQVHYVRMENGEPKGQPMLKDVMLADAQWEFDDTTEHDMIISGLQPETSYSLTVTAYTTKGDGARSKPKLVSTTGAVPGKPRLVINHTQMNTALIQWHPPVDTFGPLQGYRLKFGRKDMEPLTTLEFSEKEDHFTATDIHKGASYVFRLSARNKVGFGEEMVKEISIPEEVPTGFPQNLHSEGTTSTSVQLSWQPPVLAERNGIITKYTLLYRDINIPLLPMEQLIVPADTTMTLTGLKPDTTYDVKVRAHTSKGPGPYSPSVQFRTLPVDQVFAKNFHVKAVMKTSVLLSWEIPENYNSAMPFKILYDDGKMVEEVDGRATQKLIVNLKPEKSYSFVLTNRGNSAGGLQHRVTAKTAPDVLRTKPAFIGKTNLDGMITVQLPEVPANENIKGYYIIIVPLKKSRGKFIKPWESPDEMELDELLKEISRKRRSIRYGREVELKPYIAAHFDVLPTEFTLGDDKHYGGFTNKQLQSGQEYVFFVLAVMEHAESKMYATSPYSDPVVSMDLDPQPITDEEEGLIWVVGPVLAVVFIICIVIAILLYKRKRAESDSRKSSIPNNKEIPSHHPTDPVELRRLNFQTPGMASHPPIPILELADHIERLKANDNLKFSQEYESIDPGQQFTWEHSNLEVNKPKNRYANVIAYDHSRVLLSAIEGIPGSDYVNANYIDGYRKQNAYIATQGSLPETFGDFWRMIWEQRSATVVMMTKLEERSRVKCDQYWPSRGTETHGLVQVTLLDTVELATYCVRTFALYKNGSSEKREVRQFQFTAWPDHGVPEHPTPFLAFLRRVKTCNPPDAGPMVVHCSAGVGRTGCFIVIDAMLERIKHEKTVDIYGHVTLMRAQRNYMVQTEDQYIFIHDALLEAVTCGNTEVPARNLYAYIQKLTQIETGENVTGMELEFKRLASSKAHTSRFISANLPCNKFKNRLVNIMPYESTRVCLQPIRGVEGSDYINASFIDGYRQQKAYIATQGPLAETTEDFWRMLWEHNSTIVVMLTKLREMGREKCHQYWPAERSARYQYFVVDPMAEYNMPQYILREFKVTDARDGQSRTVRQFQFTDWPEQGVPKSGEGFIDFIGQVHKTKEQFGQDGPISVHCSAGVGRTGVFITLSIVLERMRYEGVVDIFQTVKMLRTQRPAMVQTEDQYQFSYRAALEYLGSFDHYAT

SEQ ID NO: 7294 - protein, 299 aa, Homo sapiens
MEELLPDGQIWANMDPEERMLAAATAFTHICAGQGEGDVRREAQSIQYDPYSKASVAPGKRPALPVQLQYPHVESNVPSETVSEASQRLRKPVMKRKVLRRKPDGEVLVTDESIISESESGTENDQDLWDLRQRLMNVQFQEDKESSFDVSQKFNLPHEYQGISQDQLICSLQREGMGSPAYEQDLIVASRPKSFILPKLDQLSRNRGKTDRVARYFEYKRDWDSIRLPGEDHRKELRWGVREQMLCRAEPQSKPQHIYVPNNYLVPTEKKRSALRWGVRCDLANGVIPRKLPFPLSPS

SEQ ID NO: 7295 - protein, 862 aa, Homo sapiens
MRMCTPIRGLLMALAVMFGTAMAFAPIPRITWEHREVHLVQFHEPDIYNYSALLLSEDKDTLYIGAREAVFAVNALNISEKQHEVYWKVSEDKKAKCAEKGKSKQTECLNYIRVLQPLSATSLYVCGTNAFQPACDHLNLTSFKFLGKNEDGKGRCPFDPAHSYTSVMVDGELYSGTSYNFLGSEPIISRNSSHSPLRTEYAIPWLNEPSFVFADVIRKSPDSPDGEDDRVYFFFTEVSVEYEFVFRVLIPRIARVCKGDQGGLRTLQKKWTSFLKARLICSRPDSGLVFNVLRDVFVLRSPGLKVPVFYALFTPQLNNVGLSAVCAYNLSTAEEVFSHGKYMQSTTVEQSHTKWVRYNGPVPKPRPGACIDSEARAANYTSSLNLPDKTLQFVKDHPLMDDSVTPIDNRPRLIKKDVNYTQIVVDRTQALDGTVYDVMFVSTDRGALHKAISLEHAVHIIEETQLFQDFEPVQTLLLSSKKGNRFVYAGSNSGVVQAPLAFCGKHGTCEDCVLARDPYCAWSPPTATCVALHQTESPSRGLIQEMSGDASVCPDKSKGSYRQHFFKHGGTAELKCSQKSNLARVFWKFQNGVLKAESPKYGLMGRKNLLIFNLSEGDSGVYQCLSEERVKNKTVFQVVAKHVLEVKVVPKPVVAPTLSVVQTEGSRIATKVLVASTQGSSPPTPAVQATSSGAITLPPKPAPTGTSCEPKIVINTVPQLHSEKTMYLKSSDNRLLMSLFLFFFVLFLCLFFYNCYKGYLPRQCLKFRSALLIGKKKPKSDFCDREQSLKETLVEPGSFSQQNGEHPKPALDTGYETEQDTITSKVPTDREDSQRIDDLSARDKPFDVKCELKFADSDADGD

SEQ ID NO: 7296 - protein, 871 aa, Homo sapiens
MDGESEVDFSSNSITPLWRRRSIPQPHQVLGRSKPRPQSYQSPNGLLITDFPVEDGGTLLAAQIPAQVPTASDSRTVHRSPLLLGAQRRAVANGGTASPEYRAASPRLRRPKSPKLPKAVPGGSPKSPANGAVTLPAPPPPPVLRPPRTPNAPAPCTPEEDLTGLTASPVPSPTANGLAANNDSPGSGSQSGRKAKDPERGLFPGPQKSSSEQKLPLQRLPSQENELLENPSVVLSTNSPAALKVGKQQIIPKSLASEIKISKSNNQNVEPHKRLLKVRSMVEGLGGPLGHAGEESEVDNDVDSPGSLRRGLRSTSYRRAVVSGFDFDSPTSSKKKNRMSQPVLKVVMEDKEKFSSLGRIKKKMLKGQGTFDGEENAVLYQNYKEKALDIDSDEESEPKEQKSDEKIVIHHKPLRSTWSQLSAVKRKGLSQTVSQEERKRQEAIFEVISSEHSYLLSLEILIRMFKNSKELSDTMTKTERHHLFSNITDVCEASKKFFIELEARHQNNIFIDDISDIVEKHTASTFDPYVKYCTNEVYQQRTLQKLLATNPSFKEVLSRIESHEDCRNLPMISFLILPMQRVTRLPLLMDTICQKTPKDSPKYEVCKRALKEVSKLVRLCNEGARKMERTEMMYTINSQLEFKIKPFPLVSSSRWLVKRGELTAYVEDTVLFSRRTSKQQVYFFLFNDVLIITKKKSEESYNVNDYSLRDQLLVESCDNEELNSSPGKNSSTMLYSRQSSASHLFTLTVLSNHANEKVEMLLGAETQSERARWITALGHSSGKPPADRTSLTQVEIVRSFTAKQPDELSLQVADVVLIYQRVSDGWYEGERLRDGERGWFPMECAKEITCQATIDKNVERMGRLLGLETNV

SEQ ID NO: 7297 - protein, 361 aa, Homo sapiens
MTQQPLRGVTSLRFNQDQSCFCCAMETGVRIYNVEPLMEKGHLDHEQVGSMGLVEMLHRSNLLALVGGGSSPKFSEISAVLIWDDAREGKDSKEKLVLEFTFTKPVLSVRMRHDKIVIVLKNRIYVYSFPDNPRKLFEFDTRDNPKGLCDLCPSLEKQLLVFPGHKCGSLQLVDLASTKPGTSSAPFTINAHQSDIACVSLNQPGTVVASASQKGTLIRLFDTQSKEKLVELRRGTDPATLYCINFSHDSSFLCASSDKGTVHIFALKDTRLNRRSALARVGKVGPMIGQYVDSQWSLASFTVPAESACICAFGRNTSKNVNSVIAICVDGTFHKYVFTPDGNCNREAFDVYLDICDDDDF

SEQ ID NO: 7298 - protein, 115 aa, Homo sapiens [sequence omitted]

SEQ ID NO: 7299 - protein, 235 aa, Homo sapiens
MNPVYSPVQPGAPYGNPKNMAYTGYPTAYPAAAPAYNPSLYPTNSPSYAPATLLMKQAWPQNSSSCGTEGTFHLPVDTGTENRTYQASSAAFRYTAGTPYKVPPTQSNTAPPPYSPSPNPYQTAMYPIRSAYPQQNLYAQGAYYTQPVYAAQPHVIHHTTVVQPNSIPSAIYPAPVAAPRTNGVAMGMVAGTTMAMSAGTLLTTPQHTAIGAHPVSMPTYRAQGTPAYSYVPPHW

SEQ ID NO: 7300 - protein, 164 aa, Homo sapiens
MDGSGEQPRGGGPTSSEQIMKTGALLLQGFIQDRAGRMGGEAPELALDPVPQDASTKKLSECLKRIGDELDSNMELQRMIAAVDTDSPREVFFRVAADMFSDGNFNWGRVVALFYFASKLVLKAGVKWRDLGSLQPLPPGFKRFTCLSIPRSWDYRPCAPRCRN

SEQ ID NO: 7301 - protein, 558 aa, Homo sapiens
MAALTRDPQFQKLQQWYREHRSELNLRRLFDANKDRFNHFSLTLNTNHGHILVDYSKNLVTEDVMRMLVDLAKSRGVEAARERMFNGEKINYTEGRAVLHVALRNRSNTPILVDGKDVMPEVNKVLDKMKSFCQRVRSGDWKGYTGKTITDVINIGIGGSDLGPLMVTEALKPYSSGGPRVWYVSNIDGTHIAKTLAQLNPESSLFIIASKTFTTQETITNAETAKEWFLQAAKDPSAVAKHFVALSTNTTKVKEFGIDPQNMFEFWDWVGGRYSLWSAIGLSIALHVGFDNFEQLLSGAHWMDQHFRTTPLEKNAPVLLALLGIWYINCFGCETHAMLPYDQYLHRFAAYFQQGDMESNGKYITKSGTRVDHQTGPIVWGEPGTNGQHAFYQLIHQGTKMIPCDFLIPVQTQHPIRKGLHHKILLANFLAQTEALMRGKSTEEARKELQAAGKSPEDLERLLPHKVFEGNRPTNSIVFTKLTPFMLGALVAMYEHKIFVQGIIWDINSFDQWGVELGKQLAKKIEPELDGSAQVTSHDASTNGLINFIKQQREARVQ

SEQ ID NO: 7302 - protein, 356 aa, Homo sapiens
MLARAARGTGALLLRGSLLASGRAPRRASSGLPRNTVVLFVPQQEAWVVERMGRFHRILEPGLNILIPVLDRIRYVQSLKEIVINVPEQSAVTLDNVTLQIDGVLYLRIMDPYKASYGVEDPEYAVTQLAQTTMRSELGKLSLDKVFRERESLNASIVDAINQAADCWGIRCLRYEIKDIHVPPRVKESMQMQVEAERRKRATVLESEGTRESAINVAEGKKQAQILASEAEKAEQINQAAGEASAVLAKAKAKAEAIRILAAALTQHNGDAAASLTVAEQYVSAFSKLAKDSNTILLPSNPGDVTSMVAQAMGVYGALTKAPVPGTPDSLSSGSSRDVQGTDASLDEELDRVKMS

SEQ ID NO: 7303 - protein, 764 aa, Homo sapiens
MLLFVLTCLLAVFPAISTKSPIFGPEEVNSVEGNSVSITCYYPPTSVNRHTRKYWCRQGARGGCITLISSEGYVSSKYAGRANLTNFPENGTFVVNIAQLSQDDSGRYKCGLGINSRGLSFDVSLEVSQGPGLLNDTKVYTVDLGRTVTINCPFKTENAQKRKSLYKQIGLYPVLVIDSSGYVNPNYTGRIRLDIQGTGQLLFSVVINQLRLSDAGQYLCQAGDDSNSNKKNADLQVLKPEPELVYEDLRGSVTFHCALGPEVANVAKFLCRQSSGENCDVVVNTLGKRAPAFEGRILLNPQDKDGSFSVVITGLRKEDAGRYLCGAHSDGQLQEGSPIQAWQLFVNEESTIPRSPTVVKGVAGGSVAVLCPYNRKESKSIKYWCLWEGAQNGRCPLLVDSEGWVKAQYEGRLSLLEEPGNGTFTVILNQLTSRDAGFYWCLTNGDTLWRTTVEIKIIEGEPNLKVPGNVTAVLGETLKVPCHFPCKFSSYEKYWCKWNNTGCQALPSQDEGPSKAFVNCDENSRLVSLTLNLVTRADEGWYWCGVKQGHFYGETAAVYVAVEERKAAGSRDVSLAKADAAPDEKVLDSGFREIENKAIQDPRLFAEEKAVADTRDQADGSRASVDSGSSEEQGGSSRALVSTLVPLGLVLAVGAVAVGVARARHRKNVDRVSIRSYRTDISMSDFENSREFGANDNMGASSITQETSLGGKEEFVATTESTTETKEPKKAKRSSKEEAEMAYKDFLLQSSTVAAEAQDGPQEA

SEQ ID NO: 7304 - protein, 451 aa, Homo sapiens
MKTKLNIYNMQFLLFVFLVWDPARLVLANIQEDEAKNNITIFTRILDRLLDGYDNRLRPGLGDSITEVFTNIYVTSFGPVSDTDMEYTIDVFFRQKWKDERLKFKGPMNILRLNNLMASKIWTPDTFFHNGKKSVAHNMTMPNKLLRIQDDGTLLYTMRLTVQAECPMHLEDFPMDAHSCPLKFGSYAYTTSEVTYIWTYNASDSVQVAPDGSRLNQYDLLGQSIGKETIKSSTGEYTVMTAHFHLKRKIGYFVIQTYLPCIMTVILSQVSFWLNRESVPARTVFGVTTVLTMTTLSISARNSLPKVAYATAMDWFIAVCYAFVFSALIEFATVNYFTKRGWAWDGKSVVNDKKKEKASVMIQNNAYAVAVANYAPNLSKDPVLSTISKSATTPEPNKKPENKPAEAKKTFNSVSKIDRMSRIVFPVLFGTFNLVYWATYLNREPVLGVSP

SEQ ID NO: 7305 - protein, 490 aa, Homo sapiens
MKPKLMYQELKVPAEEPANELPMNEIEAWKAAEKKARWVLLVLILAVVGFGALMTQLFLWEYGDLHLFGPNQRPAPCYDPCEAVLVESIPEGLDFPNASTGNPSTSQAWLGLLAGAHSSLDIASFYWTLTNNDTHTQEPSAQQGEEVLRQLQTLAPKGVNVRIAVSKPSGPQPQADLQALLQSGAQVRMVDMQKLTHGVLHTKFWVVDQTHFYLGSANMDWRSLTQVKELGVVMYNCSCLARDLTKIFEAYWFLGQAGSSIPSTWPRFYDTRYNQETPMEICLNGTPALAYLASAPPPLCPSGRTPDLKALLNVVDNARSFIYVAVMNYLPTLEFSHPHRFWPAIDDGLRRATYERGVKVRLLISCWGHSEPSMRAFLLSLAALRDNHTHSDIQVKLFVVPADEAQARIPYARVNHNKYMVTERATYIGTSNWSGNYFTETAGTSLLVTQNGRGGLRSQLEAIFLRDWDSPYSHDLDTSADSVGNACRLL

SEQ ID NO: 7306 - protein, 296 aa, Homo sapiens
MATTKRVLYVGGLAEEVDDKVLHAAFIPFGDITDIQIPLDYETEKHRGFAFVEFELAEDAAAAIDNMNESELFGRTIRVNLAKPMRIKEGSSRPVWSDDDWLKKFSGKTLEENKEEEGSEPPKAETQEGEPIAKKARSNPQVYMDIKIGNKPAGRIQMLLRSDVVPMTAENFRCLCTHEKGFGFKGSSFHRIIPQFMCQGGDFTNHNGTGGKSIYGKKFDDENFILKHTGPGLLSMANSGPNTNGSQFFLTCDKTDWLDGKHVVFGEVTEGLDVLRQIEKQEESAITSQPRSWKLT

SEQ ID NO: 7307 - protein, 401 aa, Homo sapiens
MGLKALCLGLLCVLFVSHFYTPMPDNIEESWKIMALDAIAKTCTFTAMCFENMRIMRYEEFISMIFRLDYTQPLSDEYITVTDTTFVDIPVRLYLPKRKSETRRRAVIYFHGGGFCFGSSKQRAFDFLNRWTANTLDAVVVGVDYRLAPQHHFPAQFEDGLAAVKFFLLEKILTKYGVDPTRICIAGDSSGGNLATAVTQQVQNDAEIKHKIKMQVLLYPGLQITDSYLPSHRENEHGIVLTRDVAIKLVSLYFTKDEALPWAMRRNQHMPLESRHLFKFVNWSILLPEKYRKDYVYTEPILGGLSYSLPGLTDSRALPLLANDSQLQNLPLTYILTCQHDLLRDDGLMYVTRLRNVGVQVVHEHIEDGIHGALSFMTSPFYLRLGLRIRDMYVSWLDKNL

SEQ ID NO: 7308 - protein, 813 aa, Homo sapiens
MGWRPRRARGTPLLLLLLLLLLWPVPGAGVLQGHIPGQPVTPHWVLDGQPWRTVSLEEPVSKPDMGLVALEAEGQELLLELEKNHRLLAPGYIETHYGPDGQPVVLAPNHTDHCHYQGRVRGFPDSWVVLCTCSGMSGLITLSRNASYYLRPWPPRGSKDFSTHEIFRMEQLLTWKGTCGHRDPGNKAGMTSLPGGPQSRGRREARRTRKYLELYIVADHTLFLTRHRNLNHTKQRLLEVANYVDQLLRTLDIQVALTGLEVWTERDRSRVTQDANATLWAFLQWRRGLWAQRPHDSAQLLTGRAFQGATVGLAPVEGMCRAESSGGVSTDHSELPIGAAATMAHEIGHSLGLSHDPDGCCVEAAAESGGCVMAAATGHPFPRVFSACSRRQLRAFFRKGGGACLSNAPDPGLPVPPALCGNGFVEAGEECDCGPGQECRDLCCFAHNCSLRPGAQCAHGDCCVRCLLKPAGALCRQAMGDCDLPEFCTGTSSHCPPDVYLLDGSPCARGSGYCWDGACPTLEQQCQQLWGPGSHPAPEACFQVVNSAGDAHGNCGQDSEGHFLPCAGRDALCGKLQCQGGKPSLLAPHMVPVDSTVHLDGQEVTCRGALALPSAQLDLLGLGLVEPGTQCGPRMVCQSRRCRKNAFQELQRCLTACHSHGVCNSNHNCHCAPGWAPPFCDKPGFGGSMDSGPVQAENHDTFLLAMLLSVLLPLLPGAGLAWCCYRLPGAHLQRCSWGCRRDPACSGPKDGPHRDHPLGGVHPMELGPTATGQPWPLDPENSHEPSSHPEKPLPAVSPDPQADQVQMPRSCLW

SEQ ID NO: 7309 - protein, 328 aa, Homo sapiens
MLVRRGARAGPRMPRGWTALCLLSLLPSGFMSLDNNGTATPELPTQGTFSNVSTNVSYQETTTPSTLGSTSLHPVSQHGNEATTNITETTVKFTSTSVITSVYGNTNSSVQSQTSVISTVFTTPANVSTPETTLKPSLSPGNVSDLSTTSTSLATSPTKPYTSSSPILSDIKAEIKCSGIREVKLTQGICLEQNKTSSCAEFKKDRGEGLARVLCGEEQADADAGAQVCSLLLAQSEVRPQCLLLVLANRTEISSKLQLMKKHQSDLKKLGILDFTEQDVASHQSYSQKTLIALVTSGALLAVLGITGYFLMNRRSWSPTGERLELEP

SEQ ID NO: 7310 - protein, 122 aa, Homo sapiens
MKLLTGLVFCSLVLGVSSRSFFSFLGEAFDGARDMWRAYSDMREANYIGSDKYFHARGNYDAAKRGPGGAWAAEVITDARENIQRFFGHGAEDSLADQAANEWGRSGKDPNHFRPAGLPEKY

SEQ ID NO: 7311 - protein, 126 aa, Homo sapiens; identical to SEQ ID NO: 5395

SEQ ID NO: 7312 - protein, 267 aa, Homo sapiens
MALVLILQLLTLWPLCHTDITPSVAIIVPPASYHPKPWLGAQPATVVTPGVNVTLRCRAPQPAWRFGLFKPGEIAPLLFRDVSSELAEFFLEEVTPAQGGSYRCCYRRPDWGPGVWSQPSDVLELLVTEELPRPSLVALPGPVVGPGANVSLRCAGRLRNMSFVLYREGVAAPLQYRHSAQPWADFTLLGARAPGTYSCYYHTPSAPYVLSQRSEVLVISWEDSGSSDYTRGNLVRLGLAGLVLISLGALVTFDWRSQNRAPAGIRP

SEQ ID NO: 7313 - protein, 86 aa, Homo sapiens
MPSLPAPPAPLLLLGLLLLGSRPARGAGPEPPVLPIRSEKEPLPVRGAAGCTFGGKVYALDETWHPDLGEPFGVMRCVLCACEAGP

SEQ ID NO: 7314 - protein, 208 aa, Homo sapiens
MVFYFTSSSVNSSAYTIYMGKDKYENEDLIKHGWPEDIWFHVDKLSSAHVYLRLHKGENIEDIPKEVLMDCAHLVKANSIQGCKMNNVNVVYTPWSNLKKTADMDVGQIGFHRQKDVKIVTVEKKVNEILNRLEKTKVERFPDLAAEKECRDREERNEKKAQIQEMKKREKEEMKKKREMDELRSYSSLMKVENMSSNQDGNDSDEFM

SEQ ID NO: 7315 - protein, 263 aa, Homo sapiens
MRLGLCVVALVLSWTHLTISSRGIKGKRQRRISAEGSQACAKGCELCSEVNGCLKCSPKLFILLERNDIRQVGVCLPSCPPGYFDARNPDMNKCIKCKIEHCEACFSHNFCTKCKEGLYLHKGRCYPACPEGSSAANGTMECSSPAQCEMSEWSPWGPCSKKQQLCGFRRGSEERTRRVLHAPVGDHAACSDTKETRRCTVRRVPCPEGQKRRKGGQGRRENANRNLARKESKEAGAGSRRRKGQQQQQQQGTVGPLTSAGPA

SEQ ID NO: 7316 - protein, 641 aa, Homo sapiens
MTTPALLPLSGRRIPPLNLGPPSFPHHRATLRLSEKFILLLILSAFITLCFGAFFFLPDSSKHKRFDLGLEDVLIPHVDAGKGAKNPGVFLIHGPDEHRHREEEERLRNKIRADHEKALEEAKEKLRKSREEIRAEIQTEKNKVVQEMKIKENKPLPPVPIPNLVGIRGGDPEDNDIREKREKIKEMMKHAWDNYRTYGWGHNELRPIARKGHSPNIFGSSQMGATIVDALDTLYIMGLHDEFLDGQRWIEDNLDFSVNSEVSVFEVNIRFIGGLLAAYYLSGEEIFKIKAVQLAEKLLPAFNTPTGIPWAMVNLKSGVGRNWGWASAGSSILAEFGTLHMEFIHLSYLTGDLTYYKKVMHIRKLLQKMDRPNGLYPNYLNPRTGRWGQYHTSVGGLGDSFYEYLLKAWLMSDKTDHEARKMYDDAIEAIEKHLIKKSRGGLTFIGEWKNGHLEKKMGHLACFAGGMFALGADGSRADKAGHYLELGAEIARTCHESYDRTALKLGPESFKFDGAVEAVAVRQAEKYYILRPEVIETYWYLWRFTHDPRYRQWGWEAALAIEKYCRVNGGFSGVKDVYSSTPTHDDVQQSFFLAETLKYLYLLFSGDDLLPLDHWVFNTEAHPLPVLHLANTTLSGNPAVR

SEQ ID NO: 7317 - protein, 4646 aa, Homo sapiens [sequence omitted]

SEQ ID NO: 7318 - protein, 1541 aa, Homo sapiens
MSFLEEARAAGRAVVLALVLLLLPAVPVGASVPPRPLLPLQPGMPHVCAEQELTLVGRRQPCVQALSHTVPVWKAGCGWQAWCVGHERRTVYYMGYRQVYTTEARTVLRCCRGWMQQPDEEGCLSAECSASLCFHGGRCVPGSAQPCHCPPGFQGPRCQYDVDECRTHNGGCQHRCVNTPGSYLCECKPGFRLHTDSRTCLAINSCALGNGGCQHHCVQLTITRHRCQCRPGFQLQEDGRHCVRRSPCANRNGSCMHRCQVVRGLARCECHVGYQLAADGKACEDVDECAAGLAQCAHGCLNTQGSFKCVCHAGYELGADGRQCYRIEMEIVNSCEANNGGCSHGCSHTSAGPLCTCPRGYELDTDQRTCIDVDDCADSPCCQQVCTNNPGGYECGCYAGYRLSADGCGCEDVDECASSRGGCEHHCTNLAGSFQCSCEAGYRLHEDRRGCSPLEEPMVDLDGELPFVRPLPHIAVLQDELPQLFQDDDVGADEEEAELRGEHTLTEKFVCLDDSFGHDCSLTCDDCRNGGTCLLGLDGCDCPEGWTGLICNETCPPDTFGKNCSFSCSCQNGGTCDSVTGACRCPPGVSGTNCEDGCPKGYYGKHCRKKCNCANRGRCHRLYGACLCDPGLYGRFCHLTCPPWAFGPGCSEECQCVQPHTQSCDKRDGSCSCKAGFRGERCQAECELGYFGPGCWQACTCPVGVACDSVSGECGKRCPAGFQGEDCGQECPVGTFGVNCSSSCSCGGAPCHGVTGQCRCPPGRTGEDCEADCPEGRWGLGCQEICPACQHAARCDPETGACLCLPGFVGSRCQDVCPAGWYGPSCQTRCSCANDGHCHPATGHCSCAPGWTGFSCQRACDTGHWGPDCSHPCNCSAGHGSCDAISGLCLCEAGYVGPRCEQQCPQGHFGPGCEQRCQCQHGAACDHVSGACTCPAGWRGTFCEHACPAGFFGLDCRSACNCTAGAACDAVNGSCLCPAGRRGPRCAETCPAHTYGHNCSQACACFNGASCDPVHGQCHCAPGWMGPSCLQACPAGLYGDNCRHSCLCQNGGTCDPVSGHCACPEGWAGLACEKECLPRDVRAGCRHSGGCLNGGLCDPHTGRCLCPAGWTGDKCQSPCLRGWFGEACAQRCSCPPGAACHHVTGACRCPPGFTGSGCEQACPPGSFGEDCAQMCQCPGENPACHPATGTCSCAAGYHGPSCQQRCPPGRYGPGCEQLCGCLNGGSCDAATGACRCPTGFLGTDCNLTCPQGRFGPNCTHVCGCGQGAACDPVTGTCLCPPGRAGVRCERGCPQNRFGVGCEHTCSCRNGGLCHASNGSCSCGLGWTGRHCELACPPGRYGAACHLECSCHNNSTCEPATGTCRCGPGFYGQACEHPCPPGFHGAGCQGLCWCQHGAPCDPISGRCLCPAGFHGHFCERGCEPGSFGEGCHQRCDCDGGAPCDPVTGLCLCPPGRSGATCNLDCRRGQFGPSCTLHCDCGGGADCDPVSGQCHCVDGYMGPTCREGGPLRLPENPSLAQGSAGTLPASSRPTSRSGGPARH

SEQ ID NO: 7319 - protein, 2426 aa, Homo sapiens
MATNIEQIFRSFVVSKFREIQQELSSGRNEGQLNGETNTPIEGNQAGDAAASARSLPNEEIVQKIEEVLSGVLDTELRYKPDLKEGSRKSRCVSVQTDPTDEIPTKKSKKHKKHKNKKKKKKKEKEKKYKRQPEESESKTKSHDDGNIDLESDSFLKFDSEPSAVALELPTRAFGPSETNESPAVVLEPPVVSMEVSEPHILETLKPATKTAELSVVSTSVISEQSEQSVAVMPEPSMTKILDSFAAAPVPTTTLVLKSSEPVVTMSVEYQMKSVLKSVESTSPEPSKIMLVEPPVAKVLEPSETLVVSSETPTEVYPEPSTSTTMDFPESSAIEALRLPEQPVDVPSEIADSSMTRPQELPELPKTTALELQESSVASAMELPGPPATSMPELQGPPVTPVLELPGPSATPVPELPGPLSTPVPELPGPPATAVPELPGPSVTPVPQLSQELPGLPAPSMGLEPPQEVPEPPVMAQELPGLPLVTAAVELPEQPAVTVAMELTEQPVTTTELEQPVGMTTVEHPGHPEVTTATGLLGQPEATMVLELPGQPVATTALELPGQPSVTGVPELPGLPSATRALELSGQPVATGALELPGPLMAAGALEFSGQSGAAGALELLGQPLATGVLELPGQPGAPELPGQPVATVALEISVQSVVTTSELSTMTVSQSLEVPSTTALESYNTVAQELPTTLVGETSVTVGVDPLMAPESHILASNTMETHILASNTMDSQMLASNTMDSQMLASNTMDSQMLASSTMDSQMLATSSMDSQMLATSSMDSQMLATSTMDSQMLATSSMDSQMLATSSMDSQMLATSSMDSQMLATSSMDSQMLATSTMDSQMLATSTMDSQMLATSSMDSQMLASGTMDSQMLASGTMDAQMLASGTMDAQMLASSTQDSAMLGSKSPDPYRLAQDPYRLAQDPYRLGHDPYRLGHDAYRLGQDPYRLGHDPYRLTPDPYRMSPRPYRIAPRSYRIAPRPYRLAPRPLMLASRRSMMMSYAAERSMMSSYERSMMSYERSMMSPMAERSMMSAYERSMMSAYERSMMSPMAERSMMSAYERSMMSAYERSMMSPMADRSMMSMGADRSMMSSYSAADRSMMSSYSAADRSMMSSYTADRSMMSMAADSYTDSYTDTYTEAYMVPPLPPEEPPTMPPLPPEEPPMTPPLPPEEPPEGPALPTEQSALTAENTWPTEVPSSPSEESVSQPEPPVSQSEISEPSAVPTDYSVSASDPSVLVSEAAVTVPEPPPEPESSITLTPVESAVVAEEHEVVPERPVTCMVSETPAMSAEPTVLASEPPVMSETAETFDSMRASGHVASEVSTSLLVPAVTTPVLAESILEPPAMAAPESSAMAVLESSAVTVLESSTVTVLESSTVTVLEPSVVTVPEPPVVAEPDYVTIPVPVVSALEPSVPVLEPAVSVLQPSMIVSEPSVSVQESTVTVSEPAVTVSEQTQVIPTEVAIESTPMILESSIMSSHVMKGINLSSGDQNLAPEIGMQEIALHSGEEPHAEEHLKGDFYESEHGINIDLNINNHLIAKEMEHNTVCAAGTSPVGEIGEEKILPTSETKQRTVLDTYPGVSEADAGETLSSTGPFALEPDATGTSKGIEFTTASTLSLVNKYDVDLSLTTQDTEHDMVISTSPSGGSEADIEGPLPAKDIHLDLPSNNNLVSKDTEEPLPVKESDQTLAALLSPKESSGGEKEVPPPPKETLPDSGFSANIEDINEADLVRPLLPKDMERLTSLRAGIEGPLLASDVGRDRSAASPVVSSMPERASESSSEEKDDYEIFVKVKDTHEKSKKNKNRDKGEKEKKRDSSLRSRSKRSKSSEHKSRKRTSESRSRARKRSSKSKSHRSQTRSRSRSRRRRRSSRSRSKSRGRRSVSKEKRKRSPKHRSKSRERKRKRSSSRDNRKTVRARSRTPSRRSRSHTPSRRRRSRSVGRRRSFSISPSRRSRTPSRRSRTPSRRSRTPSRRSRTPSRRSRTPSRRSRTPSRRRRSRSVVRRRSFSISPVRLRRSRTPLRRRFSRSPIRRKRSRSSERGRSPKRLTDLDKAQLLEIAKANAAAMCAKAGVPLPPNLKPAPPPTIEEKVAKKSGGATIEELTEKCKQIAQSKEDDDVIVNKPHVSDEEEEEPPFYHHPFKLSEPKPIFFNLNIAAAKPTPPKSQVTLTKEFPVSSGSQHRKKEADSVYGEWVPVEKNGEENKDDDNVFSSNLPSEPVDISTAMSERALAQKRLSENAFDLEAMSMLNRAQERIDAWAQLNSIPGQFTGSTGVQVLTQEQLANTGAQAWIKKDQFLRAAPVTGGMGAVLMRKMGWREGEGLGKNKEGNKEPILVDFKTDRKGLVAVGERAQKRSGNFSAAMKDLSGKHPVSALMEICNKRRWQPPEFLLVHDSGPDHRKHFLFRVLRNGALTRPNCMFFLNRY

SEQ ID NO: 7320 - protein, 200 aa, Homo sapiens
MALWMRLLPLLALLALWGPDPAAAFVNQHLCGSHLVEALYLVCGERGFFYTPKTRREAEDLQASALSLSSSTSTWPEGLDATARAPPALVVTANIGQAGGSSSRQFRQRALGTSDSPVLFIHCPGAAGTAQGLEYRGRRVTTELVWEEVDSSPQPQGSESLPAQPPAQPAPQPEPQQAREPSPEVSCCGLWPRRPQRSQN

SEQ ID NO: 7321 - protein, 475 aa, Homo sapiens
YSTPVFSQKMTVWILLLLSLYPGFTSQKSDDDYEDYASNKTWVLTPKVPEGDVTVILNNLLEGYDNKLRPDIGVKPTLIHTDMYVNSIGPVNAINMEYTIDIFFAQTWYDRRLKFNSTIKVLRLNSNMVGKIWIPDTFFRNSKKADAHWITTPNRMLRIWNDGRVLYTLRLTIDAECQLQLHNFPMDEHSCPLEFSSYGYPREEIVYQWKRSSVEVGDTRSWRLYQFSFVGLRNTTEVVKTTSEDKLHEILVNLTLGDYVVMSVYFDLSRRMGYFTIQTYIPCTLIVVLSWVSFWINKDAVPARTSLGITTVLTMTTLSTIARKSLPKVSYVTAMDLFVSVCFIFVFSALVEYGTLHYFVSNRKPSKDKDKKKKNPLLRMFSFKAPTIDIRPRSATIQMNNATHLQERDEEYGYECLDGKDCASFFCCFEDCRTGAWRHGRIHIRIAKMDSYARIFFPTAFCLFNLVYWVSYLYL

SEQ ID NO: 7322 - protein, 377 aa, Homo sapiens
MASSEQAEQPSQPSSTPGSENVLPREPLIATAVKFLQNSRVRQSPLATRRAFLKKKGLTDEEIDMAFQQSGTAADEPSSLGPATQVVPVQPPHLISQPYSPAGSRWRDYGALAIIMAGIAFGFHQLYKKYLLPLILGGREDRKQLERMEAGLSELSGSVAQTVTQLQTTLASVQELLIQQQQKIQELAHELAAAKATTSTNWILESQNINELKSEINSLKGLLLNRRQFPPSPSAPKIPSWQIPVKSPSPSSPAAVNHHSSSDISPVSNESTSSSPGKEGHSPEGSTVTYHLLGPQEEGEGVVDVKGQVRMEVQGEEEKREDKEDEEDEEDDDVSHVDEEDCLGVQREDRRGGDGQINEQVEKLRRPEGASNESERD

SEQ ID NO: 7323 - protein, 852 aa, Homo sapiens
MLSGKKAAAAAAAAAAAATGTEAGPGTAGGSENGSEVAAQPAGLSGPAEVGPGAVGERTPRKKEPPRASPPGGLAEPPGSAGPQAGPTVVPGSATPMETGIAETPEGRRTSRRKRAKVEYREMDESLANLSEDEYYSEEERNAKAEKEKKLPPPPPQAPPEEENESEPEEPSGVEGAAFQSRLPHDRMTSQEAACFPDIISGPQQTQKVFLFIRNRTLQLWLDNPKIQLTFEATLQQLEAPYNSDTVLVHRVHSYLERHGLINFGIYKRIKPLPTKKTGKVIIIGSGVSGLAAARQLQSFGMDVTLLEARDRVGGRVATFRKGNYVADLGAMVVTGLGGNPMAVVSKQVNMELAKIKQKCPLYEANGQAVPKEKDEMVEQEFNRLLEATSYLSHQLDFNVLNNKPVSLGQALEVVIQLQEKHVKDEQIEHWKKIVKTQEELKELLNKMVNLKEKIKELHQQYKEASEVKPPRDITAEFLVKSKHRDLTALCKEYDELAETQGKLEEKLQELEANPPSDVYLSSRDRQILDWHFANLEFANATPLSTLSLKHWDQDDDFEFTGSHLTVRNGYSCVPVALAEGLDIKLNTAVRQVRYTASGCEVIAVNTRSTSQTFIYKCDAVLCTLPLGVLKQQPPAVQFVPPLPEWKTSAVQRMGFGNLNKVVLCFDRVFWDPSVNLFGHVGSTTASRGELFLFWNLYKAPILLALVAGEAAGIMENISDDVIVGRCLAILKGIFGSSAVPQPKETVVSRWRADPWARGSYSYVAAGSSGNDYDLMAQPITPGPSIPGAPQPIPRLFFAGEHTIRNYPATVHGALLSGLREAGRIADQFLGAMYTLPRQATPGVPAQQSPSM

SEQ ID NO: 7324 - protein, 944 aa, Homo sapiens
MAAVAAVAARRRRSWASLVLAFLGVCLGITLAVDRSNFKTCEESSFCKRQRSIRPGLSPYRALLDSLQLGPDSLTVHLIHEVTKVLLVLELQGLQKNMTRFRIDELEPRRPRYRVPDVLVADPPIARLSVSGRDENSVELTMAEGPYKIILTARPFRLDLLEDRSLLLSVNARGLLEFEHQRAPRVSQGSKDPAEGDGAQPEETPRDGDKPEETQGKAEKDEPGAWEETFKTHSDSKPYGPMSVGLDFSLPGMEHVYGIPEHADNLRLKVTEGGEPYRLYNLDVFQYELYNPMALYGSVPVLLAHNPHRDLGIFWLNAAETWVDISSNTAGKTLFGKMMDYLQGSGETPQTDVRWMSETGIIDVFLLLGPSISDVFRQYASLTGTQALPPLFSLGYHQSRWNYRDEADVLEVDQGFDDHNLPCDVIWLDIEHADGKRYFTWDPSRFPQPRTMLERLASKRRKLVAIVDPHIKVDSGYRVHEELRNLGLYVKTRDGSDYEGWCWPGSAGYPDFTNPTMRAWWANMFSYDNYEGSAPNLFVWNDMNEPSVFNGPEVTMLKDAQHYGGWEHRDVHNIYGLYVHMATADGLRQRSGGMERPFVLARAFFAGSQRFGAVWTGDNTAEWDHLKISIPMCLSLGLVGLSFCGADVGGFFKNPEPELLVRWYQMGAYQPFFRAHAHLDTGRREPWLLPSQHNDIIRDALGQRYSLLPFWYTLLYQAHREGIPVMRPLWVQYPQDVTTFNIDDQYLLGDALLVHPVSDSGAHGVQVYLPGQGEVWYDIQSYQKHHGPQTLYLPVTLSSIPVFQRGGTIVPRWMRVRRSSECMKDDPITLFVALSPQGTAQGELFLDDGHTFNYQTRQEFLLRRFSFSGNTLVSSSADPEGHFETPIWIERVVIIGAGKPAAVVLQTKGSPESRLSFQHDPETSVLVLRKPGINVASDWSIHLR

SEQ ID NO: 7325 - protein, 1525 aa, Homo sapiens
MSGTQSTITDRFPLKKPIRHGSILNRESPTDKKQKVERIASHDFDPTGLVQRCVIIQKDDNGFGLTVSGDNPVFVQSVKEDGAAMRAGVQTGDRIIKVNGTLVTHSNHLEVVKLIKSGSYVALTVQGRPPGSPQIPLADSEVEPSVIGHMSPIMTSPHSPGASGNMERITSPVLMGEENNVVHNQKVEILRKMLQKEQERLQLLQEDYNRTPAQRLLKEIQEAKKHIPQLQEQLSKATGSAQDGAVVTPSRPLGDTLTVSEAETDPGDVLGRTDCSSGDASRPSSDNADSPKSGPKERIYLEENPEKSETIQDTDTQSLVGSPSTRIAPHIIGAEDDDFGTEHEQINGQCSCFQSIELLKSRPAHLAVFLHHVVSQFDPATLLCYLYSDLYKHTNSKETRRIFLEFHQFFLDRSAHLKVSVPDEMSADLEKRRPELIPEDLHRHYIQTMQERVHPEVQRHLEDFRQKRSMGLTLAESELTKLDAERDKDRLTLEKERTCAEQIVAKIEEVLMTAQAVEEDKSSTMQYVILMYMKHLGVKVKEPRNLEHKRGRIGFLPKIKQSMKKDKEGEEKGKRRGFPSILGPPRRPSRHDNSAIGRAMELQKARHPKHLSTPSSVSPEPQDSAKLRQSGLANEGTDAGYLPANSMSSVASGASFSQEGGKENDTGSKQVGETSAPGDTLDGTPRTLNTVFDFPPPPLDQVQEEECEVERVTEHGTPKPFRKFDSVAFGESQSEDEQFENDLETDPPNWQQLVSREVLLGLKPCEIKRQEVINELFYTERAHVRTLKVLDQVFYQRVSREGILSPSELRKIFSNLEDILQLHIGLNEQMKAVRKRNETSVIDQIGEDLLTWFSGPGEEKLKHAAATFCSNQPFALEMIKSRQKKDSRFQTFVQDAESNPLCRRLQLKDIIPTQMQRLTKYPLLLDNIAKYTEWPTEREKVKKAADHCRQILNYVNQAVKEAENKQRLEDYQRRLDTSSLKLSEYPNVEELRNLDLTKRKMIHEGPLVWKVNRDKTIDLYTLLLEDILVLLQKQDDRLVLRCHSKILASTADSKHTFSPVIKLSTVLVRQVATDNKALFVISMSDNGAQIYELVAQTVSEKTVWQDLICRMAASVKEQSTKPIPLPQSTPGEGDNDEEDPSKLKEEQHGISVTGLQSPDRDLGLESTLISSKPQSHSLSTSGKSEVRDLFVAERQFAKEQHTDGTLKEVGEDYQIAIPDSHLPVSEERWALDALRNLGLLKQLLVQQLGLTEKSVQEDWQHFPRYRTASQGPQTDSVIQNSENIKAYHSGEGHMPFRTGTGDIATCYSPRTSTESFAPRDSVGLAPQDSQASNILVMDHMIMTPEMPTMEPEGGLDDSGEHFFDAREAHSDENPSEGDGAVNKEEKDVNLRISGNYLILDGYDPVQESSTDEEVASSLTLQPMTGIPAVESTHQQQHSPQNTHSDGAISPFTPEFLVQQRWGAMEYSCFEIQSPSSCADSQSQIMEYIHKIEADLEHLKKVEESYTILCQRLAGSALTDKHSDKS

SEQ ID NO: 7326 - protein, 492 aa, Homo sapiens
MRLAAAANEAYTAPLAVSGLLGCKQCGGGRDQDEELGIRIPRPLGQGPSRFIPEKEILQVGSEDAQMHALFADSFAALGRLDNITLVMVFHPQYLESFLKTQHYLLQMDGPLPLHYRHYIGIMAAARHQCSYLVNLHVNDFLHVGGDPKWLNGLENAPQKLQNLGELNKVLAHRPWLITKEHIEGLLKAEEHSWSLAELVHAVVLLTHYHSLASFTFGCGISPEIHCDGGHTFRPPSVSNYCICDITNGNHSVDEMPVNSAENVSVSDSFFEVEALMEKMRQLQECRDEEEASQEEMASRFEIEKRESMFVFSSDDEEVTPARAVSRHFEDTSYGYKDFSRHGMHVPTFRVQDYCWEDHGYSLVNRLYPDVGQLIDEKFHIAYNLTYNTMAMHKDVDTSMLRRAIWNYIHCMFGIRYDDYDYGEINQLLDRSFKVYIKTVVCTPEKVTKRMYDSFWRQFKHSEKVHVNLLLIEARMQAELLYALRAITRYMT

SEQ ID NO: 7327 - protein, 1190 aa, Homo sapiens
MKTRQNKDSMSMRSGRKKEAPGPREELRSRGRASPGGVSTSSSDGKAEKSRQTAKKARVEEASTPKVNKQGRSEEISESESEETNAPKKTKTEQELPRPQSPSDLDSLDGRSLNDDGSSDPRDIDQDNRSTSPSIYSPGSVENDSDSSSGLSQGPARPYHPPPLFPPSPQPPDSTPRQPEASFEPHPSVTPTGYHAPMEPPTSRMFQAPPGAPPPHPQLYPGGTGGVLSGPPMGPKGGGAASSVGGPNGGKQHPPPTTPISVSSSGASGAPPTKPPTTPVGGGNLPSAPPPANFPHVTPNLPPPPALRPLNNASASPPGLGAQPLPGHLPSPHAMGQGMGGLPPGPEKGPTLAPSPHSLPPASSSAPAPPMRFPYSSSSSSSAAASSSSSSSSSSASPFPASQALPSYPHSFPPPTSLSVSNQPPKYTQPSLPSQAVWSQGPPPPPPYGRLLANSNAHPGPFPPSTGAQSTAHPPVSTHHHHHQQQQQQQQQQQQQQQQQQQHHGNSGPPPPGAFPHPLEGGSSHHAHPYAMSPSLGSLRPYPPGPAHLPPPHSQVSYSQAGPNGPPVSSSSNSSSSTSQGSYPCSHPSPSQGPQGAPYPFPPVPTVTTSSATLSTVIATVASSPAGYKTASPPGPPPYGKRAPSPGAYKTATPPGYKPGSPPSFRTGTPPGYRGTSPPAGPGTFKPGSPTVGPGPLPPAGPSGLPSLPPPPAAPASGPPLSATQIKQEPAEEYETPESPVPPARSPSPPPKVVDVPSHASQSARFNKHLDRGFNSCARSDLYFVPLEGSKLAKKRADLVEKVRREAEQRAREEKEREREREREKEREREKERELERSVKLAQEGRAPVECPSLGPVPHRPPFEPGSAVATVPPYLGPDTPALRTLSEYARPHVMSPGNRNHPFYVPLGAVDPGLLGYNVPALYSSDPAAREREREARERDLRDRLKPGFEVKPSELEPLHGVPGPGLDPFPRHGGLALQPGPPGLHPFPFHPSLGPLERERLALAAGPALRPDMSYAERLAAERQHAERVAALGNDPLARLQMLNVTPHHHQHSHIHSHLHLHQQDAIHAASASVHPLIDPLASGSHLTRIPYPAGTLPNPLLPHPLHENEVLRHQLFAAPYRDLPASLSAPMSAAHQLQAMHAQSAELQRLALEQQQWLHAHHPLHSVPLPAQEDYYSHLKKESDKPL

SEQ ID NO: 7328 - protein, 419 aa, Homo sapiens
MPLSRWLRSVGVFLLPAPYWAPRERWLGSLRRPSLVHGYPVLAWHSARCWCQAWTEEPRALCSSLRMNGDQNSDVYAQEKQDFVQHFSQIVRVLTEDEMGHPEIGDAIARLKEVLEYNAIGGKYNRGLTVVVAFRELVEPRKQDADSLQRAWTVGWCVELLQAFFLVADDIMDSSLTRRGQICWYQKPGVGLDAINDANLLEACIYRLLKLYCREQPYYLNLIELFLQSSYQTEIGQTLDLLTAPQGNVDLVRFTEKRYKSIVKYKTAFYSFYLPIAAAMYMAGIDGEKEHANAKKILLEMGEFFQIQDDYLDLFGDPSVTGKIGTDIQDNKCSWLVVQCLQRATPEQYQILKENYGQKEAEKVARVKALYEELDLPAVFLQYEEDSYSHIMALIEQYAAPLPPAVFLGLARKIYKRRK

SEQ ID NO: 7329 - protein, 247 aa, Homo sapiens
MTILFLTMVISYFGCMKAAPMKEANIRGQGGLAYPGVRTHGTLESVNGPKAGSRGLTSLADTFEHVIEELLDEDQKVRPNEENNKDADLYTSRVMLSSQVPLEPPLLFLLEEYKNYLDAANMSMRVRRHSDPARRGELSVCDSISEWVTAADKKTAVDMSGGTVTVLEKVPVSKGQLKQYFYETKCNPMGYTKEGCRGIDKRHWNSQCRTTQSYVRALTMDSKKRIGWRFIRIDTSCVCTLTIKRGR

SEQ ID NO: 7330 - protein, 620 aa, Homo sapiens
MSEHVEPAAPGPGPNGGGGGPAPARGPRTPNLNPNPLINVRDRLFHALFFKMAVTYSRLFPPAFRRLFEFFVLLKALFVLFVLAYIHIVFSRSPINCLEHVRDKWPREGILRVEVRHNSSRAPVFLQFCDSGGRGSFPGLAVEPGSNLDMEDEEEEELTMEMFGNSSIKFELDIEPKVFKPPSSTEALNDSQEFPFPETPTKVWPQDEYIVEYSLEYGFLRLSQATRQRLSIPVMVVTLDPTRDQCFGDRFSRLLLDEFLGYDDILMSSVKGLAENEENKGFLRNVVSGEHYRFVSMWMARTSYLAAFAIMVIFTLSVSMLLRYSHHQIFVFIVDLLQMLEMNMAIAFPAAPLLTVILALVGMEAIMSEFFNDTTTAFYIILIVWLADQYDAICCHTSTSKRHWLRFFYLYHFAFYAYHYRFNGQYSSLALVTSWLFIQHSMIYFFHHYELPAILQQVRIQEMLLQAPPLGPGTPTALPDDMNNNSGAPATAPDSAGQPPALGPVSPGASGSPGPVAAAPSSLVAAAASVAAAAGGDLGWMAETAAIITDASFLSGLSASLLERRPASPLGPAGGLPHAPQDSVPPSDSAASDTTPLGAAVGGPSPASMAPTEAPSEVGS

SEQ ID NO: 7331 - protein, 139 aa, Homo sapiens
MKWMVVVLVCLQLLEAAVVKVPLKKFKSIRETMKEKGLLGEFLRTHKYDPAWKYRFGDLSVTYEPMAYMDVQSIQVPNQEFGLSENEPGTNFVYAQFDGIMGLAYPALSVDEATTAMQGMVQEGALTSPVFSVYLSNQQ

SEQ ID NO: 7332 - protein, 341 aa, Homo sapiens
MEREKEQFRKLFIGGLSFETTEESLRNYYEQWGKLTDCVVMRDPASKRSRGFGFVTFSSMAEVDAAMAARPHSIDGRVVEPKRAVAREESGKPGAHVTVKKLFVGGIKEDTEEHHLRDYFEEYGKIDTIEIITDRQSGKKRGFGFVTFDDHDPVDKIVLQKYHTINGHNAEVRKALSRQEMQEVQSSRSGRGGNFGFGDSRGGGGNFGPGPGSNFRGGSDGYGSGRGFGDGYNGYGGGPGGGNFGGSPGYGGGRGGYGGGGPGYGNQGGGYGGGYDNYGGGNYGSGNYNDFGNYNQQPSNYGPMKSGNFGGSRNMGGPYGGGNYGPGGSGGSGGYGGRSRY

SEQ ID NO: 7333 - protein, 279 aa, Homo sapiens
MTPSEGARAGTGRELEMLDSLLALGGLVLLRDSVEWEGRSLLKALVKKSALCGEQVHILGCEVSEEEFREGFDSDINNRLVYHDFFRDPLNWSKTEEAFPGGPLGALRAMCKRTDPVPVTIALDSLSWLLLRLPCTTLCQVLHAVSHQDSCPGDSSSVGKVSVLGLLHEELHGPGPVGALSSLAQTEVTLGGTMGQASAHILCRRPRQRPTDQTQWFSILPDFSLDLQEGPSVESQPYSDPHIPPVSKNAKARTRKCSLVSGHGRENKSCRGWGWGQGF

SEQ ID NO: 7334 - protein, 544 aa, Homo sapiens
MASSEVARHLLFQSHMATKTTCMSSQGSDDEQIKRENIRSLTMSGHVGFESLPDQLVNRSIQQGFCFNILCVGETGIGKSTLIDTLFNTNFEDYESSHFCPNVKLKAQTYELQESNVQLKLTIVNTVGFGDQINKEESYQPIVDYIDAQFEAYLQEELKIKRSLFTYHDSRIHVCLYFISPTGHSLKTLDLLTMKNLDSKVNIIPVIAKADTVSKTELQKFKIKLMSELVSNGVQIYQFPTDDDTIAKVNAAMNGQLPFAVVGSMDEVKVGNKMVKARQYPWGVVQVENENHCDFVKLREMLICTNMEDLREQTHTRHYELYRRCKLEEMGFTDVGPENKPVSVQETYEAKRHEFHGERQRKEEEMKQMFVQRVKEKEAILKEAERELQAKFEHLKRLHQEERMKLEEKRRLLEEEIIAFSKKKATSEIFHSQSFLATGSNLRKDKDRKKEPGCRFELLCIDVRACETNGGRKDAEKAPIFCKTEVPEHRRSSSQANFIKKKLEVCFDFAVICFITSIFGEQPQLLIFMEKYFQVQGQYISQSE

SEQ ID NO: 7335 - protein, 417 aa, Homo sapiens
MDVERLQEALKDFEKRGKKEVCPVLDQFLCHVAKTGETMIQWSQFKGYFIFKLEKVMDDFRTSAPEPRGPPNPNVEYIPFDEMKERILKIVTGFNGIPFTIQRLCELLTDPRRNYTGTDKFLRGVEKNVMVVSCVYPSSEKNNSNSLNRMNGVMFPGNSPSYTERSNINGPGTPRPLNRPKVSLSAPMTTNGLPESTDSKEANLQQNEEKNHSDSSTSESEVSSVSPLKNKHPDEDAVEAEGHEVKRLRFDKEGEVRETASQTTSSEISSVMVGETEASSSSQDKDKDSRCTRQHCTEEDEEEDEEEEEESFMTSREMIPERKNQEKESDDALTVNEETSEENNQMEESDVSQAEKDLLHSEGSENEGPVSSSSSDCRETEELVGSNSSKTGEILSESSMENDDEATEVTDEPMEQD

SEQ ID NO: 7336 - protein, 272 aa, Homo sapiens
MHLRLISWLFIILNFMEYIGSQNASRGRRQRRMHPNVSQGCQGGCATCSDYNGCLSCKPRLFFALERIGMKQIGVCLSSCPSGYYGTRYPDINKCTKCKADCDTCFNKNFCTKCKSGFYLHLGKCLDNCPEGLEANNHTMECVSIVHCEVSEWNPWSPCTKKGKTCGFKRGTETRVREIIQHPSAKGNLCPPTNETRKCTVQRKKCQKGERGKKGRERKRKKPNKGESKEAIPDSKSLESSKEIPEQRENKQQQKKRKVQDKQKSVSVSTVH

SEQ ID NO: 7337 - protein, 298 aa, Homo sapiens
MFSRAGVAGLSAWTLQPQWIQVRNMATLKDITRRLKSIKNIQKITKSMKMVAAAKYARAERELKPARIYGLGSLALYEKADIKGPEDKKKHLLIGVSSDRGLCGAIHSSIAKQMKSEVATLTAAGKEVMLVGIGDKIRGILYRTHSDQFLVAFKEVGRKPPTFGDASVIALELLNSGYEFDEGSIIFNKFRSVISYKTEEKPIFSLNTVASADSMSIYDDIDADVLQNYQEYNLANIIYYSLKESTTSEQSARMTAMDNASKNASEMIDKLTLTFNRTRQAVITKELIEIISGAAALD

SEQ ID NO: 7338 - protein, 523 aa, Homo sapiens
MEPAAALHFSLPASLLLLLLLLLLSLCALVSAQFTVVGPANPILAMVGENTTLRCHLSPEKNAEDMEVRWFRSQFSPAVFVYKGGRERTEEQMEEYRGRITFVSKDINRGSVALVIHNVTAQENGIYRCYFQEGRSYDEAILRLVVAGLGSKPLIEIKAQEDGSIWLECISGGWYPEPLTVWRDPYGEVVPALKEVSIADADGLFMVTTAVIIRDKYVRNVSCSVNNTLLGQEKETVIFIPESFMPSASPWMVALAVILTASPWMVSMTVILAVFIIFMAVSICCIKKLQREKKILSGEKKVEQEEKEIAQQLQEELRWRRTFLHAADVVLDPDTAHPELFLSEDRRSVRRGPYRQRVPDNPERFDSQPCVLGWESFASGKHYWEVEVENVMVWTVGVCRHSVERKGEVLLIPQNGFWTLEMFGNQYRALSSPERILPLKESLCRVGVFLDYEAGDVSFYNMRDRSHIYTCPRSAFTVPVRPFFRLGSDDSPIFICPALTGASGVMVPEEGLKLHRVGTHQSL

SEQ ID NO: 7339 - protein, 636 aa, Homo sapiens
MAHLMMFRDVAVDFSQEEWECLDLEQRDLYRDVMLENYSNMVSLGFCIYQPEAFSLLEKGKEPWKILRDETRGPCPDMQSRCQTKKLLPKNGIFEREIAQLEIMRICKNHSLDCLCFRGDWEGNTQFQTLQDNQEECFKQVIRTCEKRPTFNQHTVFNLHQRLNTGDKLNEFKELGKAFISGSDHTQHQLIHTSEKFCGDKECGNTFLPDSEVIQYQTVHTVKKTYECKECGKSFSLRSSLTGHKRIHTGEKPFKCKDCGKAFRFHSQLSVHKRIHTGEKSYECKECGKAFSCGSDLTRHQRIHTGEKPYECNECRKAFSQRSHLIKHQRIHTGEKPYECKECGKAFTRGSHLTQHQRIHTGEKSHECKECGKAFIRGSNLAQHQNVHVGRKPYKCEKCGKAYIWSSHLARHQRIHTGRKPYECKQCGKTFTWASYLAQHEKIHNERKSYECKECGKTFLHGSEFNRHQKIHTGERNYECKECGKTFFRGSELNRHQKIHTGKRPYECEECGKAFLWGSQLTRHQRMHTGEEPYVCKECGKSFIWGSQLTRHKKIHTDAEPYGCKKSSHIFSHHSYFTEQKIHNSANLCEWTDYGNTFSHESNFAQHQNIYTFEKSYEFKDFEKAFSSSSHFISLL

SEQ ID NO: 7340 - protein, 449 aa, Homo sapiens
MMLGTEGGEGFVVKVRGLPWSCSADEVQRFFSDCKIQNGAQGIRFIYTREGRPSGEAFVELESEDEVKLALKKDRETMGHRYVEVFKSNNVEMDWVLKHTGPNSPDTANDGFVRLRGLPFGCSKEEIVQFFSGLEIVPNGITLPVDFQGRSTGEAFVQFASQEIAEKALKKHKERIGHRYIEIFKSSRAEVRTHYDPPRKLMAMQRPGPYDRPGAGRGYNSIGRGAGFERMRRGAYGGGYGGYDDYNGYNDGYGFGSDRFGRDLNYCFSGMSDHRYGDGGSTFQSTTGHCVHMRGLPYRATENDIYNFFSPLNPVRVHIEIGPDGRVTGEADVEFATHEDAVAAMSKDKANMQHRYVELFLNSTAGASGGAYEHRYVELFLNSTAGASGGAYGSQMMGGMGLSNQSSYGGPASQQLSGGYGGGYGGQSSMSGYDQVLQENSSDFQSNIA

SEQ ID NO: 7341 - protein, 460 aa, Homo sapiens
MAPGRAVAGLLLLAAAGLGGVAEGPGLAFSEDVLSVFGANLSLSAAQLQHLLEQMGAASRVGVPEPGQLHFNQCLTAEEIFSLHGFSNATQITSSKFSVICPAVLQQLNFHPCEDRPKHKTRPSHSEVWGYGFLSVTIINLASLLGLILTPLIKKSYFPKILTFFVGLAIGTLFSNAIFQLIPEAFGFDPKVDSYVEKAVAVFGGFYLLFFFERMLKMLLKTYGQNGHTHFGNDNFGPQEKTHQPKALPAINGVTCYANPAVTEANGHIHFDNVSVVSLQDGKKEPSSCTCLKGPKLSEIGTIAWMITLCDALHNFIDGLAIGASCTLSLLQGLSTSIAILCEEFPHELGDFVILLNAGMSTRQALLFNFLSACSCYVGLAFGILVGNNFAPNIIFALAGGMFLYISLADMFPEMNDMLREKVTGRKTDFTFFMIQNAGMLTGFTAILLITLYAGEIELE

SEQ ID NO: 7342 - protein, 1358 aa, Homo sapiens
MGNQLAGIAPSQILSVESYFSDIHDFEYDKSLGSTRFFKVARAKHREGLVVVKVFAIQDPTLPLTSYKQELEELKIRLNSAQNCLPFQKASEKASEKAAMLFRQYVRDNLYDRISTRPFLNNIEKRWIAFQILTAVDQAHKSGVRHGDIKTENVMVTSWNWVLLTDFASFKPTYLPEDNPADFNYFFDTSRRRTCYIAPERFVDGGMFATELEYMRDPSTPLVDLNSNQRTRGELKRAMDIFSAGCVIAELFTEGVPLFDLSQLLAYRNGHFFPEQVLNKIEDHSIRELVTQMIHREPDKRLEAEDYLKQQRGNAFPEIFYTFLQPYMAQFAKETFLSADERILVIRKDLGNIIHNLCGHDLPEKAEGEPKENGLVILVSVITSCLQTLKYCDSKLAALELILHLAPRLSVEILLDRITPYLLHFSNDSVPRVRAEALRTLTKVLALVKEVPRNDINIYPEYILPGIAHLAQDDATIVRLAYAENIALLAETALRFLELVQLKNLNMENDPNNEEIDEVTHPNGNYDTELQALHEMVQQKVVTLLSDPENIVKQTLMENGITRLCVFFGRQKANDVLLSHMITFLNDKNDWHLRGAFFDSIVGVAAYVGWQSSSILKPLLQQGLSDAEEFVIVKALYALTCMCQLGLLQKPHVYEFASDIAPFLCHPNLWIRYGAVGFITVVARQISTADVYCKLMPYLDPYITQPIIQIERKLVLLSVLKEPVSRSIFDYALRSKDITSLFRHLHMRQKKRNGSLPDCPPPEDPAIAQLLKKLLSQGMTEEEEDKLLALKDFMMKSNKAKANIVDQSHLHDSSQKGVIDLAALGITGRQVDLVKTKQEPDDKRARKHVKQDSNVNEEWKSMFGSLDPPNMPQALPKGSDQEVIQTGKPPRSESSAGICVPLSTSSQVPEVTTVQNKKPVIPVLSSTILPSTYQIRITTCKTELQQLIQQKREQCNAERIAKQMMENAEWESKPPPPGWRPKGLLVAHLHEHKSAVNRIRVSDEHSLFATCSNDGTVKIWNSQKMEGKTTTTRSILTYSRIGGRVKTLTFCQGSHYLAIASDNGAVQLLGIEASKLPKSPKIHPLQSRILDQKEDGCVVDMHHFNSGAQSVLAYATVNGSLVGWDLRSSSNAWTLKHDLKSGLITSFAVDIHQCWLCIGTSSGTMACWDMRFQLPISSHCHPSRARIRRLSMHPLYQSWVIAAVQGNNEVSMWDMETGDRRFTLWASSAPPLSELQPSPHSVHGIYCSPADGNPILLTAGSDMKIRFWDLAYPERSYVVAGSTSSPSVSYYRKIIEGTEVVQEIQNKQKVGPSDDTPRRGPESLPVGHHDIITDVATFQTTQGFIVTASRDGIVKVWK

SEQ ID NO: 7343 - protein, 215 aa, Homo sapiens
MPGEATETVPATEQELPQPQAETGSGTESDSDESVPELEEQDSTQATTQQAQLAAAAEIDEEPVSKAKQSRSEKKARKAMSKLGLRQVTGVTRVTIRKSKNILFVITKPDVYKSPASDTYIVFGEAKIEDLSQQAQLAAAEKFKVQGEAVSNIQENTQTPTVQEESEEEEVDETGVEVKDIELVMSQANVSRAKAVRALKNNSNDIVNAIMELTM

SEQ ID NO: 7344 - protein, 1476 aa, Homo sapiens
MEGGKGPRLRDFLSGSLATWALGLAGLVGEAEDSEGEEEEEEEEPPLWLEKRFLRLSDGALLLRVLGIIAPSSRGGPRMLRGLDGPAAWRVWNLNHLWGRLRDFYQEELQLLILSPPPDLQTLGFDPLSEEAVEQLEGVLRLLLGASVQCEHRELFIRHIQGLSLEVQSELAAAIQEVTQPGAGVVLALSGPDPGELAPAELEMLSRSLMGTLSKLARERDLGAQRLAELLLEREPLCLRPEAPSRAPAEGPSHHLALQLANAKAQLRRLRQELEEKAELLLDSQAEVQGLEAEIRRLRQEAQALSGQAKRAELYREEAEALRERAGRLPRLQEELRRCRERLQAAEAYKSQLEEERVLSGVLEASKALLEEQLEAARERCARLHETQRENLLLRTRLGEAHAELDSLRHQVDQLAEENVELELELQRSLEPPPGSPGEAPLAGAAPSLQDEVREAEAGRLRTLERENRELRGLLQVLQGQPGGQHPLLEAPREDPVLPVLEEAPQTPVAFDHSPQGLVQKARDGGPQALDLAPPALDSVLEASAECPQAPDSDPQEAESPLQAAAMDPQASDWSPQESGSPVETQESPEKAGRRSSLQSPASVAPPQGPGTKIQAPQLLGGETEGREAPQGELVPEAWGLRQEGPEHKPGPSEPSSVQLEEQEGPNQGLDLATGQAEAREHDQRLEGTVRDPAWQKPQQKSEGALEVQVWEGPIPGESLASGVAEQEALREEVAQLRRKAEALGDELEAQARKLEAQNTEAARLSKELAQARRAEAEAHREAEAQAWEQARLREAVEAAGQELESASQEREALVEALAAAGRERRQWEREGSRLRAQSEAAEERMQVLESEGRQHLEEAERERREKEALQAELEKAVVRGKELGDRLEHLQRELEQAALERQEFLREKESQHQRYQGLEQRLEAELQAAATSKEEALMELKTRALQLEEELFQLRQGPAGLGPKKRAEPQLVETQNVRLIEVERSNAMLVAEKAALQGQLQHLEGQLGSLQGRAQELLLQSQRAQEHSSRLQAEKSVLEIQGQELHRKLEVLEEEVRAARQSQEETRGQQQALLRDHKALAQLQRRQEAELEGLLVRHRDLKANMRALELAHRELQGRHEQLQAQRASVEAQEVALLAERERLMQDGHRQRGLEEELRRLQSEHDRAQMLLAELSRERGELQGERGELRGRLARLELERAQLEMQSQQLRESNQQLDLSACRLTTQCELLTQLRSAQEEENRQLLAEVQALSRENRELLERSLESRDHLHREQREYLDQLNALRREKQKLVEKIMDQYRVLEPVPLPRTKKGSWLADKVKRLMRPRREGGPPGGLRLGADGAGSTESLGGPPETELPEGREADGTGSPSPAPMRRAQSSLCLRDETLAGGQRRKLSSRFPVGRSSESFSPGDTPRQRFRQRHPGPLGAPVSHSKGPGVGWENSAETLQEHETDANREGPEVQEPEKRPLTPSLSQ

SEQ ID NO: 7345 - protein, 1238 aa, Homo sapiens
MGDAKEAGAEGPPAGAAARGGLSLLSQGESEESSAQGSALFLGGNEVKSRAVVKYSSAPPRTAFARLEEKTDLKLPPANWLRESAKLGPAGTTILGNSKKSKPFSSFGMAYDFIDSVGNDVDVVSDSENIKKLLKIPYSKSHVSMAVHRIGRTLLLDELDIQELFMRSSQTGDWTWLKEFYQRLIDQKWQRKKKSKEHWYQKAILSKFLYYSINGDGAAQPVSSTAEQQESSSSDQTNDSEGASWPAPFEMPSSVSEDPSASSQGSEPLEPSYIVGHVASAPKEQNLITLFNDGEHSQGLKNDFVRNILWTFEDIHMLVGSNMPIFGGGRYPAVSLRLRDNNKPINVLTGIDYWLDNLICNVPELVMCFHVNGIVQKYEMIKTEEIPNLENSNFSTKVIKDIAQNILSFLKSNCTKEGHTYWLFKASGSDIVKLYDLTTLCEETEDKYQNPFTMPVAILLYKVACNMMMKKNQNKKHYGTIRTLLLNCLKLLDKSRHPQIIASANYMLSELFQLDEPKKEENSESPLNENSDESYSEEEEEMPDSDENGSYSTSSDPSDDSKAVAIIKSVGELSVPEKYKSIHQIRPSCAFPVCHDTEERCRLVLSYVLEGLKSVDSSIKKESDLPAADPSTPIPLKYEDESSRGGPEGLEKQMALFLDKMGSLQKGNYSSQSGMIPGSWQHKMKLQLILKSSKAYYVLSDAAMSLQKYGRALRYIKLALQSHDTYCCLCTNMLSEVLLFLSQYLTLCGDIQLMLAQNANNRAAHLEEFHYQTKEDQEILHSLHRESSCQGFAWATDLSTDLESQLSVSCKCYEAANEILQFSDLKSQNPEHYVQVLKRMGNIRNEIGVFYMNQAAALQSERLVSKSVSAAEQQLWKKSFSCFEKGIHNFESIEDATNAALLLCNTGRLMRICAQAHCGAGDELKREFSPEEGLYYNKAIDYYLKALRSLGTRDIHPAVWDSVNWELSTTYFTMATLQQDYAPLSRKAQEQIEKEVSEAMMKSLKYCDVDSVSARQPLCQYRAATIHHRLASMYHSCLRNQVGDEHLRKQHRVLADLHYSKAAKLFQLLKDAPCELLRVQLERVAFAEFQMTSQNSNVGKLKTLSGALDIMVRTEHAFQLIQKELIEEFGQPKSGDAAAAADASPSLNREEVMKLLSIFESRLSFLLLQSIKLLSSTKKKTSNNIEDDTILKTNKHIYSQLLRATANKTATLLERINVIVHLLGQLAAGSAASSNAVQ

SEQ ID NO: 7346 - protein, 200 aa, Homo sapiens
MGNGLSDQTSILSNLPSFQSFHIVILGLDCAGKTTVLYRLQFNEFVNTVPTKGFNTEKIKVTLGNSKTVTFHFWDVGGQEKLRPLWKSYTRCTDGIVFVVDSVDVERMEEAKTELHKITRISENQGVPVLIVANKQDLRNSLSLSEIEKLLAMGELSSSTPWHLQPTCAIIGDGLKEGLEKLHDMIIKRRKMLRQQKKKR

SEQ ID NO: 7347 - protein, 1170 aa, Homo sapiens
MKDSCITVMAMALLSGFFFFAPASSYNLDVRGARSFSPPRAGRHFGYRVLQVGNGVIVGAPGEGNSTGSLYQCQSGTGHCLPVTLRGSNYTSKYLGMTLATDPTDGSILACDPGLSRTCDQNTYLSGLCYLFRQNLQGPMLQGRPGFQECIKGNVDLVFLFDGSMSLQPDEFQKILDFMKDVMKKLSNTSYQFAAVQFSTSYKTEFDFSDYVKRKDPDALLKHVKHMLLLTNTFGAINYVATEVFREELGARPDATKVLIIITDGEATDSGNIDAAKDIIRYIIGIGKHFQTKESQETLHKFASKPASEFVKILDTFEKLKDLFTELQKKIYVIEGTSKQDLTSFNMELSSSGISADLSRGHAVVGAVGAKDWAGGFLDLKADLQDDTFIGNEPLTPEVRAGYLGYTVTWLPSRQKTSLLASGAPRYQHMGRVLLFQEPQGGGHWSQVQTIHGTQIGSYFGGELCGVDVDQDGETELLLIGAPLFYGEQRGGRVFIYQRRQLGFEEVSELQGDPGYPLGRFGEAITALTDINGDGLVDVAVGAPLEEQGAVYIFNGRHGGLSPQPSQRIEGTQVLSGIQWFGRSIHGVKDLEGDGLADVAVGAESQMIVLSSRPVVDMVTLMSFSPAEIPVHEVECSYSTSNKMKEGVNITICFQIKSLIPQFQGRLVANLTYTLQLDGHRTRRRGLFPGGRHELRRNIAVTTSMSCTDFSFHFPVCVQDLISPINVSLNFSLWEEEGTPRDQRAQGKDIPPILRPSLHSETWEIPFEKNCGEDKKCEANLRVSFSPARSRALRLTAFASLSVELSLSNLEEDAYWVQLDLHFPPGLSFRKVEMLKPHSQIPVSCEELPEESRLLSRALSCNVSSPIFKAGHSVALQMMFNTLVNSSWGDSVELHANVTCNNEDSDLLEDNSATTIIPILYPINILIQDQEDSTLYVSFTPKGPKIHQVKHMYQVRIQPSIHDHNIPTLEAVVGVPQPPSEGPITHQWSVQMEPPVPCHYEDLERLPDAAEPCLPGALFRCPVVFRQEILVQVIGTLELVGEIEASSMFSLCSSLSISFNSSKHFHLYGSNASLAQVVMKVDVVYEKQMLYLYVLSGIGGLLLLLLIFIVLYKVGFFKRNLKEKMEAGRGVPNGIPAEDSEQLASGQEAGDPGCLKPLHEKDSESGGGKD

SEQ ID NO: 7348 - protein, 40 aa, Homo sapiens
MGSSIFMLFSPLVLYDCYLYEALVITKHFFCPFLPELCKL

SEQ ID NO: 7349 - protein, 470 aa, Homo sapiens
MTPGLQHPPTVVQRPGMPSGARMPHQGAPMGPPGSPYMGSPAVRPGLAPAGMEPARKRAAPPPGQSQAQSQGQPVPTAPARSRSAKRRKMADKILPQRIRELVPESQAYMDLLAFERKLDQTIMRKRVDIQEALKRPMKQKRKLRLYISNTFNPAKPDAEDSDGSIASWELRVEGKLLDDPSKQKRKFSSFFKSLVIELDKDLYGPDNHLVEWHRTPTTQETDGFQVKRPGDLSVRCTLLLMLDYQPPQFKLDPRLARLLGLHTQSRSAIVQALWQYVKTNRLQDSHDKEYINGDKYFQQIFDCPRLKFSEIPQRLTALLLPPDPIVINHVISVDPSDQKKTACYDIDVEVEEPLKGQMSSFLLSTANQQEISALDSKIHETIESINQLKIQRDFMLSFSRDPKGYVQDLLRSQSRDLKVMTDVAGNPEEERRAEFYHQPWSQEAVSRYFYCKIQQRRQELEQSLVVRNT

SEQ ID NO: 7350 - protein, 2364 aa, Homo sapiens
MTTTVATDYDNIEIQQQYSDVNNRWDVDDWDNENSSARLFERSRIKALADEREAVQKKTFTKWVNSHLARVSCRITDLYTDLRDGRMLIKLLEVLSGERLPKPTKGRMRIHCLENVDKALQFLKEQRVHLENMGSHDIVDGNHRLTLGLIWTIILRFQIQDISVETEDNKEKKSAKDALLLWCQMKTAGYPNVNIHNFTTSWRDGMAFNALIHKHRPDLIDFDKLKKSNAHYNLQNAFNLAEQHLGLTKLLDPEDISVDHPDEKSIITYVVTYYHYFSKMKALAVEGKRIGKVLDNAIETEKMIEKYESLASDLLEWIEQTIIILNNRKFANSLVGVQQQLQAFNTYRTVEKPPKFTEKGNLEVLLFTIQSKMRANNQKVYMPREGKLISDINKAWERLEKAEHERELALRNELIRQEKLEQLARRFDRKAAMRETWLSENQRLVSQDNFGFDLPAVEAATKKHEAIETDIAAYEERVQAVVAVARELEAENYHDIKRITARKDNVIRLWEYLLELLRARRQRLEMNLGLQKIFQEMLYIMDWMDEMKVLVLSQDYGKHLLGVEDLLQKHTLVEADIGIQAERVRGVNASAQKFATDGEGYKPCDPQVIRDRVAHMEFCYQELCQLAAERRARLEESRRLWKFFWEMAEEEGWIREKEKILSSDDYGKDLTSVMRLLSKHRAFEDEMSGRSGHFEQAIKEGEDMIAEEHFGSEKIRERIIYIREQWANLEQLSAIRKKRLEEASLLHQFQADADDIDAWMLDILKIVSSSDVGHDEYSTQSLVKKHKDVAEEIANYRPTLDTLHEQASALPQEHAESPDVRGRLSGIEERYKEVAELTRLRKQALQDTLALYKMFSEADACELWIDEKEQWLNNMQIPEKLEDLEVIQHRFESLEPEMNNQASRVAVVNQIARQLMHSGHPSEKEIKAQQDKLNTRWSQFRELVDRKKDALLSALSIQNYHLECNETKSWIREKTKVIESTQDLGNDLAGVMALQRKLTGMERDLVAIEAKLSDLQKEAEKLESEHPDQAQAILSRLAEISDVWEEMKTTLKNREASLGEASKLQQFLRDLDDFQSWLSRTQTAIASEDMPNTLTEAEKLLTQHENIKNEIDNYEEDYQKMRDMGEMVTQGQTDAQYMFLRQRLQALDTGWNELHKMWENRQNLLSQSHAYQQFLRDTKQAEAFLNNQEYVLAHTEMPTTLEGAEAAIKKQEDFMTTMDANEEKINAVVETGRRLVSDGNINSDRIQEKVDSIDDRHRKNRETASELLMRLKDNRDLQKFLQDCQELSLWINEKMLTAQDMSYDEARNLHSKWLKHQAFMAELASNKEWLDKIEKEGMQLISEKPETEAVVKEKLTGLHKMWEVLESTTQTKAQRLFDANKAELFTQSCADLDKWLHGLESQIQSDDYGKDLTSVNILLKKQQMLENQMEVRKKEIEELQSQAQALSQEGKSTDEVDSKRLTVQTKFMELLEPLNERKHNLLASKEIHQFNRDVEDEILWVGERMPLATSTDHGHNLQTVQLLIKKNQTLQKEIQGHQPRIDDIFERSQNIVTDSSSLSAEAIRQRLADLKQLWGLLIEETEKRHRRLEEAHRAQQYYFDAAEAEAWMSEQELYMMSEEKAKDEQSAVSMLKKHQILEQAVEDYAETVHQLSKTSRALVADSHPESERISMRQSKVDKLYAGLKDLAEERRGKLDERHRLFQLNREVDDLEQWIAEREVVAGSHELGQDYEHVTMLQERFREFARDTGNIGQERVDTVNHLADELINSGHSDAATIAEWKDGLNEAWADLLELIDTRTQILAASYELHKFYHDAKEIFGRIQDKHKKLPEELGRDQNTVETLQRMHTTFEHDIQALGTQVRQLQEDAARLQAAYAGDKADDIQKRENEVLEAWKSLLDACESRRVRLVDTGDKFRFFSMVRDLMLWMEDVIRQIEAQEKPRDVSSVELLMNNHQGIKAEIDARNDSFTTCIELGKSLLARKHYASEEIKEKLLQLTEKRKEMIDKWEDRWEWLRLILEVHQFSRDASVAEAWLLGQEPYLSSREIGQSVDEVEKLIKRHEAFEKSAATWDERFSALERLTTLELLEVRRQQEEEERKRRPPSPEPSTKVSEEAESQQQWDTSKGEQVSQNGLPAEQGSPRMAETVDTSEMVNGATEQRTSSKESSPIPSPTSDRKAKTALPAQSAATLPARTQETPSAQMEGFLNRKHEWEAHNKKASSRSWHNVYCVINNQEMGFYKDAKTAASGIPYHSEVPVSLKEAVCEVALDYKKKKHVFKLRLNDGNEYLFQAKDDEEMNTWIQAISSAISSDKHEVSASTQSTPASSRAQTLPTSVVTITSESSPGKREKDKEKDKEKRFSLFGKKK

SEQ ID NO: 7351 - protein, 637 aa, Homo sapiens
MSERKEGRGKGKGKKKERGSGKKPESAAGSQSPALPPRLKEMKSQESAAGSKLVLRCETSSEYSSLRFKWFKNGNELNRKNKPQNIKIQKKPGKSELRINKASLADSGEYMCKVISKLGNDSASANITIVESNEIITGMPASTEGAYVSSESPIRISVSTEGANTSSSTSTSTTGTSHLVKCAEKEKTFCVNGGECFMVKDLSNPSRYLCKCPNEFTGDRCQNYVMASFYKAEELYQKRVLTITGICIALLVVGIMCVVAYCKTKKQRKKLHDRLRQSLRSERNNMMNIANGPHHPNPPPENVQLVNQYVSKNVISSEHIVEREAETSFSTSHYTSTAHHSTTVTQTPSHSWSNGHTESILSESHSVIVMSSVENSRHSSPTGGPRGRLNGTGGPRECNSFLRHARETPDSYRDSPHSERYVSAMTTPARMSPVDFHTPSSPKSPPSEMSPPVSSMTVSMPSMAVSPFMEEERPLLLVTPPRLREKKFDHHPQQFSSFHHNPAHDSNSLPASPLRIVEDEEYETTQEYEPAQEPVKKLANSRRAKRTKPNGHIANRLEVDSNTSSQSSNSESETEDERVGEDTPFLGIQNPLAASLEATPAFRLADSRTNPAGRFSTQEEIQARLSSVIANQDPIAV

SEQ ID NO: 7352 - protein, 1250 aa, Homo sapiens
MWLSPEEVLVANALWVTERANPFFVLQRRRGHGRGGGLTGLLVGTLDVVLDSSARVAPYRILHQTQDSQVYWTVACGSSRKEITKHWEWLENNLLQTLSIFDSEEDITTFVKGKIHGIIAEENKNLQPQGDEDPGKFKEAELKMRKQFGMPEGEKLVNYYSCSYWKGRVPRQGWLYLTVNHLCFYSFLLGKEVSLVVQWVDITRLEKNATLLFPESIRVDTRDQELFFSMFLNIGETFKLMEQLANLAMRQLLDSEGFLEDKALPRPIRPHRNISALKRDLDARAKNECYRATFRLPRDERLDGHTSCTLWTPFNKLHIPGQMFISNNYICFASKEEDACHLIIPLREVTIVEKADSSSVLPSPLSISTKSKMTFLFANLKDRDFLVQRISDFLQKTPSKQPGSIGSRKASVVDPSTESSPAPQEGSEQPASPASPLSSRQSFCAQEAPTASQGLLKLFQKNSPMEDLGAKGAKEKMKEESWHIHFFEYGRGVCMYRTAKTRALVLKGIPESLRGELWLLFSGAWNEMVTHPGYYAELVEKSTGKYSLATEEIERDLHRSMPEHPAFQNELGIAALRRVLTAYAFRNPTIGYCQAMNIVTSVLLLYGSEEEAFWLLVALCERMLPDYYNTRVVGALVDQGIFEELTRDFLPQLSEKMQDLGVISSISLSWFLTLFLSVMPFESAVVIVDCFFYEGIKVILQVALAVLDANMEQLLGCSDEGEAMTMLGRYLDNVVNKQSVSPPIPHLRALLSSSDDPPAEVDIFELLKVSYEKFSSLRAEDIEQMRFKQRLKVIQSLEDTAKRSVVRAIPVDIGFSIEELEDLYMVFKAKHLASQYWGCSRTMAGRRDPSLPYLEQYRIDASQFRELFASLTPWACGSHTPLLAGRMFRLLDENKDSLINFKEFVTGMSGMYHGDLTEKLKVLYKLHLPPALSPEEAESALEAAHYFTEDSSSEASPLASDLDLFLPWEAQEALPQEEQEGSGSEERGEEKGTSSPDYRHYLRMWAKEKEAQKETIKDLPKMNQEQFIELCKTLYNMFSEDPMEQDLYHAIATVASLLLRIGEVGKKFSARTGRKPRDCATEEDEPPAPELHQDAARELQPPAAGDPQAKAGGDTHLGKAPQESQVVVEGGSGEGQGSPSQLLSDDETKDDMSMSSYSVVSTGSLQCEDLADDTVLVGGEACSPTARIGGTVDTDWCISFEQILASILTESVLVNFFEKRVDIGLKIKDQKKVERQFSTASDHEQPGVSG

SEQ ID NO: 7353 - protein, 372 aa, Homo sapiens
MSRLLGGTLERVCKAVLLLCLLHFLVAVILYFDVYAQHLAFFSRFSARGPAHALHPAASSSSSSSNCSRPNATASSSGLPEVPSALPGPTAPTLPPCPDSPPGLVGRLLIEFTSPMPLERVQRENPGVLMGGRYTPPDCTPAQTVAVIIPFRHREHHLRYWLHYLHPILRRQRLRYGVYVINQHGEDTFNRAKLLNVGFLEALKEDAAYDCFIFSDVDLVPMDDRNLYRCGDQPRHFAIAMDKFGFRLPYAGYFGGVSGLSKAQFLRINGFPNEYWGWGGEDDDIFNRISLTGMKISRPDIRIGRYRMIKHDRDKHNEPNPQRFTKIQNTKLTMKRDGIGSVRYQVLEVSRQPLFTNITVDIGRPPSWPPRG

SEQ ID NO: 7354 - protein, 655 aa, Homo sapiens
MQAARMAASLGRQLLRLGGGSSRLTALLGQPRPGPARRPYAGGAAQLALDKSDSHPSDALTRKKPAKAESKSFAVGMFKGQLTTDQVFPYPSVLNEEQTQFLKELVEPVSRFFEEVNDPAKNDALEMVEETTWQGLKELGAFGLQVPSELGGVGLCNTQYARLVEIVGMHDLGVGITLGAHQSIGFKGILLFGTKAQKEKYLPKLASGETVAAFCLTEPSSGSDAASIRTSAVPSPCGKYYTLNGSKLWISNGGLADIFTVFAKTPVTDPATGAVKEKITAFVVERGFGGITHGPPEKKMGIKASNTAEVFFDGVRVPSENVLGEVGSGFKVAMHILNNGRFGMAAALAGTMRGIIAKAVDHATNRTQFGEKIHNFGLIQEKLARMVMLQYVTESMAYMVSANMDQGATDFQIEAAISKIFGSEAAWKVTDECIQIMGGMGFMKEPGVERVLRDLRIFRIFEGTNDILRLFVALQGCMDKGKELSGLGSALKNPFGNAGLLLGEAGKQLRRRAGLGSGLSLSGLVHPELSRSGELAVRALEQFATVVEAKLIKHKKGIVNEQFLLQRLADGAIDLYAMVVVLSRASRSLSEGHPTAQHEKMLCDTWCIEAAARIREGMAALQSDPWQQELYRNFKSISKALVERGGVVTSNPLGF

SEQ ID NO: 7355 - protein, 445 aa, Homo sapiens
MLCYVTRPDAVLMEVEVEAKANGEDCLNQVCRRLGIIEVDYFGLQFTGSKGESLWLNLRNRISQQMDGLAPYRLKLRVKFFVEPHLILQEQTRHIFFLHIKEALLAGHLLCSPEQAVELSALLAQTKFGDYNQNTAKYNYEELCAKELSSATLNSIVAKHKELEGTSQASAEYQVLQIVSAMENYGIEWHSVRDSEGQKLLIGVGPEGISICKDDFSPINRIAYPVVQMATQSGKNVYLTVTKESGNSIVLLFKMISTRAASGLYRAITETHAFYRCDTVTSAVMMQYSRDLKGHLASLFLNENINLGKKYVFDIKRTSKEVYDHARRALYNAGVVDLVSRNNQSPSHSPLKSSESSMNCSSCEGLSCQQTRVLQEKLRKLKEAMLCMVCCEEEINSTFCPCGHTVCCESCAAQLQSCPVCRSRVEHVQHVYLPTHTSLLNLTVI

SEQ ID NO: 7356 - protein, 2243 aa, Homo sapiens
MFKKLKQKISEEQQQLQQALAPAQASSNSSTPTRMRSRTSSFTEQLDEGTPNRENASTHASKSPDSVNGSEPSIPQSGDTQSFAQKLQLRVPSVESLFRSPIKESLFRSSSKESLVRTSSRESLNRLDLDSSTASFDPPSDMDSEAEDLVGNSDSLNKEQLIQRLRRMERSLSSYRGKYSELVTAYQMLQREKKKLQGILSQSQDKSLRRIAELREELQMDQQAKKHLQEEFDASLEEKDQYISVLQTQVSLLKQRLRNGPMNVDVLKPLPQLEPQAEVFTKEENPESDGEPVVEDGTSVKTLETLQQRVKRQENLLKRCKETIQSHKEQCTLLTSEKEALQEQLDERLQELEKIKDLHMAEKTKLITQLRDAKNLIEQLEQDKGMVIAETKRQMHETLEMKEEEIAQLRSRIKQMTTQGEELREQKEKSERAAFEELEKALSTAQKTEEARRKLKAEMDEQIKTIEKTSEEERISLQQELSRVKQEVVDVMKKSSEEQIAKLQKLHEKELARKEQELTKKLQTREREFQEQMKVALEKSQSEYLKISQEKEQQESLALEELELQKKAILTESENKLRDLQQEAETYRTRILELESSLEKSLQENKNQSKDLAVHLEAEKNKHNKEITVMVEKHKTELESLKHQQDALWTEKLQVLKQQYQTEMEKLREKCEQEKETLLKDKEIIFQAHIEEMNEKTLEKLDVKQTELESLSSELSEVLKARHKLEEELSVLKDQTDKMKQELEAKMDEQKNHHQQQVDSIIKEHEVSIQRTEKALKDQINQLELLLKERDKHLKEHQAHVENLEADIKRSEGELQQASAKLDVFQSYQSATHEQTKAYEEQLAQLQQKLLDLETERILLTKQVAEVEAQKKDVCTELDAHKIQVQDLMQQLEKQNSEMEQKVKSLTQVYESKLEDGNKEQEQTKQILVEKENMILQMREGQKKEIEILTQKLSAKEDSIHILNEEYETKFKNQEKKMEKVKQKAKEMQETLKKKLLDQEAKLKKELENTALELSQKEKQFNAKMLEMAQANSAGISDAVSRLETNQKEQIESLTEVHRRELNDVISIWEKKLNQQAEELQEIHEIQLQEKEQEVAELKQKILLFGCEKEEMNKEITWLKEEGVKQDTTLNELQEQLKQKSAHVNSLAQDETKLKAHLEKLEVDLNKSLKENTFLQEQLVELKMLAEEDKRKVSELTSKLKTTDEEFQSLKSSHEKSNKSLEDKSLEFKKLSEELAIQLDICCKKTEALLEAKTNELINISSSKTNAILSRISHCQHRTTKVKEALLIKTCTVSELEAQLRQLTEEQNTLNISFQQATHQLEEKENQIKSMKADIESLVTEKEALQKEGGNQQQAASEKESCITQLKKELSENINAVTLMKEELKEKKVEISSLSKQLTDLNVQLQNSISLSEKEAAISSLRKQYDEEKCELLDQVQDLSFKVDTLSKEKISALEQVDDWSNKFSEWKKKAQSRFTQHQNTVKELQIQLELKSKEAYEKDEQINLLKEELDQQNKRFDCLKGEMEDDKSKMEKKESNLETELKSQTARIMELEDHITQKTIEIESLNEVLKNYNQQKDIEHKELVQKLQHFQELGEEKDNRVKEAEEKILTLENQVYSMKAELETKKKELEHVNLSVKSKEEELKALEDRLESESAAKLAELKRKAEQKIAAIKKQLLSQMEEKEEQYKKGTESHLSELNTKLQEREREVHILEEKLKSVESSQSETLIVPRSAKNVAAYTEQEEADSQGCVQKTYEEKISVLQRNLTEKEKLLQRVGQEKEETVSSHFEMRCQYQERLIKLEHAEAKQHEDQSMIGHLQEELEEKNKKYSLIVAQHVEKEGGKNNIQAKQNLENVFDDVQKTLQEKELTCQILEQKIKELDSCLVRQKEVHRVEMEELTSKYEKLQALQQMDGRNKPTELLEENTEEKSKSHLVQPKLLSNMEAQHNDLEFKLAGAEREKQKLGKEIVRLQKDLRMLRKEHQQELEILKKEYDQEREEKIKQEQEDLELKHNSTLKQLMREFNTQLAQKEQELEMTIKETINKAQEVEAELLESHQEETNQLLKKIAEKDDDLKRTAKRYEEILDAREEEMTAKVRDLQTQLEELQKKYQQKLEQEENPGNDNTQLAQKTTLISDSKLKEQEFREQIHNLEDRLKKYEKNVYATTVGTPYKGGNLYHTDVSLFGEPTEFEYLRKVLFEYMMGRETKTMAKVITTVLKFPDDQTQKILEREDARLMSWLRSSS

SEQ ID NO: 7357 - protein, 299 aa, Homo sapiens
MEELEQGLLMQPWAWLQLAENSLLAKVFITKQGYALLVSDLQQVWHEQVDTSVVSQRAKELNKRLTAPPAAFLCHLDNLLRPLLKDAAHPSEATFSCDCVADALILRVRSELSGLPFYWNFHCMLASPSLVSQHLIRPLMGMSLALQCQVRELATLLHMKDLEIQDYQESGATLIRDRLKTEPFEENSFLEQFMIEKLPEACSIGDGKPFVMNLQDLYMAVTTQEVQVGQKHQGAGDPHTSNSASLQGIDSQCVNQPEQLVSSAPTLSAPEKESTGTSGPLQRPQLSKVKRKKPRGLFS

SEQ ID NO: 7358 - protein, 1091 aa, Homo sapiens
MAAGCLLALTLTLFQSLLIGPSSEEPFPSAVTIKSWVDKMQEDLVTLAKTASGVNQLVDIYEKYQDLYTVEPNNARQLVEIAARDIEKLLSNRSKALVRLALEAEKVQAAHQWREDFASNEVVYYNAKDDLDPEKNDSEPGSQRIKPVFIEDANFGRQISYQHAAVHIPTDIYEGSTIVLNELNWTSALDEVFKKNREEDPSLLWQVFGSATGLARYYPASPWVDNSRTPNKIDLYDVRRRPWYIQGAASPKDMLILVDVSGSVSGLTLKLIRTSVSEMLETLSDDDFVNVASFNSNAQDVSCFQHLVQANVRNKKVLKDAVNNITAKGITDYKKGFSFAFEQLLNYNVSRANCNKIIMLFTDGGEERAQEIFNKYNKDKKVRVFTFSVGQHNYDRGPIQWMACENKGYYYEIPSIGAIRINTQEYLDVLGRPMVLAGDKAKQVQWTNVYLDALELGLVITGTLPVFNITGQFENKTNLKNQLILGVMGVDVSLEDIKRLTPRFTLCPNGYYFAIDPNGYVLLHPNLQPKNPKSQEPVTLDFLDAELENDIKVEIRNKMIDGESGEKTFRTLVKSQDERYIDKGNRTYTWTPVNGTDYSLALVLPTYSFYYIKAKLEETITQARSKKGKMKDSETLKPDNFEESGYTFIAPRDYCNDLKISDNNTEFLLNFNEFIDRKTPNNPSCNADLINRVLLDAGFTNELVQNYWSKQKNIKGVKARFVVTDGGITRVYPKEAGENWQENPETYEDSFYKRSLDNDNYVFTAPYFNKSGPGAYESGIMVSKAVEIYIQGKLLKPAVVGIKIDVNSWIENFTKTSIRDPCAGPVCDCKRNSDVMDCVILDDGGFLLMANHDDYTNQIGRFFGEIDPSLMRHLVNISVYAFNKSYDYQSVCEPGAAPKQGAGHRSAYVPSVADILQIGWWATAAAWSILQQFLLSLTFPRLLEAVEMEDDDFTASLSKQSCITEQTQYFFDNDSKSFSGVLDCGNCSRIFHGEKLMNTNLIFIMVESKGTCPCDTRLLIQAEQTSDGPNPCDMVKQPRYRKGPDVCFDNNVLEDYTDCGGVSGLNPSLWYIIGIQFLLLWLVSGSTHRLL

SEQ ID NO: 7359 - protein, 887 aa, Homo sapiens
MDWQPDEQGLQQVLQLLKDSQSPNTATQRIVQDKLKQLNQFPDFNNYLIFVLTRLKSEDEPTRSLSGLILKNNVKAHYQSFPPPVADFIKQECLNNIGDASSLIRATIGILITTIASKGELQMWPELLPQLCNLLNSEDYNTCEGAFGALQKICEDSSELLDSDALNRPLNIMIPKFLQFFKHCSPKIRSHAIACVNQFIMDRAQALMDNIDTFIEHLFALAVDDDPEVRKNVCRALVMLLEVRIDRLIPHMHSIIQYMLQRTQDHDENVALEACEFWLTLAEQPICKEVLASHLVQLIPILVNGMKYSEIDIILLKGDVEEDEAVPDSEQDIKPRFHKSRTVTLPHEAERPDGSEDAEDDDDDDALSDWNLRKCSAAALDVLANVFREELLPHLLPLLKGLLFHPEWVVKESGILVLGAIAEGCMQGMVPYLPELIPHLIQCLSDKKALVRSIACWTLSRYAHWVVSQPPDMHLKPLMTELLKRILDGNKRVQEAACSAFATLEEEACTELVPYLSYILDTLVFAFGKYQHKNLLILYDAIGTLADSVGHHLNQPEYIQKLMPPLIQKWNELKDEDKDLFPLLECLSSVATALQSGFLPYCEPVYQRCVTLVQKTLAQAMMYTQHPEQYEAPDKDFMIVALDLLSGLAEGLGGHVEQLVARSNIMTLLFQCMQDSMPEVRQSSFALLGDLTKACFIHVKPCIAEFMPILGTNLNPEFISVCNNATWAIGEICMQMGAEMQPYVQMVLNNLVEIINRPNTPKTLLENTAITIGRLGYVCPQEVAPMLQQFIRPWCTSLRNIRDNEEKDSAFRGICMMIGVNPGGVVQDFIFFCDAVASWVSPKDDLRDMFYKILHGFKDQVGEDNWQQFSEQFPPLLKERLAAFYGV

SEQ ID NO: 7360 - protein, 259 aa, Homo sapiens
MARIPKTLKFVVVIVAVLLPVLAYSATTARQEEVPQQTVAPQQQRHSFKGEECPAGSHRSEHTGACNPCTEGVDYTNASNNEPSCFPCTVCKSDQKHKSSCTMTRDTVCQCKEGTFRNENSPEMCRKCSRCPSGEVQVSNCTSWDDIQCVEEFGANATVETPAAEETMNTSPGTPAPAAEETMNTSPGTPAPAAEETMTTSPGTPAPAAEETMTTSPGTPAPAAEETMITSPGTPASSHYLSCTIVGIIVLIVLLIVFV

SEQ ID NO: 7361 - protein, 1499 aa, Homo sapiens
MEREPAGTEEPGPPGRRRRREGRTRTVRSNLLPPPGAEDPAAGAAKGERRRRRGCAQHLADNRLKTTKYTLLSFLPKNLFEQFHRPANVYFVFIALLNFVPAVNAFQPGLALAPVLFILAITAFRDLWEDYSRHRSDHKINHLGCLVFSREEKKYVNRFWKEIHVGDFVRLRCNEIFPADILLLSSSDPDGLCHIETANLDGETNLKRRQVVRGFSELVSEFNPLTFTSVIECEKPNNDLSRFRGCIIHDNGKKAGLYKENLLLRGCTLRNTDAVVGIVIYAGHETKALLNNSGPRYKRSKLERQMNCDVLWCVLLLVCMSLFSAVGHGLWIWRYQEKKSLFYVPKSDGSSLSPVTAAVYSFLTMIIVLQVLIPISLYVSIEIVKACQVYFINQDMQLYDEETDSQLQCRALNITEDLGQIQYIFSDKTGTLTENKMVFRRCTVSGVEYSHDANAQRLARYQEADSEEEEVVPRGGSVSQRGSIGSHQSVRVVHRTQSTKSHRRTGSRAEAKRASMLSKHTAFSSPMEKDITPDPKLLEKVSECDKSLAVARHQEHLLAHLSPELSDVFDFFIALTICNTVVVTSPDQPRTKVRVRFELKSPVKTIEDFLRRFTPSCLTSGCSSIGSLAANKSSHKLGSSFPSTPSSDGMLLRLEERLGQPTSAIASNGYSSQADNWASELAQEQESERELRYEAESPDEAALVYAARAYNCVLVERLHDQVSVELPHLGRLTFELLHTLGFDSVRKRMSVVIRHPLTDEINVYTKGADSVVMDLLQPCSSVDARGRHQKKIRSKTQNYLNVYAAEGLRTLCIAKRVLSKEEYACWLQSHLEAESSLENSEELLFQSAIRLETNLHLLGATGIEDRLQDGVPETISKLRQAGLQIWVLTGDKQETAVNIAYACKLLDHDEEVITLNATSQEACAALLDQCLCYVQSRGLQRAPEKTKGKVSMRFSSLCPPSTSTASGRRPSLVIDGRSLAYALEKNLEDKFLFLAKQCRSVLCCRSTPLQKSMVVKLVRSKLKAMTLAIGDGANDVSMIQVADVGVGISGQEGMQAVMASDFAVPKFRYLERLLILHGHWCYSRLANMVLYFFYKNTMFVGLLFWFQFFCGFSASTMIDQWYLIFFNLLFSSLPPLVTGVLDRDVPANVLLTNPQLYKSGQNMEEYRPRTFWFNMADAAFQSLVCFSIPYLAYYDSNVDLFTWGTPIVTIALLTFLLHLGIETKTWTWLNWITCGFSVLLFFTVALIYNASCATCYPPSNPYWTMQALLGDPVFYLTCLMTPVAALLPRLFFRSLQGRVFPTQLQLARQLTRKSPRRCSAPKETFAQGRLPKDSGTEHSSGRTVKTSVPLSQPSWHTQQPVCSLEASGEPSTVDMSMPVREHTLLEGLSAPAPMSSAPGEAVLRSPGGCPEESKVRAASTGRVTPLSSLFSLPTFSLLNWISSWSLVSRLGSVLQFSRTEQLADGQAGRGLPVQPHSGRSGLQGPDHRLLIGASSRRSQ

SEQ ID NO: 7362 - protein, 417 aa, Homo sapiens
MEQRPRGCAAVAAALLLVLLGARAQGGTRSPRCDCAGDFHKKIGLFCCRGCPAGHYLKAPCTEPCGNSTCLVCPQDTFLAWENHHNSECARCQACDEQASQVALENCSAVADTRCGCKPGWFVECQVSQCVSSSPFYCQPCLDCGALHRHTRLLCSRRDTDCGTCLPGFYEHGDGCVSCPTSTLGSCPERCAAVCGWRQMFWVQVLLAGLVVPLLLGATLTYTYRHCWPHKPLVTADEAGMEALTPPPATHLSPLDSAHTLLAPPDSSEKICTVQLVGNSWTPGYPETQEALCPQVTWSWDQLPSRALGPAAAPTLSPESPAGSPAMMLQPGPQLYDVMDAVPARRWKEFVRTLGLREAEIEAVEVEIGRFRDQQYEMLKRWRQQQPAGLGAVYAALERMGLDGCVEDLRSRLQRGP

SEQ ID NO: 7363 - protein, 855 aa, Homo sapiens
MSAPSEEEEYARLVMEAQPEWLRAEVKRLSHELAETTREKIQAAEYGLAVLEEKHQLKLQFEELEVDYEAIRSEMEQLKEAFGQAHTNHKKVAADGESREESLIQESASKEQYYVRKVLELQTELKQLRNVLTNTQSENERLASVAQELKEINQNVEIQRGRLRDDIKEYKFREARLLQDYSELEEENISLQKQVSVLRQNQVEFEGLKHEIKRLEEETEYLNSQLEDAIRLKEISERQLEEALETLKTEREQKNSLRKELSHYMSINDSFYTSHLHVSLDGLKFSDDAAEPNNDAEALVNGFEHGGLAKLPLDNKTSTPKKEGLAPPSPSLVSDLLSELNISEIQKLKQQLMQMEREKAGLLATLQDTQKQLEHTRGSLSEQQEKVTRLTENLSALRRLQASKERQTALDNEKDRDSHEDGDYYEVDINGPEILACKYHVAVAEAGELREQLKALRSTHEAREAQHAEEKGRYEAEGQALTEKVSLLEKASRQDRELLARLEKELKKVSDVAGETQGSLSVAQDELVTFSEELANLYHHVCMCNNETPNRVMLDYYREGQGGAGRTSPGGRTSPEARGRRSPILLPKGLLAPEAGRADGGTGDSSPSPGSSLPSPLSDPRREPMNIYNLIAIIRDQIKHLQAAVDRTTELSRQRIASQELGPAVDKDKEALMEEILKLKSLLSTKREQITTLRTVLKANKQTAEVALANLKSKYENEKAMVTETMMKLRNELKALKEDAATFSSLRAMFATRCDEYITQLDEMQRQLAAAEDEKKTLNSLLRMAIQQKLALTQRLELLELDHEQTRRGRAKAAPKTKPATPSVSHTCACASDRAEGTGLANQVFCSEKHSIYCD

SEQ ID NO: 7364 - protein, 107 aa, Homo sapiens
MASASTTMHTTTIAEPDPGMSGWPDGRMETSTPTIMDIVVIAGVIAAVAIVLVSLLFVMLRYMYRHKGTYHTNEAKGTEFAESADAALQGDPALQDAGDSSRKEYFI

SEQ ID NO: 7365 - protein, 674 aa, Homo sapiens
MQTSSSRSVHLSEWQKNYFAITSGICTGPKADAYRAQILRIQYAWANSEISQVCATKLFKKYAEKYSAIIDSDNVESGLNNYAENILTLAGSQQTDSDKWQSGLSINNVFKMSSVQKMMQAGKKFKDSLLEPALASVVIHKEATVFDLPKFSVCGSSQESDSLPNSAHDRDRTQDFPESNRLKLLQNAQPPMVTNTARTCPTFSAPVGESATAKFHVTPLFGNVKKENHSSAKENIGLNVFLSNQSCFPAACENPQRKSFYGSGTIDALSNPILNKACSKTEDNGPKEDSSLPTFKTAKEQLWVDQQKKYHQPQRASGSSYGGVKKSLGASRSRGILGKFVPPIPKQDGGEQNGGMQCKPYGAGPTEPAHPVDERLKNLEPKMIELIMNEIMDHGPPVNWEDIAGVEFAKATIKEIVVWPMLRPDIFTGLRGPPKGILLFGPPGTGKTLIGKCIASQSGATFFSISASSLTSKWVGEGEKMVRALFAVARCQQPAVIFIDEIDSLLSQRGDGEHESSRRIKTEFLVQLDGATTSSEDRILVVGATNRPQEIDEAARRRLVKRLYIPLPEASARKQIVINLMSKEQCCLSEEEIEQIVQQSDAFSGADMTQLCREASLGPIRSLQTADIATITPDQVRPIAYIDFENAFRTVRPSVSPKDLELYENWNKTFGCGK

SEQ ID NO: 7366 - protein, 325 aa, Homo sapiens
MKRLGSVQRKMPCVFVTEVKEEPSSKREHQPFKVLATETVSHKALDADIYSAIPTEKVDGTCCYVTTYKDQPYLWARLDRKPNKQAEKRFKNFLHSKENPKEFFWNVEEDFKPAPECWIPAKETEQINGNPVPDENGHIPGWVPVEKNNKQYCWHSSVVNYEFEIALVLKHHPDDSGLLEISAVPLSDLLEQTLELIGTNINGNPYGLGSKKHPLHLLIPHGAFQIRNLPSLKHNDLVSWFEDCKEGKIEGIVWHCSDGCLIKVHRHHLGLCWPIPDTYMNSRPVIINMNLNKCDSAFDIKCLFNHFLKIDNQKFVRLKDIIFDV

SEQ ID NO: 7367 - protein, 243 aa, Homo sapiens
MGQTAGDLGWRLSLLLLPLLLVQAGVWGFPRPPGRPQLSLQELRREFTVSLHLARKLLSEVRGQAHRFAESHLPGVNLYLLPLGEQLPDVSLTFQAWRRLSDPERLCFISTTLQPFHALLGGLGTQGRWTNMERMQLWAMRLDLRDLQRHLRFQVLAAGFNLPEEEEEEEEEEEEERKGLLPGALGSALQGPAQVSWPQLLSTYRLLHSLELVLSRAVRELLLLSKAGHSVWPLGFPTLSPQP

SEQ ID NO: 7368 - protein, 911 aa, Homo sapiens
MAASQTSQTVASHVPFADLCSTLERIQKSKGRAEKIRHFREFLDSWRKFHDALHKNHKDVTDSFYPAMRLILPQLERERMAYGIKETMLAKLYIELLNLPRDGKDALKLLNYRTPTGTHGDAGDFAMIAYFVLKPRCLQKGSLTIQQVNDLLDSIASNNSAKRKDLIKKSLLQLITQSSALEQKWLIRMIIKDLKLGVSQQTIFSVFHNDAAELHNVTTDLEKVCRQLHDPSVGLSDISITLFSAFKPMLAAIADIEHIEKDMKHQSFYIETKLDGERMQMHKDGDVYKYFSRNGYNYTDQFGASPTEGSLTPFIHNAFKADIQICILDGEMMAYNPNTQTFMQKGTKFDIKRMVEDSDLQTCYCVFDVLMVNNKKLGHETLRKRYEILSSIFTPIPGRIEIVQKTQAHTKNEVIDALNEAIDKREEGIMVKQPLSIYKPDKRGEGWLKIKPEYVSGLMDELDILIVGGYWGKGSRGGMMSHFLCAVAEKPPPGEKPSVFHTLSRVGSGCTMKELYDLGLKLAKYWKPFHRKAPPSSILCGTEKPEVYIEPCNSVIVQIKAAEIVPSDMYKTGCTLRFPRIEKIRDDKEWHECMTLDDLEQLRGKASGKLASKHLYIGGDDEPQEKKRKAAPKMKKVIGIIEHLKAPNLTNVNKISNIFEDVEFCVMSGTDSQPKPDLENRIAEFGGYIVQNPGPDTYCVIAGSENIRVKNIILSNKHDVVKPAWLLECFKTKSFVPWQPRFMIHMCPSTKEHFAREYDCYGDSYFIDTDLNQLKEVFSGIKNSNEQTPEEMASLIADLEYRYSWDCSPLSMFRRHTVYLDSYAVINDLSTKNEGTRLAIKALELRFHGAKVVSCLAEGVSHVIIGEDHSRVADFKAFRRTFKRKFKILKESWVTDSIDKCELQEENQYLI

SEQ ID NO: 7369 - protein, 606 aa, Homo sapiens
MAVAGPAPGAGARPRLDLQFLQRFLQILKVLFPSWSSQNALMFLTLLCLTLLEQFVIYQVGLIPSQYYGVLGNKDLEGFKTLTFLAVMLIVLNSTLKSFDQFTCNLLYVSWRKDLTEHLHRLYFRGRAYYTLNVLRDDIDNPDQRISQDVERFCRQLSSMASKLIISPFTLVYYTYQCFQSTGWLGPVSIFGYFILGTVVNKTLMGPIVMKLVHQEKLEGDFRFKHMQIRVNAEPAAFYRAGHVEHMRTDRRLQRLLQTQRELMSKELWLYIGINTFDYLGSILSYVVIAIPIFSGVYGDLSPAELSTLVSKNAFVCIYLISCFTQLIDLSTTLSDVAGYTHRIGQLRETLLDMSLKSQDCEILGESEWGLDTPPGWPAAEPADTAFLLERVSISAPSSDKPLIKDLSLKISEGQSLLITGNTGTGKTSLLRVLGGLWTSTRGSVQMLTDFGPHGVLFLPQKPFFTDGTLREQVIYPLKEVYPDSGSADDERILRFLELAGLSNLVARTEGLDQQVDWNWYDVLSPGEMQRLSFARLFYLQPKYAVLDEATSALTEEVESELYRIGQQLGMTFISVGHRQSLEKFHSLVLKLCGGGRWELMRIKVE

SEQ ID NO: 7370 - protein, 206 aa, Homo sapiens
MDEDVLTTLKILIIGESGVGKSSLLLRFTDDTFDPELAATIGVDFKVKTISVDGNKAKLAIWDTAGQERFRTLTPSYYRGAQGVILVYDVTRRDTFVKLDNWLNELETYCTRNDIVNMLVGNKIDKENREVDRNEGLKFARKHSMLFIEASAKTCDGVQCAFEELVEKIIQTPGLWESENQNKGVKLSHREEGQGGGACGGYCSVL

SEQ ID NO: 7371 - protein, 557 aa, Homo sapiens
MDGIVPDIAVGTKRGSDELFSTCVTNGPFIMSSNSASAANGNDSKKFKGDSRSAGVPSRVIHIRKLPIDVTEGEVISLGLPFGKVTNLLMLKGKNQAFIEMNTEEAANTMVNYYTSVTPVLRGQPIYIQFSNHKELKTDSSPNQARAQAALQAVNSVQSGNLALAASAAAVDAGMAMAGQSPVLRIIVENLFYPVTLDVLHQIFSKFGTVLKIITFTKNNQFQALLQYADPVSAQHAKLSLDGQNIYNACCTLRIDFSKLTSLNVKYNNDKSRDYTRPDLPSGDSQPSLDQTMAAAFGAPGIISASPYAGAGFPPTFAIPQAAGLSVPNVHGALAPLAIPSAAAAAAAAGRIAIPGLAGAGNSVLLVSNLNPERVTPQSLFILFGVYGDVQRVKILFNKKENALVQMADGNQAQLAMSHLNGHKLHGKPIRITLSKHQNVQLPREGQEDQGLTKDYGNSPLHRFKKPGSKNFQNIFPPSATLHLSNIPPSVSEEDLKVLFSSNGGVVKGFKFFQKDRKMALIQMGSVEEAVQALIDLHNHDLGENHHLRVSFSKSTI

SEQ ID NO: 7372 - protein, 126 aa, Homo sapiens
MPEPAKSAPAPKKGSKKAVTKAQKKDGKKRKRSRKESYSVYVYKVLKQVHPDTGISSKAMGIMNSFVNDIFERIAGEASRLAHYNKRSTITSREIQTAVRLLLPGELAKHAVSEGTKAVTKYTSAK

SEQ ID NO: 7373 - protein, 863 aa, Homo sapiens
MRLALLWALGLLGAGSPLPSWPLPNIGGTEEQQAESEKAPREPLEPQVLQDDLPISLKKVLQTSLPEPLRIKLELDGDSHILELLQNRELVPGRPTLVWYQPDGTRVVSEGHTLENCCYQGRVRGYAGSWVSICTCSGLRGLVVLTPERSYTLEQGPGDLQGPPIISRIQDLHLPGHTCALSWRESVHTQKPPEHPLGQRHIRRRRDVVTETKTVELVIVADHSEAQKYRDFQHLLNRTLEVALLLDTFFRPLNVRVALVGLEAWTQRDLVEISPNPAVTLENFLHWRRAHLLPRLPHDSAQLVTGTSFSGPTVGMAIQNSICSPDFSGGVNMDHSTSILGVASSIAHELGHSLGLDHDLPGNSCPCPGPAPAKTCIMEASTDFLPGLNFSNCSRRALEKALLDGMGSCLFERLPSLPPMAAFCGNMFVEPGEQCDCGFLDDCVDPCCDSLTCQLRPGAQCASDGPCCQNCQLRPSGWQCRPTRGDCDLPEFCPGDSSQCPPDVSLGDGEPCAGGQAVCMHGRCASYAQQCQSLWGPGAQPAAPLCLQTANTRGNAFGSCGRNPSGSYVSCTPRDAICGQLQCQTGRTQPLLGSIRDLLWETIDVNGTELNCSWVHLDLGSDVAQPLLTLPGTACGPGLVCIDHRCQRVDLLGAQECRSKCHGHGVCDSNRHCYCEEGWAPPDCTTQLKATSSLTTGLLLSLLVLLVLVMLGASYWYRARLHQRLCQLKGPTCQYRAAQSGPSERPGPPQRALLARGTKQASALSFPAPPSRPLPPDPVSKRLQAELADRPNPPTRPLPADPVVRSPKSQGPAKPPPPRKPLPADPQGRCPSGDLPGPGAGIPPLVVPSRPAPPPPTVSSLYL

SEQ ID NO: 7374 - protein, 2491 aa, Homo sapiens
MGAAAGRSPHLGPAPARRPQRSLLLLQLLLLVAAPGSTQAQAAPFPELCSYTWEAVDTKNNVLYKINICGSVDIVQCGPSSAVCMHDLKTRTYHSVGDSVLRSATRSLLEFNTTVSCDQQGTNHRVQSSIAFLCGKTLGTPEFVTATECVHYFEWRTTAACKKDIFKANKEVPCYVFDEELRKHDLNPLIKLSGAYLVDDSDPDTSLFINVCRDIDTLRDPGSQLRACPPGTAACLVRGHQAFDVGQPRDGLKLVRKDRLVLSYVREEAGKLDFCDGHSPAVTITFVCPSERREGTIPKLTAKSNCRYEIEWITEYACHRDYLESKTCSLSGEQQDVSIDLTPLAQSGGSSYISDGKEYLFYLNVCGETEIQFCNKKQAAVCQVKKSDTSQVKAAGRYHNQTLRYSDGDLTLIYFGGDECSSGFQRMSVINFECNKTAGNDGKGTPVFTGEVDCTYFFTWDTEYACVKEKEDLLCGATDGKKRYDLSALVRHAEPEQNWEAVDGSQTETEKKHFFINICHRVLQEGKARGCPEDAAVCAVDKNGSKNLGKFISSPMKEKGNIQLSYSDGDDCGHGKKIKTNITLVCKPGDLESAPVLRTSGEGGCFYEFEWHTAAACVLSKTEGENCTVFDSQAGFSFDLSPLTKKNGAYKVETKKYDFYINVCGPVSVSPCQPDSGACQVAKSDEKTWNLGLSNAKLSYYDGMIQLNYRGGTPYNNERHTPRATLITFLCDRDAGVGFPEYQEEDNSTYNFRWYTSYACPEEPLECVVTDPSTLEQYDLSSLAKSEGGLGGNWYAMDNSGEHVTWRKYYINVCRPLNPVPGCNRYASACQMKYEKDQGSFTEVVSISNLGMAKTGPVVEDSGSLLLEYVNGSACTTSDGRQTTYTTRIHLVCSRGRLNSHPIFSLNWECVVSFLWNTEAACPIQTTTDTDQACSIRDPNSGFVFNLNPLNSSQGYNVSGIGKIFMFNVCGTMPVCGTILGKPASGCEAETQTEELKNWKPARPVGIEKSLQLSTEGFITLTYKGPLSAKGTADAFIVRFVCNDDVYSGPLKFLHQDIDSGQGIRNTYFEFETALACVPSPVDCQVTDLAGNEYDLTGLSTVRKPWTAVDTSVDGRKRTFYLSVCNPLPYIPGCQGSAVGSCLVSEGNSWNLGVVQMSPQAAANGSLSIMYVNGDKCGNQRFSTRITFECAQISGSPAFQLQDGCEYVFIWRTVEACPVVRVEGDNCEVKDPRHGNLYDLKPLGLNDTIVSAGEYTYYFRVCGKLSSDVCPTSDKSKVVSSCQEKREPQGFHKVAGLLTQKLTYENGLLKMNFTGGDTCHKVYQRSTAIFFYCDRGTQRPVFLKETSDCSYLFEWRTQYACPPFDLTECSFKDGAGNSFDLSSLSRYSDNWEAITGTGDPEHYLINVCKSLAPQAGTEPCPPEAAACLLGGSKPVNLGRVRDGPQWRDGIIVLKYVDGDLCPDGIRKKSTTIRFTCSESQVNSRPMFISAVEDCEYTFAWPTATACPMKSNEHDDCQVTNPSTGHLFDLSSLSGRAGFTAAYSEKGLVYMSICGENENCPPGVGACFGQTRISVGKANKRLRYVDQVLQLVYKDGSPCPSKSGLSYKSVISFVCRPEARPTNRPMLISLDKQTCTLFFSWHTPLACEQATECSVRNGSSIVDLSPLIHRTGGYEAYDESEDDASDTNPDFYINICQPLNPMHGVPCPAGAAVCKVPIDGPPIDIGRVAGPPILNPIANEIYLNFESSTPCLADKHFNYTSLIAFHCKRGVSMGTPKLLRTSECDFVFEWETPVVCPDEVRMDGCTLTDEQLLYSFNLSSLSTSTFKVTRDSRTYSVGVCTFAVGPEQGGCKDGGVCLLSGTKGASFGRLQSMKLDYRHQDEAVVLSYVNGDRCPPETDDGVPCVFPFIFNGKSYEECIIESRAKLWCSTTADYDRDHEWGFCRHSNSYRTSSIIFKCDEDEDIGRPQVFSEVRGCDVTFEWKTKVVCPPKKLECKFVQKHKTYDLRLLSSLTGSWSLVHNGVSYYINLCQKIYKGPLGCSERASICRRTTTGDVQVLGLVHTQKLGVIGDKVVVTYSKGYPCGGNKTASSVIELTCTKTVGRPAFKRFDIDSCTYYFSWDSRAACAVKPQEVQMVNGTITNPINGKSFSLGDIYFKLFRASGDMRTNGDNYLYEIQLSSITSSRNPACSGANICQVKPNDQHFSRKVGTSDKTKYYLQDGDLDVVFASSSKCGKDKTKSVSSTIFFHCDPLVEDGIPEFSHETADCQYLFSWYTSAVCPLGVGFDSENPGDDGQMHKGLSERSQAVGAVLSLLLVALTCCLLALLLYKKERRETVISKLTTCCRRSSNVSYKYSKVNKEEETDENETEWLMEEIQLPPPRQGKEGQENGHITTKSVKALSSLHGDDQDSEDEVLTIPEVKVHSGRGAGAESSHPVRNAQSNALQEREDDRVGLVRGEKARKGKSSSAQQKTVSSTKLVSFHDDSDEDLLHI

SEQ ID NO: 7375 - protein, 551 aa, Homo sapiens
MLCSLLLCECLLLVAGYAHDDDWIDPTDMLNYDAASGTMRKSQAKYGISGEKDVSPDLSCADEISECYHKLDSLTYKIDECEKKKREDYESQSNPVFRRYLNKILIEAGKLGLPDENKGDMHYDAEIILKRETLLEIQKFLNGEDWKPGALDDALSDILINFKFHDFETWKWRFEDSFGVDPYNVLMVLLCLLCIVVLVATELWTYVRWYTQLRRVLIISFLFSLGWNWMYLYKLAFAQHQAEVAKMEPLNNVCAKKMDWTGSIWEWFRSSWTYKDDPCQKYYELLLVNPIWLVPPTKALAVTFTTFVTEPLKHIGKGTGEFIKALMKEIPALLHLPVLIIMALAILSFCYGAGKSVHVLRHIGGPESEPPQALRPRDRRRQEEIDYRPDGGAGDADFHYRGQMGPTEQGPYAKTYEGRREILRERDVDLRFQTGNKSPEVLRAFDVPDAEAREHPTVVPSHKSPVLDTKPKETGGILGEGTPKESSTESSQSAKPVSGQDTSGNTEGSPAAEKAQLKSEAAGSPDQGSTYSPARGVAGPRGQDPVSSPCG

SEQ ID NO: 7376 - protein, 97 aa, Homo sapiens
MAKSFPVFSLLSFILIHLVLSSVSGPRHWWPPRGIIKVKCPYEKVNLSWYNGTVNPCPGLYQPICGTNFITYDNPCILCVESLKSHGRIRFYHDGKC

SEQ ID NO: 7377 - protein, 415 aa, Homo sapiens
MFADLDYDIEEDKLGIPTVPGKVTLQKDAQNLIGISIGGGAQYCPCLYIVQVFDNTPAALDGTVAAGDEITGVNGRSIKGKTKVEVAKMIQEVKGEVTIHYNKLQADPKQGMSLDIVLKKVKHRLVENMSSGTADALGLSRAILCNDGLVKRLEELERTAELYKGMTEHTKNLLRAFYELSQTHRAFGDVFSVIGVREPQPAASEAFVKFADAHRSIEKFGIRLLKTIKPMLTDLNTYLNKAIPDTRLTIKKYLDVKFEYLSYCLKVKEMDDEEYSCIALGEPLYRVSTGNYEYRLILRCRQEARARFSQMRKDVLEKMELLDQKHVQDIVFQLQRLVSTMSKYYNDCYAVLRDADVFPIEVDLAHTTLAYGLNQEEFTDGEEEEEEEDTAAGEPSRDTRGAAGPLDKGGSWCDS

SEQ ID NO: 7378 - protein, 149 aa, Homo sapiens [sequence omitted]

SEQ ID NO: 7379 - protein, 1655 aa, Homo sapiens
MLKCIPLWRCNRHVESVDKRHCSLQAVPEEIYRYSRSLEELLLDANQLRELPKPFFRLLNLRKLGLSDNEIQRLPPEVANFMQLVELDVSRNDIPEIPESIKFCKALEIADFSGNPLSRLPDGFTQLRSLAHLALNDVSLQALPGDVGNLANLVTLELRENLLKSLPASLSFLVKLEQLDLGGNDLEVLPDTLGALPNLRELWLDRNQLSALPPELGNLRRLVCLDVSENRLEELPAELGGLVLLTDLLLSQNLLRRLPDGIGQLKQLSILKVDQNRLCEVTEAIGDCENLSELILTENLLMALPRSLGKLTKLTNLNVDRNHLEALPPEIGGCVALSVLSLRDNRLAVLPPELAHTTELHVLDVAGNRLQSLPFALTHLNLKALWLAENQAQPMLRFQTEDDARTGEKVLTCYLLPQQPPPSLEDAGQQGSLSETWSDAPPSRVSVIQFLEAPIGDEDAEEAAAEKRGLQRRATPHPSELKVMKRSIEGRRSEACPCQPDSGSPLPAEEEKRLSAESGLSEDSRPSASTVSEAEPEGPSAEAQGGSQQEATTAGGEEDAEEDYQEPTVHFAEDALLPGDDREIEEGQPEAPWTLPGGRQRLIRKDTPHYKKHFKISKLPQPEAVVALLQGMQPDGEGPVAPGGWHNGPHAPWAPRAQKEEEEEEEGSPQEEEEEEEEENRAEEEEASTEEEDKEGAVVSAPSVKGVSFDQANNLLIEPARIEEEELTLTILRQTGGLGISIAGGKGSTPYKGDDEGIFISRVSEEGPAARAGVRVGDKLLEVNGVALQGAEHHEAVEALRGAGTAVQMRVWRERMVEPENAVTITPLRPEDDYSPRERRGGGLRLPLLPPESPGPLRQRHVACLARSERGLGFSIAGGKGSTPYRAGDAGIFVSRIAEGGAAHRAGTLQVGDRVLSINGVDVTEARHDHAVSLLTAASPTIALLLEREAGGPLPPSPLPHSSPPTAAVATTSITTATPGVPGLPSLAPSLLAAALEGPYPVEEIRLPRAGGPLGLSIVGGSDHSSHPFGVQEPGVFISKVLPRGLAARSGLRVGDRILAVNGQDVRDATHQEAVSALLRPCLELSLLVRRDPAPPGLRELCIQKAPGERLGISIRGGARGHAGNPRDPTDEGIFISKVSPTGAAGRDGRLRVGLRLLEVNQQSLLGLTHGEAVQLLRSVGDTLTVLVCDGFEASTDAALEVSPGVIANPFAAGIGHRNSLESISSIDRELSPEGPGKEKELPGQTLHWGPEATEAAGRGLQPLKLDYRALAAVPSAGSVQRVPSGAAGGKMAESPCSPSGQQPPSPPSPDELPANVKQAYRAFAAVPTSHPPEDAPAQPPTPGPAASPEQLSFRERQKYFELEVRVPQAEGPPKRVSLVGADDLRKMQEEEARKLQQKRAQMLREAAEAGAEARLALDGETLGEEEQEDEQPPWASPSPTSRQSPASPPPLGGGAPVRTAKAERRHQERLRVQSPEPPAPERALSPAELRALEAEKRALWRAARMKSLEQDALRAQMVLSRSQEGRGTRGPLERLAEAPSPAPTPSPTPVEDLGPQTSTSPGRLPLSGKKFDYRAFAALPSSRPVYDIQSPDFAEELRSLEPSPSPGPQEEDGEVALVLLGRPSPGAVGPEDVALCSSRRPVRPGRRGLGPVPS

SEQ ID NO: 7380 - protein, 115 aa, Homo sapiens
MNAFLLSALCLLGAWAALAGGVTVQDGNFSFSLESVKKLKDLQEPQEPRVGKLRNFAPIPGEPVVPILCSNPNFPEELKPLCKEPNAQEILQRLEEIAEDPGTCEICAYAACTGC

SEQ ID NO: 7381 - protein, 659 aa, Homo sapiens
MPGPPRSLEMGLLTFRDVAIEFSLEEWQHLDIAQQNLYRNVMLENYRNLAFLGIAVSKPDLITCLEQGKEPWNMKRHEMVDEPPGMCPHFAQDLWPEQGMEDSFQKAILRRYGKYGHENLQLRKGCKSVDEYKVNKEGYNGLNQCFTTAQSKVFQCDKYLKVFYKFLNSNRPKIRHTEKKSFKCKKRVKLFCMLSHKTQHKSIYHREKSYKCKECGKTFNWSSTLTNHRKIYTEEKPYKCEEYNKSPKQLSTLTTHEIIHAGEKLYKCEECGEAFNRSSNLTTHKIIHTGEKPYKCEECGKAFIWSSTLTEHKKIHTRKKPYKCEECGKAFIWSSTLTRHKRMHTGEKPYKCEECGKAFSQSSTLTTHKIIHTGEKRYKCLECGKAFKQLSTLTTHKIIHVGEKLYKCEECGKGFNRSSNLTTHKIIHTGEKPYKCEECGKAFIWSSTLTKHKRIHTREKPYKCEECGKAFIWSSTLTRHKRMHTGEKPYKCEECGKSFSQSSTLTTHKIIHTGEKPYKCEECGKAFNWSSTLTKHKIIHTEEKPYKCEKCGKAFKQSSILTNHKRIHTGEKPYKCEECGKSFNRSSTFTKHKVIHTGVKPYKCEECGKAFFWSSTLTKHKRIHTGEQPYKWEKFGKAFNRSSHLTTDKITHWREILQV

SEQ ID NO: 7382 - protein, 357 aa, Homo sapiens
MEKYVAAMVLSAAGDALGYYNGKWEFLQDGEKIHRQLAQLGGLDALDVGRWRVSDDTVMHLATAEALVEAGKAPKLTQLYYLLAKHYQDCMEDMDGRAPGGASVHNAMQLKPGKPNGWRIPFNSHEGGCGAAMRAMCIGLRFPHHSQLDTLIQVSIESGRMTHHHPTGYLGALASALFTAYAVNSRPPLQWGKGLMELLPEAKKYIVQSGYFVEENLQHWSYFQTKWENYLKLRGILDGESAPTFPESFGVKERDQFYTSLSYSGWGGSSGHDAPMIAYDAVLAAGDSWKELAHRAFFHGGDSDSTAAIAGCWWGVMYGFKGVSPSNYEKLEYRNRLEETARALYSLGSKEDTVISL

SEQ ID NO: 7383 - protein, 711 aa, Homo sapiens
MAGLTAAAPRPGVLLLLLSILHPSRPGGVPGAIPGGVPGGVFYPGAGLGALGGGALGPGGKPLKPVPGGLAGAGLGAGLGAFPAVTFPGALVPGGVADAAAAYKAAKAGAGLGGVPGVGGLGVSAAPSVPGAVVPQPGAGVKPGKVPGVGLPGVYPGGVLPGARFPGVGVLPGVPTGAGVKPKAPGVGGAFAGIPGVGPFGGPQPGVPLGYPIKAPKLPGGYGLPYTTGKLPYGYGPGGVAGAAGKAGYPTGTGVGPQAAAAAAAKAAAKFGAGAAGVLPGVGGAGVPGVPGAIPGIGGIAGVGTPAAAAAAAAAAKAAKYGAAAGLVPGGPGFGPGVVGVPGAGVPGVGVPGAGIPVVPGAGIPGAAVPGVVSPEAAAKAAAKAAKYGARPGVGVGGIPTYGVGAGGFPGFGVGVGGIPGVAGVPGVGGVPGVGGVPGVGISPEAQAAAAAKAAKYGVGTPAAAAAKAAAKAAQFGLVPGVGVAPGVGVAPGVGVAPGVGLAPGVGVAPGVGVAPGVGVAPGIGPGGVAAAAKSAAKVAAKAQLRAAAGLGAGIPGLGVGVGVPGLGVGAGVPGLGVGAGVPGFGAVPGALAAAKAAKYGAAVPGVLGGLGALGGVGIPGGVVGAGPAAAAAAAKAAAKAAQFGLVGAAGLGGLGVGGLGVPGVGGLGGIPPAAAAKAAKYGVAARPGFGLSPIFPGGACLGKACGRKRK

SEQ ID NO: 7384 - protein, 390 aa, Homo sapiens
MEDPTLYIVERPLPGYPDAEAPEPSSAGAQAAEEPSGAGSEELIKSDQVNGVLVLSLLDKIIGAVDQIQLTQAQLEERQAEMEGAVQSIQGELSKLGKAHATTSNTVSKLLEKVRKVSVNVKTVRGSLERQAGQIKKLEVNEAELLRRRNFKVMIYQDEVKLPAKLSISKSLKESEALPEKEGEELGEGERPEEDAAALELSSDEAVEVEEVIEESRAERIKRSGLRRVDDFKKAFSKEKMEKTKVRTRENLEKTRLKTKENLEKTRHTLEKRMNKLGTRLVPAERREKLKTSRDKLRKSFTPDHVVYARSKTAVYKVPPFTFHVKKIREGQVEVLKATEMVEVGADDDEGGAERGEAGDLRRGSSPDVHALLEITEESDAVLVDKSDSD

SEQ ID NO: 7385 - protein, 213 aa, Homo sapiens
MAETYDFLFKFLVIGSAGTGKSCLLHQFIENKFKQDSNHTIGVEFGSRVVNVGGKTVKLQIWDTAGQERFRSVTRSYYRGAAGALLVYDITSRETYNSLAAWLTDARTLASPNIVVILCGNKKDLDPEREVTFLEASRFAQENELMFLETSALTGENVEEAFLKCARTILNKIDSGELDPERMGSGIQYGDASLRQLRQPRSAQAVAPQPCGC

SEQ ID NO: 7386 - protein, 432 aa, Homo sapiens
MSWKILLFGVINLICTGFLLMWCSSTNSIALTAYTYLTIFDLFSLMTCLISYWVTLRKPSPVYSFGFERLEVLAVFASTVLAQLGALFILKESAERFLEQPEIHTGRLLVGTFVALCFNLFTMLSIRNKPFAYVSEAASTSWLQEHVADLSRSLCGIIPGLSSIFLPRMNPFVLIDLAGAFALCITYMLIEINNYFAVDTASAIAIALMTFGTMYPMSVYSGKVLLQTTPPHVIGQLDKLIREVSTLDGVLEVRNEHFWTLGFGSLAGSVHVRIRRDANEQMVLAHVTNRLYTLVSTLTVQIFKDDWIRPALLSGPVAANVLNFSDHHVIPMPLLKGTDDLNPVTSTPAKPSSPPPEFSFNTPGKNVNPVILLNTQTRPYGFGLNHGHTPYSSMLNQGLGVPGIGATQGLRTGFTNIPSRYGTNNRIGQPRP

SEQ ID NO: 7387 - protein, 1668 aa, Homo sapiens
MSYDVLFQRTELGALEIWRQLICAHVCICVGWLYLRDRVCSKKDIILRTEQNSGRTILIKAVTEKNFETKDFRASLENGVLLCDLINKLKPGVIKKINRLSTPIAGLDNINVFLKACEQIGLKEAQLFHPGDLQDLSNRVTVKQEETDRRVKNVLITLYWLGRKAQSNPYYNGPHLNLKAFENLLGQALTKALEDSSFLKRSGRDSGYGDIWCPERGEFLAPPRHHKREDSFESLDSLGSRSLTSCSSDITLRGGREGFESDTDSEFTFKMQDYNKDDMSYRRISAVEPKTALPFNRFLPNKSRQPSYVPAPLRKKKPDKHEDNRRSWASPVYTEADGTFSSNQRRIWGTNVENWPTVQGTSKSSCYLEEEKAKTRSIPNIVKDDLYVRKLSPVMPNPGNAFDQFLPKCWTPEDVNWKRIKRETYKPWYKEFQGFSQFLLLQALQTYSDDILSSETHTKIDPTSGPRLITRRKNLSYAPGYRRDDLEMAALDPDLENDDFFVRKTGAFHANPYVLRAFEDFRKFSEQDDSVERDIILQCREGELVLPDLEKDDMIVRRIPAQKKEVPLSGAPDRYHPVPFPEPWTLPPEIQAKFLCVLERTCPSKEKSNSCRILVPSYRQKKDDMLTRKIQSWKLGTTVPPISFTPGPCSEADLKRWEAIREASRLRHKKRLMVERLFQKIYGENGSKSMSDVSAEDVQNLRQLRYEEMQKIKSQLKEQDQKWQDDLAKWKDRRKSYTSDLQKKKEEREEIEKQALEKSKRSSKTFKEMLQDRESQNQKSTVPSRRRMYSFDDVLEEGKRPPTMTVSEASYQSERVEEKGATYPSEIPKEDSTTFAKREDRVTTEIQLPSQSPVEEQSPASLSSLRSRSTQMESTRVSASLPRSYRKTDTVRLTSVVTPRPFGSQTRGISSLPRSYTMDDAWKYNGDVEDIKRTPNNVVSTPAPSPDASQLASSLSSQKEVAATEEDVTRLPSPTSPFSSLSQDQAATSKATLSSTSGLDLMSESGEGEISPQREVSRSQDQFSDMRISINQTPGKSLDFGFTIKWDIPGIFVASVEAGSPAEFSQLQVDDEIIAINNTKFSYNDSKEWEEAMAKAQETGHLVMDVRRYGKAGSPETKWIDATSGIYNSEKSSNLSVTTDFSESLQSSNIESKEINGIHDESNAFESKASESISLKNLKRRSQFFEQGSSDSVVPDLPVPTISAPSRWVWDQEEERKRQERWQKEQDRLLQEKYQREQEKLREEWQRAKQEAERENSKYLDEELMVLSSNSMSLTTREPSLATWEATWSEGSKSSDREGTRAGEEERRQPQEEVVHEDQGKKPQDQLVIERERKWEQQLQEEQEQKRLQAEAEEQKRPAEEQKRQAEIERETSVRIYQYRRPVDSYDIPKTEEASSGFLPGDRNKSRSTTELDDYSTNKNGNNKYLDQIGNMTSSQRRSKKEQVPSGAELERQQILQEMRKRTPLHNDNSWIRQRSASVNKEPVSLPGIMRRGESLDNLDSPRSNSWRQPPWLNQPTGFYASSSVQDFSRPPPQLVSTSNRAYMRNPSSSVPPPSAGSVKTSTTGVATTQSPTPRSHSPSASQSGSQLRNRSVSGKRICSYCNNILGKGAAMIIESLGLCYHLHCFKCVACECDLGGSSSGAEVRIRNHQLYCNDCYLRFKSGRPTAM

SEQ ID NO: 7388 - protein, 217 aa, Homo sapiens
MSNPFLKQVFNKDKTFRPKRKFEPGTQRFELHKKAQASLNAGLDLRLAVQLPPGEDLNDWVAVHVVDFFNRVNLIYGTISDGCTEQSCPVMSGGPKYEYRWQDEHKFRKPTALSAPRYMDLLMDWIEAQINNEDLFPTNVGTPFPKNFLQTVRKILSRLFRVFVHVYIHHFDRIAQMGSEAHVNTCYKHFYYFVKEFGLIDTKELEPLKEMTARMCH

SEQ ID NO: 7389 - protein, 189 aa, Homo sapiens
MVGGGQPCGPNMSEVSCKKRDDYLEWPEYFMAVAFLSAQRSKDPNSQVGACIVNSENKIVGIGYNGMPNGCSDDVLPWRRTAENKLDTKYPYVCHAELNAIMNKNSTDVKGCSMYVALFPCNECAKLIIQAGIKEVIFMSDKYHDSDEATAARLLFNMAGVTFRKFIPKCSKIVIDFDSINSRPSQKLQ

SEQ ID NO: 7390 - protein, 1226 aa, Homo sapiens
MSKLKVIPEKSLTNNSRIVGLLAQLEKINAEPSESDTARYVTSKILHLAQSQEKTRREMTAKGSTGMEILLSTLENTKDLQTTLNILSILVELVSAGGGRRVSFLVTKGGSQILLQLLMNASKESPPHEDLMVQIHSILAKIGPKDKKFGVKARINGALNITLNLVKQNLQNHRLVLPCLQLLRVYSANSVNSVSLGKNGVVELMFKIIGPFSKKNSSLIKVALDTLAALLKSKTNARRAVDRGYVQVLLTIYVDWHRHDNRHRNMLIRKGILQSLKSVTNIKLGRKAFIDANGMKILYNTSQECLAVRTLDPLVNTSSLIMRKCFPKNRLPLPTIKSSFHFQLPVIPVTGPVAQLYSLPPEVDDVVDESDDNDDIDVEAENETENEDDLDQNFKNDDIETDINKLKPQQEPGRTIEDLKMYEHLFPELVDDFQDYDLISKEPKPFVFEGKVRGPIVVPTAGEETSGNSGNLRKVVMKENISSKGDEGEKKSTFMDLAKEDIKDNDRTLQQQPGDQNRTISSVHGLNNDIVKALDRITLQNIPSQTAPGFTAEMKKDCSLPLTVLTCAKACPHMATCGNVLFEGRTVQLGKLCCTGVETEDDEDTESNSSVEQASVEVPDGPTLHDPDLYIEIVKNTKSVPEYSEVAYPDYFGHIPPPFKEPILERPYGVQRTKIAQDIERLIHQSDIIDRVVYDLDNPNYTIPEEGDILKFNSKFESGNLRKVIQIRKNEYDLILNSDINSNHYHQWFYFEVSGMRPGVAYRFNIINCEKSNSQFNYGMQPLMYSVQEALNARPWWIRMGTDICYYKNHFSRSSVAAGGQKGKSYYTITFTVNFPHKDDVCYFAYHYPYTYSTLQMHLQKLESAHNPQQIYFRKDVLCETLSGNSCPLVTITAMPESNYYEHICHFRNRPYVFLSARVHPGETNASWVMKGTLEYLMSNNPTAQSLRESYIFKIVPMLNPDGVINGNHRCSLSGEDLNRQWQSPSPDLHPTIYHAKGLLQYLAAVKRLPLVYCDYHGHSRKKNVFMYGCSIKETVWHTNDNATSCDVVEDTGYRTLPKILSHIAPAFCMSSCSFVVEKSKESTARVVVWREIGVQRSYTMESTLCGCDQGKYKGLQIGTRELEEMGAKFCVGLLRLKRLTSPLEYNLPSSLLDFENDLIESSCKVTSPTTYVLDEDEPRFLEEVDYSAESNDELDIELAENVGDYEPSAQEEVLSDSELSRTYLP

SEQ ID NO: 7391 - protein, 292 aa, Homo sapiens
MLRKLWQWFYEETESSDDVEVLTLKKFKGDLAYRRQEYQKALQEYSSISEKLSSTNFAMKRDVQEGQARCLAHLGRHMEALEIAANLENKATNTDHLTTVLYLQLAICSSLQNLEKTIFCLQKLISLHPFNPWNWGKLAEAYLNLGPALSAALASSQKQHSFTSSDKTIKSFFPHSGKDCLLCFPETLPESSLFSVEANSSNSQKNEKALTNIQNCMAEKRETVLIETQLKACASFIRTRLLLQFTQPQQTSFALERNLRTQQEIEDKMKGFSFKEDTLLLIAEVSVSLGFM

SEQ ID NO: 7392 - protein, 465 aa, Homo sapiens
MASTTSTKKMMEEATCSICLSLMTNPVSINCGHSYCHLCITDFFKNPSQKQLRQETFCCPQCRAPFHMDSLRPNKQLGSLIEALKETDQEMSCEEHGEQFHLFCEDEGQLICWRCERAPQHKGHTTALVEDVCQGYKEKLQKAVTKLKQLEDRCTEQKLSTAMRITKWKEKVQIQRQKIRSDFKNLQCFLHEEEKSYLWRLEKEEQQTLSRLRDYEAGLGLKSNELKSHILELEEKCQGSAQKLLQNVNDTLSRSWAVKLETSEAVSLELHTMCNVSKLYFDVKKMLRSHQVSVTLDPDTAHHELILSEDRRQVTRGYTQENQDTSSRRFTAFPCVLGCEGFTSGRRYFEVDVGEGTGWDLGVCMENVQRGTGMKQEPQSGFWTLRLCKKKGYVALTSPPTSLHLHEQPLLVGIFLDYEAGVVSFYNGNTGCHIFTFPKASFSDTLRPYFQVYQYSPLFLPPPGD

SEQ ID NO: 7393 - protein, 2710 aa, Homo sapiens
MSDKMSSFLHIGDICSLYAEGSTNGFISTLGLVDDRCVVQPETGDLNNPPKKFRDCLFKLCPMNRYSAQKQFWKAAKPGANSTTDAVLLNKLHHAADLEKKQNETENRKLLGTVIQYGNVIQLLHLKSNKYLTVNKRLPALLEKNAMRVTLDEAGNEGSWFYIQPFYKLRSIGDSVVIGDKVVLNPVNAGQPLHASSHQLVDNPGCNEVNSVNCNTSWKIVLFMKWSDNKDDILKGGDVVRLFHAEQEKFLTCDEHRKKQHVFLRTTGRQSATSATSSKALWEVEVVQHDPCRGGAGYWNSLFRFKHLATGHYLAAEVDPDFEEECLEFQPSVDPDQDASRSRLRNAQEKMVYSLVSVPEGNDISSIFELDPTTLRGGDSLVPRNSYVRLRHLCTNTWVHSTNIPIDKEEEKPVMLKIGTSPVKEDKEAFAIVPVSPAEVRDLDFANDASKVLGSIAGKLEKGTITQNERRSVTKLLEDLVYFVTGGTNSGQDVLEVVFSKPNRERQKLMREQNILKQIFKLLQAPFTDCGDGPMLRLEELGDQRHAPFRHICRLCYRVLRHSQQDYRKNQEYIAKQFGFMQKQIGYDVLAEDTITALLHNNRKLLEKHITAAEIDTFVSLVRKNREPRFLDYLSDLCVSMNKSIPVTQELICKAVLNPTNADILIETKLVLSRFEFEGVSSTGENALEAGEDEEEVWLFWRDSNKEIRSKSVRELAQDAKEGQKEDRDVLSYYRYQLNLFARMCLDRQYLAINEISGQLDVDLILRCMSDENLPYDLRASFCRLMLHMHVDRDPQEQVTPVKYARLWSEIPSEIAIDDYDSSGASKDEIKERFAQTMEFVEEYLRDVVCQRFPFSDKEKNKLTFEVVNLARNLIYFGFYNFSDLLRLTKILLAILDCVHVTTIFPISKMAKGEENKGSNVMRSIHGVGELMTQVVLRGGGFLPMTPMAAAPEGNVKQAEPEKEDIMVMDTKLKIIEILQFILNVRLDYRISCLLCIFKREFDESNSQTSETSSGNSSQEGPSNVPGALDFEHIEEQAEGIFGGSEENTPLDLDDHGGRTFLRVLLHLTMHDYPPLVSGALQLLFRHFSQRQEVLQAFKQVQLLVTSQDVDNYKQIKQDLDQLRSIVEKSELWVYKGQGPDETMDGASGENEHKKTEEGNNKPQKHESTSSYNYRVVKEILIRLSKLCVQESASVRKSRKQQQRLLRNMGAHAVVLELLQIPYEKAEDTKMQEIMRLAHEFLQNFCAGNQQNQALLHKHINLFLNPGILEAVTMQHIFMNNFQLCSEINERVVQHFVHCIETHGRNVQYIKFLQTIVKAEGKFIKKCQDMVMAELVNSGEDVLVFYNDRASFQTLIQMMRSERDRMDENSPLMYHIHLVELLAVCTEGKNVYTEIKCNSLLPLDDIVRVVTHEDCIPEVKIAYINFLNHCYVDTEVEMKEIYTSNHMWKLFENFLVDICRACNNTSDRKHADSILEKYVTEIVMSIVTTFFSSPFSDQSTTLQTRQPVFVQLLQGVFRVYHCNWLMPSQKASVESCIRVLSDVAKSRAIAIPVDLDSQVNNLFLKSHSIVQKTAMNWRLSARNAARRDSVLAASRDYRNIIERLQDIVSALEDRLRPLVQAELSVLVDVLHRPELLFPENTDARRKCESGGFICKLIKHTKQLLEENEEKLCIKVLQTLREMMTKDRGYGEKGEALRQVLVNRYYGNVRPSGRRESLTSFGNGPLSAGGPGKPGGGGGGSGSSSMSRGEMSLAEVQCHLDKEGASNLVIDLIMNASSDRVFHESILLAIALLEGGNTTIQHSFFCRLTEDKKSEKFFKVFYDRMKVAQQEIKATVTVNTSDLGNKKKDDEVDRDAPSRKKAKEPTTQITEEVRDQLLEASAATRKAFTTFRREADPDDHYQPGEGTQATADKAKDDLEMSAVITIMQPILRFLQLLCENHNRDLQNFLRCQNNKTNYNLVCETLQFLDCICGSTTGGLGLLGLYINEKNVALINQTLESLTEYCQGPCHENQNCIATHESNGIDIITALILNDINPLGKKRMDLVLELKNNASKLLLAIMESRHDSENAERILYNMRPKELVEVIKKAYMQGEVEFEDGENGEDGAASPRNVGHNIYILAHQLARHNKELQSMLKPGGQVDGDEALEFYAKHTAQIEIVRLDRTMEQIVFPVPSICEFLTKESKLRIYYTTERDEQGSKINDFFLRSEDLFNEMNWQKKLRAQPVLYWCARNMSFWSSISFNLAVLMNLLVAFFYPFKGVRGGTLEPHWSGLLWTAMLISLAIVIALPKPHGIRALIASTILRLIFSVGLQPTLFLLGAFNVCNKIIFLMSFVGNCGTFTRGYRAMVLDVEFLYHLLYLVICAMGLFVHEFFYSLLLFDLVYREETLLNVIKSVTRNGRSIILTAVLALILVYLFSIVGYLFFKDDFILEVDRLPNETAVPETGESLASEFLFSDVCRVESGENCSSPAPREELVPAEETEQDKEHTCETLLMCIVTVLSHGLRSGGGVGDVLRKPSKEEPLFAARVIYDLLFFFMVIIIVLNLIFGVIIDTFADLRSEKQKKEEILKTTCFICGLERDKFDNKTVTFEEHIKEEHNMWHYLCFIVLVKVKDSTEYTGPESYVAEMIKERNLDWFPRMRAMSLVSSDSEGEQNELRNLQEKLESTMKLVTNLSGQLSELKDQMTEQRKQKQRIGLLGHPPHMNVNPQQPA

SEQ ID NO: 7394 - protein, 386 aa, Homo sapiens
MNEPTENRLGCSRTPEPDIRLRKGHQLDGTRRGDNDSHQGDLEPILEASVLSSHHKKSSEEHEYSDEAPQEDEGFMGMSPLLQAHHAMEKMEEFVCKVWEGRWRVIPHDVLPDWLKDNDFLLHGHRPPMPSFRACFKSIFRIHTETGNIWTHLLGCVFFLCLGIFYMFRPNISFVAPLQEKVVFGLFFLGAILCLSFSWLFHTVYCHSEGVSRLFSKLDYSGIALLIMGSFVPWLYYSFYCNPQPCFIYLIVICVLGIAAIIVSQWDMFATPQYRGVRAGVFLGLGLSGIIPTLHYVISEGFLKAATIGQIGWLMLMASLYITGAALYAARIPERFFPGKCDIWFHSHQLFHIFVVAGAFVHFHGVSNLQEFRFMIGGGCSEEDAL

SEQ ID NO: 7395 - protein, 901 aa, Homo sapiens
MDMFPLTWVFLALYFSRHQVRGQPDPPCGGRLNSKDAGYITSPGYPQDYPSHQNCEWIVYAPEPNQKIVLNFNPHFEIEKHDCKYDFIEIRDGDSESADLLGKHCGNIAPPTIISSGSMLYIKFTSDYARQGAGFSLRYEIFKTGSEDCSKNFTSPNGTIESPGFPEKYPHNLDCTFTILAKPKMEIILQFLIFDLEHDPLQVGEGDCKYDWLDIWDGIPHVGPLIGKYCGTKTPSELRSSTGILSLTFHTDMAVAKDGFSARYYLVHQEPLENFQCNVPLGMESGRIANEQISASSTYSDGRWTPQQSRLHGDDNGWTPNLDSNKEYLQVDLRFLTMLTAIATQGAISRETQNGYYVKSYKLEVSTNGEDWMVYRHGKNHKVFQANNDATEVVLNKLHAPLLTRFVRIRPQTWHSGIALRLELFGCRVTDAPCSNMLGMLSGLIADSQISASSTQEYLWSPSAARLVSSRSGWFPRIPQAQPGEEWLQVDLGTPKTVKGVIIQGARGGDSITAVEARAFVRKFKVSYSLNGKDWEYIQDPRTQQPKLFEGNMHYDTPDIRRFDPIPAQYVRVYPERWSPAGIGMRLEVLGCDWTDSKPTVETLGPTVKSEETTTPYPTEEEATECGENCSFEDDKDLQLPSGFNCNFDFLEEPCGWMYDHAKWLRTTWASSSSPNDRTFPDDRNFLRLQSDSQREGQYARLISPPVHLPRSPVCMEFQYQATGGRGVALQVVREASQESKLLWVIREDQGGEWKHGRIILPSYDMEYQIVFEGVIGKGRSGEIAIDDIRISTDVPLENCMEPISAFAGGTLLPGTEPTVDTVPMQPIPAYWYYVMAAGGAVLVLVSVALALVLHYHRFRYAAKKTDHSITYKTSHYTNGAPLAVEPTLTIKLEQDRGSHC

SEQ ID NO: 7396 - protein, 893 aa, Homo sapiens
MEPPLPVGAQPLATVEGMEMKGPLREPCALTLAQRNGQYELIIQLHEKEQHVQDIIPINSHFRCVQEAEETLLIDIASNSGCKIRVQGDWIRERRFEIPDEEHCLKFLSAVLAAQKAQSQLLVPEQKDSSSWYQKLDTKDKPSVFSGLLGFEDNFSSMNLDKKINSQNQPTGIHREPPPPPFSVNKMLPREKEASNKEQPKVTNTMRKLFVPNTQSGQREGLIKHILAKREKEYVNIQTFRFFVGTWNVNGQSPDSGLEPWLNCDPNPPDIYCIGFQELDLSTEAFFYFESVKEQEWSMAVERGLHSKAKYKKVQLVRLVGMMLLIFARKDQCRYIRDIATETVGTGIMGKMGNKGGVAVRFVFHNTTFCIVNSHLAAHVEDFERRNQDYKDICARMSFVVPNQTLPQLNIMKHEVVIWLGDLNYRLCMPDANEVKSLINKKDLQRLLKFDQLNIQRTQKKAFVDFNEGEIKFIPTYKYDSKTDRWDSSGKCRVPAWCDRILWRGTNVNQLNYRSHMELKTSDHKPVSALFHIGVKVVDERRYRKVFEDSVRIMDRMENDFLPSLELSRREFVFENVKFRQLQKEKFQISNNGQVPCHFSFIPKLNDSQYCKPWLRAEPFEGYLEPNETVDISLDVYVSKDSVTILNSGEDKIEDILVLHLDRGKDYFLTISGNYLPSCFGTSLEALCRMKRPIREVPVTKLIDLEKSLLQMVPLDEGASERPLQVPKEIWLLVDHLFKYACHQEDLFQTPGMQEELQQIIDCLDTSIPETIPGSNHSVAEALLIFLEALPEPVICYELYQRCLDSAYDPRICRQVISQLPRCHRNVFRYLMAFLRELLKFSEYNSVNANMIATLFTSLLLRPPPNLMARQTPSDRQRAIQFLLGFLLGSEED

SEQ ID NO: 7397 - protein, 1307 aa, Homo sapiens
MELEDGVVYQEEPGGSGAVMSERVSGLAGSIYREFERLIGRYDEEVVKELMPLVVAVLENLDSVFAQDQEHQVELELLRDDNEQLITQYEREKALRKHAEEKFIEFEDSQEQEKKDLQTRVESLESQTRQLELKAKNYADQISRLEEREAELKKEYNALHQRHTEMIHNYMEHLERTKLHQLSGSDQLESTAHSRIRKERPISLGIFPLPAGDGLLTPDAQKGGETPGSEQWKFQELSQPRSHTSLKDELSDVSQGGSKATTPASTANSDVATIPTDTPLKEENEGFVKVTDAPNKSEISKHIEVQVAQETRNVSTGSAENEEKSEVQAIIESTPELDMDKDLSGYKGSSTPTKGIENKAFDRNTESLFEELSSAGSGLIGDVDEGADLLGMGREVENLILENTQLLETKNALNIVKNDLIAKVDELTCEKDVLQGELEAVKQAKLKLEEKNRELEEELRKARAEAEDARQKAKDDDDSDIPTAQRKRFTRVEMARVLMERNQYKERLMELQEAVRWTEMIRASRENPAMQEKKRSSIWQFFSRLFSSSSNTTKKPEPPVNLKYNAPTSHVTPSVKKRSSTLSQLPGDKSKAFDFLSEETEASLASRREQKREQYRQVKAHVQKEDGRVQAFGWSLPQKYKQVTNGQGENKMKNLPVPVYLRPLDEKDTSMKLWCAVGVNLSGGKTRDGGSVVGASVFYKDVAGLDTEGSKQRSASQSSLDKLDQELKEQQKELKNQEELSSLVWICTSTHSATKVLIIDAVQPGNILDSFTVCNSHVLCIASVPGARETDYPAGEDLSESGQVDKASLCGSMTSNSSAETDSLLGGITVVGCSAEGVTGAATSPSTNGASPVMDKPPEMEAENSEVDENVPTAEEATEATEGNAGSAEDTVDISQTGVYTEHVFTDPLGVQIPEDLSPVYQSSNDSDAYKDQISVLPNEQDLVREEAQKMSSLLPTMWLGAQNGCLYVHSSVAQWRKCLHSIKLKDSILSIVHVKGIVLVALADGTLAIFHRGVDGQWDLSNYHLLDLGRPHHSIRCMTVVHDKVWCGYRNKIYVVQPKAMKIEKSFDAHPRKESQVRQLAWVGDGVWVSIRLDSTLRLYHAHTYQHLQDVDIEPYVSKMLGTGKLGFSFVRITALMVSCNRLWVGTGNGVIISIPLTETNKTSGVPGNRPGSVIRVYGDENSDKVTPGTFIPYCSMAHAQLCFHGHRDAVKFFVAVPGQVISPQSSSSGTDLTGDKAGPSAQEPGSQTPLKSMLVISGGEGYIDFRMGDEGGESELLGEDLPLEPSVTKAERSHLIVWQVMYGNE

SEQ ID NO: 7398 - protein, 810 aa, Homo sapiens
MPMDLILVVWFCVCTARTVVGFGMDPDLQMDIVTELDLVNTTLGVAQVSGMHNASKAFLFQDIEREIHAAPHVSEKLIQLFRNKSEFTILATVQQKPSTSGVILSIRELEHSYFELESSGLRDEIRYHYIHNGKPRTEALPYRMADGQWHKVALSVSASHLLLHVDCNRIYERVIDPPDTNLPPGINLWLGQRNQKHGLFKGIIQDGKIIFMPNGYITQCPNLNHTCPTCSDFLSLVQGIMDLQELLAKMTAKLNYAETRLSQLENCHCEKTCQVSGLLYRDQDSWVDGDHCRNCTCKSGAVECRRMSCPPLNCSPDSLPVHIAGQCCKVCRPKCIYGGKVLAEGQRILTKSCRECRGGVLVKITEMCPPLNCSEKDHILPENQCCRVCRGHNFCAEGPKCGENSECKNWNTKATCECKSGYISVQGDSAYCEDIDECAAKMHYCHANTVCVNLPGLYRCDCVPGYIRVDDFSCTEHDECGSGQHNCDENAICTNTVQGHSCTCKPGYVGNGTICRAFCEEGCRYGGTCVAPNKCVCPSGFTGSHCEKDIDECSEGIIECHNHSRCVNLPGWYHCECRSGFHDDGTYSLSGESCIDIDECALRTHTCWNDSACINLAGGFDCLCPSGPSCSGDCPHEGGLKHNGQVWTLKEDRCSVCSCKDGKIFCRRTACDCQNPSADLFCCPECDTRVTSQCLDQNGHKLYRSGDNWTHSCQQCRCLEGEVDCWPLTCPNLSCEYTAILEGECCPRCVSDPCLADNITYDIRKTCLDSYGVSRLSGSVWTMAGSPCTTCKCKNGRVCCSVDFECLQNN

SEQ ID NO: 7399 - protein, 507 aa, Homo sapiens
MPWLLSAPKLVPAVANVRGLSGCMLCSQRRYSLQPVPERRIPNRYLGQPSPFTHPHLLRPGEVTPGLSQVEYALRRHKLMSLIQKEAQGQSGTDQTVVVLSNPTYYMSNDIPYTFHQDNNFLYLCGFQEPDSILVLQSLPGKQLPSHKAILFVPRRDPSRELWDGPRSGTDGAIALTGVDEAYTLEEFQHLLPKMKAETNMVWYDWMRPSHAQLHSDYMQPLTEAKAKSKNKVRGVQQLIQRLRLIKSPAEIERMQIAGKLTSQAFIETMFTSKAPVEEAFLYAKFEFECRARGADILAYPPVVAGGNRSNTLHYVKNNQLIKDGEMVLLDGGCESSCYVSDITRTWPVNGRFTAPQAELYEAVLEIQRDCLALCFPGTSLENIYSMMLTLIGQKLKDLGIMKNIKENNAFKAARKYCPHHVGHYLGMDVHDTPDMPRSLPLQPGMVITIEPGIYIPEDDKDAPEKFRGLGVRIEDDVVVTQDSPLILSADCPKEMNDIEQICSQAS

SEQ ID NO: 7400 - protein, 436 aa, Homo sapiens
MLKVSAVLCVCAAAWCSQSLAAAAAVAAAGGRSDGGNFLDDKQWLTTISQYDKEVGQWNKFRDEVEDDYFRTWSPGKPFDQALDPAKDPCLKMKCSRHKVCIAQDSQTAVCISHRRLTHRMKEAGVDHRQWRGPILSTCKQCPVVYPSPVCGSDGHTYSFQCKLEYQACVLGKQISVKCEGHCPCPSDKPTSTSRNVKRACSDLEFREVANRLRDWFKALHESGSQNKKTKTLLRPERSRFDTSILPICKDSLGWMFNRLDTNYDLLLDQSELRSIYLDKNEQCTKAFFNSCDTYKDSLISNNEWCYCFQRQQDPPCQTELSNIQKRQGVKKLLGQYIPLCDEDGYYKPTQCHGSVGQCWCVDRYGNEVMGSRINGVADCAIDFEISGDFASGDFHEWTDDEDDEDDIMNDEDEIEDDDEDEGDDDDGGDDHDVYI

SEQ ID NO: 7401 - protein, 96 aa, Homo sapiens
MAEVEETLKRLQSQKGVQGIIVVNTEGIPIKSTMDNPTTTQYASLMHSFILKARSTVRDIDPQNDLTFLRIRSKKNEIMVAPDKDYFLIVIQNPTE

SEQ ID NO: 7402 - protein, 3997 aa, Homo sapiens
MLESYVTPILMSYVNRYIKNLKPSDLQLSLWGGDVVLSKLELKLDVLEQELKLPFTFLSGHIHELRIHVPWTKLGSEPVVITINTMECILKLKDGIQDDHESCGSNSTNRSTAESTKSSIKPRRMQQAAPTDPDLPPGYVQSLIRRVVNNVNIVINNLILKYVEDDIVLSVNITSAECYTVGELWDRAFMDISATDLVLRKVINFSDCTVCLDKRNASGKIEFYQDPLLYKCSFRTRLHFTYENLNSKMPSVIKIHTLVESLKLSITDQQLPMFIRIMQLGIALYYGEIGNFKEGEIEDLTCHNKDMLGNITGSEDETRIDMQYPAQHKGQELYSQQDEEQPQGWVSWAWSFVPAIVSYDDGEEDFVGNDPASTMHQQKAQTLKDPIVSIGFYCTKATVTFKLTEMQVESSYYSPQKVKSKEVLCWEQEGTTVEALMMGEPFFDCQIGFVGCRAMCLKGIMGVKDFEENMNRSETEACFFICGDNLSTKGFTYLTNSLFDYRSPENNGTRAEFILDSTHHKETYTEIAGMQRFGAFYMDYLYTMENTSGKGSTNQQDFSSGKSEDLGTVQEKSTKSLVIGPLDFRLDSSAVHRILKMIVCALEHEYEPYSRLKSDIKDENETILNPEEVALLEEYIPTRHTSVTLLKCTCTISMAEFNLLDHLLPVIMGEKNSSNFMNTTNFQSLRPLPSIRILVDKINLEHSVPMYAEQLVHVVSSLTQPSDNLLHYCYVHCYLKIFGFQAGLTSLDCSGSYCLPVPVIPSFSTALYGKLLKLPTCWTKRSQIAITEGIFELPNLTIQATRAQTLLLQAIYQSWSHLGNVSSSAVIEALINEIFLSIGVKSKNPLPTLEGSIQNVELKYCSTSLVKCASGTMGSIKICAKAPVDSGKEKLIPLLQGPSDTKDLHSTKWLNESRKPESLLAPDLMAFTIQVPQYIDYCHNSGAVLLCSIQGLAVNIDPILYTWLIYQPQKRTSRHMQQQPVVAVPLVMPVCRRKEDEVSIGSAPLAKQQSYQASEYASSPVKTKTVTESRPLSVPVKAMLNISESCRSPEERMKEFIGIVWNAVKHLTLQLEVQSCCVFIPNDSLPSPSTIVSGDIPGTVRSWYHGQTSMPGTLVLCLPQIKIISAGHKYMEPLQEIPFVIPRPILEEGDAFPWTISLHNFSIYTLLGKQVTLCLVEPMGCTSTLAVTSQKLLATGPDTRHSFVVCLHVDLESLEIKCSNPQVQLFYELTDIMNKVWNKIQKRGNLNLSPTSPETMAGPVPTSPVRSSIGTAPPDTSTCSPSADIGTTTEGDSIQAGEESPFSDSVTLEQTTSNIGGTSGRVSLWMQWVLPKITIKLFAPDPENKGTEVCMVSELEDLSASIDVQDVYTKVKCKIESFNIDHYRSRPGEGWQSGHFEGVFLQCKEKSVTTTKLLDGTHQQHGFLSLTYTKAVTKNVRHKLTSRNERRSFHKLSEGLMDGSPHFLHEILLSAQAFDIVLYFPLLNAIASIFQAKLPKTQKEKRKSPGQPMRTHTLTSRNLPLIYVNTSVIRIFIPKTEEMQPTVEANQAAKEDTVVLKIGSVAMAPQADNPLGRSVLRKDIYQRALNLGILRDPGSEIEDRQYQIDLQSINIGTAQWHQLKPEKESVSGGVVTETERNSQNPALEWNMASSIRRHQERRAILTPVLTDFSVRITGAPAVIFTKVVSPENLHTEEILVCGHSLEVNITTNLDFFLSVAQVQLLHQLIVANMTGLEPSNKAAEISKQEQKKVDIFDGGMAETSSRYSGAQDSGIGSDSVKIRIVQIEQHSGASQHRIARPSRQSSIVKNLNFIPFDIFITASRISLMTYSCMALSKSKSQEQKNNEKTDKSSLNLPEVDSDVAKPNQACISTVTAEDLLRSSISFPSGKKIGVLSLESLHASTRSSARQALGITIVRQPGRRGTGDLQLEPFLYFIVSQPSLLLSCHHRKQRVEVSIFDAVLKGVASDYKCIDPGKTLPEALDYCTVWLQTVPGEIDSKSGIPPSFITLQIKDFLNGPADVNLDISKPLKANLSFTKLDQINLFLKKIKNAHSLAHSEETSAMSNTMVNKDDLPVSKYYRGKLSKPKIHGDGVQKISAQENMWRAVSCFQKISVQTTQIVISMETVPHTSKPCLLASLSNLNGSLSVKATQKVPGIILGSSFLLSINDFLLKTSLKERSRILIGPCCATANLEAKWCKHSGNPGPEQSIPKISIDLRGGLLQVFWGQEHLNCLVLLHELLNGYLNEEGNFEVQVSEPVPQMSSPVEKNQTFKSEQSSDDLRTGLFQYVQDAESLKLPGVYEVLFYNETEDCPGMMLWRYPEPRVLTLVRITPVPFNTTEDPDISTADLGDVLQVPCSLEYWDELQKVFVAFREFNLSESKVCELQLPDINLVNDQKKLVSSDLWRIVLNSSQNGADDQSSASESGSQSTCDPLVTPTALAACTRVDSCFTPWFVPSLCVSFQFAHLEFHLCHHLDQLGTAAPQYLQPFVSDRNMPSELEYMIVSFREPHMYLRQWNNGSVCQEIQFLAQADCKLLECRNVTMQSVVKPFSIFGQMAVSSDVVEKLLDCTVIVDSVFVNLGQHVVHSLNTAIQAWQQNKCPEVEELVFSHFVICNDTQETLRFGQVDTDENILLASLHSHQYSWRSHKSPQLLHICIEGWGNWRWSEPFSVDHAGTFIRTIQYRGRTASLIIKVQQLNGVQKQIIICGRQIICSYLSQSIELKVVQHYIGQDGQAVVREHFDCLTAKQKLPSYILENNELTELCVKAKGDEDWSRDVCLESKAPEYSIVIQVPSSNSSIIYVWCTVLTLEPNSQVQQRMIVFSPLFIMRSHLPDPIIIHLEKRSLGLSETQIIPGKGQEKPLQNIEPDLVHHLTFQAREEYDPSDCAVPISTSLIKQIATKVHPGGTVNQILDEFYGPEKSLQPIWPYNKKDSDRNEQLSQWDSPMRVKLSIWKPYVRTLLIELLPWALLINESKWDLWLFEGEKIVLQVPAGKIIIPPNFQEAFQIGIYWANTNTVHKSVAIKLVHNLTSPKWKDGGNGEVVTLDEEAFVDTEIRLGAFPGHQKLCQFCISSMVQQGIQIIQIEDKTTIINNTPYQIFYKPQLSVCNPHSGKEYFRVPDSATFSICPGGEQPAMKSSSLPCWDLMPDISQSVLDASLLQKQIMLGFSPAPGADSSQCWSLPAIVRPEFPRQSVAVPLGNFRENGFCTRAIVLTYQEHLGVTYLTLSEDPSPRVIIHNRCPVKMLIKENIKDIPKFEVYCKKIPSECSIHHELYHQISSYPDCKTKDLLPSLLLRVEPLDEVTTEWSDAIDINSQGTQVVFLTGFGYVYVDVVHQCGTVFITVAPEGKAGPILTNTNRAPEKIVTFKMFITQLSLAVFDDLTHHKASAELLRLTLDNIFLCVAPGAGPLPGEEPVAALFELYCVEICCGDLQLDNQLYNKSNFHFAVLVCQGEKAEPIQCSKMQSLLISNKELEEYKEKCFIKLCITLNEGKSILCDINEFSFELKPARLYVEDTFVYYIKTLFDTYLPNSRLAGHSTHLSGGKQVLPMQVTQHARALVNPVKLRKLVIQPVNLLVSIHASLKLYIASDHTPLSFSVFERGPIFTTARQLVHALAMHYAAGALFRAGWVVGSLDILGSPASLVRSIGNGVADFFRLPYEGLTRGPGAFVSGVSRGTTSFVKHISKGTLTSITNLATSLARNMDRLSLDEEHYNRQEEWRRQLPESLGEGLRQGLSRLGISLLGAIAGIVDQPMQNFQKTSEAQASAGHKAKGVISGVGKGIMGVFTKPIGGAAELVSQTGYGILHGAGLSQLPKQRHQPSDLHADQAPNSHVKYVWKMLQSLGRPEVHMALDVVLVRGSGQEHEGCLLLTSEVLFVVSVSEDTQQQAFPVTEIDCAQDSKQNNLLTVQLKQPRVACDVEVDGVRERLSEQQYNRLVDYITKTSCHLAPSCSSMQIPCPVVAAEPPPSTVKTYHYLVDPHFAQVFLSKFTMVKNKALRKGFP

SEQ ID NO: 7403 - protein, 193 aa, Homo sapiens
MQSLMQAPLLIALGLLLAAPAQAHLKKPSQLSSFSWDNCDEGKDPAVIRSLTLEPDPIIVPGNVTLSVMGSTSVPLSSPLKVDLVLEKEVAGLWIKIPCTDYIGSCTFEHFCDVLDMLIPTGEPCPEPLRTYGLPCHCPFKEGTYSLPKSEFVVPDLELPSWLTTGNYRIESVLSSSGKRLGCIKIAASLKGI

SEQ ID NO: 7404 - protein, 364 aa, Homo sapiens
MSVMVVRKKVTRKWEKLPGRNTFCCDGRVMMARQKGIFYLTLFLILGTCTLFFAFECRYLAVQLSPAIPVFAAMLFLFSMATLLRTSFSDPGVIPRALPDEAAFIEMEIEATNGAVPQGQRPPPRIKNFQINNQIVKLKYCYTCKIFRPPRASHCSICDNCVERFDHHCPWVGNCVGKRNYRYFYLFILSLSLLTIYVFAFNIVYVALKSLKIGFLETLKETPGTVLEVLICFFTLWSVVGLTGFHTFLVALNQTTNEDIKGSWTGKNRVQNPYSHGNIVKNCCEVLCGPLPPSVLDRRGILPLEESGSRPPSTQETSSSLLPQSPAPTEHLNSNEMPEDSSTPEEMPPPEPPEPPQEAAEAEK

SEQ ID NO: 7405 - protein, 416 aa, Homo sapiens
MSGHRSTRKRCGDSHPESPVGFGHMSTTGCVLNKLFQLPTPPLSRHQLKRLEEHRYQSAGRSLLEPLMQGYWEWLVRRVPSWIAPNLITIIGLSINICTTILLVFYCPTATEQAPLWAYIACACGLFIYQSLDAIDGKQARRTNSSSPLGELFDHGCDSLSTVFVVLGTCIAVQLGTNPDWMFFCCFAGTFMFYCAHWQTYVSGTLRFGIIDVTEVQIFIIIMHLLAVIGGPPFWQSMIPVLNIQMKIFPALCTVAGTIFSCTNYFRVIFTGGVGKNGSTIAGTSVLSPFLHIGSVITLAAMIYKKSAVQLFEKHPCLYILTFGFVSAKITNKLVVAHMTKSEMHLHDTAFIGPALLFLDQYFNSFIDEYIVLWIALVFSFFDLIRYCVSVCNQIASHLHIHVFRIKVSTAHSNHH

SEQ ID NO: 7406 - protein, 1325 aa, Homo sapiens
MKEPLDGECGKAVVPQQELLDKIKEEPDNAQEYGCVQQPKTQESKLKIGGVSSVNERPIAQQLNPGFQLSFASSGPSVLLPSVPAVAIKVFCSGCKKMLYKGQTAYHKTGSTQLFCSTRCITRHSSPACLPPPPKKTCTNCSKDILNPKDVITTRFENSYPSKDFCSQSCLSSYELKKKPVVTIYTKSISTKCSMCQKNADTRFEVKYQNVVHGLCSDACFSKFHSTNNLTMNCCENCGSYCYSSSGPCQSQKVFSSTSVTAYKQNSAQIPPYALGKSLRPSAEMIETTNDSGKTELFCSINCLSAYRVKTVTSSGVQVSCHSCKTSAIPQYHLAMSNGTIYSFCSSSCVVAFQNVFSKPKGTNSSAVPLSQGQVVVSPPSSRSAVSIGGGNTSAVSPSSIRGSAAASLQPLAEQSQQVALTHTVVKLKCQHCNHLFATKPELLFYKGKMFLFCGKNCSDEYKKKNKVVAMCDYCKLQKIIKETVRFSGVDKPFCSEVCKFLSARDFGERWGNYCKMCSYCSQTSPNLVENRLEGKLEEFCCEDCMSKFTVLFYQMAKCDGCKRQGKLSESIKWRGNIKHFCNLFCVLEFCHQQIMNDCLPQNKVNISKAKTAVTELPSARTDTTPVITSVMSLAKIPATLSTGNTNSVLKGAVTKEAAKIIQDESTQEDAMKFPSSQSSQPSRLLKNKGISCKPVTQTKATSCKPHTQHKECQTDLPMPNEKNDAELDSPPSKKKRLGFFQTYDTEYLKVGFIICPGSKESSPRPQCVICGEILSSENMKPANLSHHLKTKHSELENKPVDFFEQKSLEMECQNSSLKKCLLVEKSLVKASYLIAFQTAASKKPFSIAEELIKPYLVEMCSEVLGSSAGDKMKTIPLSNVTIQHRIDELSADIEDQLIQKVRESKWFALQIDESSEISNITLLLCYIRFIDYDCRDVKEELLFCIEMPTQITGFEIFELINKYIDSKSLNWKHCVGLCTDGAASMTGRYSGLKAKIQEVAMNTAAFTHCFIHRERLVAEKLSPCLHKILLQSAQILSFIKSNALNSRMLTILCEEMGSEHVSLPLHAEVRWISRGRMLKRLFELRHEIEIFLSQKHSDLAKYFHDEEWVGKLAYLSDIFSLINELNLSLQGTLTTFFNLCNKIDVFKRKLKMWLKRTQENDYDMFPSFSEFSNSSGLNMTDITRIIFEHLEGLSQVFSDCFPPEQDLRSGNLWIIHPFMNHQNNNLTDFEEEKLTELSSDLGLQALFKSVSVTQFWINAKTSYPELHERAMKFLLPFSTVYLCDAAFSALTESKQKNLLGSGPALRLAVTSLIPRIEKLVKEKE

SEQ ID NO: 7407 - protein, 162 aa, Homo sapiens
MNSRTASARGWFSSRPPTSESDLEPATDGPASETTTLSPEATTFNDTRIPDAAGGTAGVGTMLLSFGIITVIGLAVALVLYIRKKKRLEKLRHQLMPMYNFDPTEEQDELEQELLEHGRDAASVQAATSVQAMQGKTTLPSQGPLQRPSRLVFTDVANAIHA

SEQ ID NO: 7408 - protein, 608 aa, Homo sapiens
MARARAGALLALWVLGAAAHPQCLDFRPPFRPTQPLRLCAQYSDFGCCDEGRDAELTRRFWALASRVDAAEWAACAGYARDLLCQECSPYAAHLYDAEDPFTPLRTVPGLCQDYCLDMWHKCRGLFRHLSTDQELWALEGNLARFCRYLSLDDTDYCFPYLLVNKNLNSNLGHVVADAKGCLQLCLEEVANGLRNPVAMVHARDGTHRFFVAEQVGLVWAYLPDRSRLGKPFLNISRVVLTSPWEGDERGFLGIAFHPSFQHNRRLYVYYSVGIRSSEWIRISEFRVSEDDENAVDHSSERIILEVKEPASNHNGGQLLFGDDGYLYIFTGDGGMAGDPFGTFGNAQNKSALLGKVLRIDVDRKERGLPYGIPPDNPFVGDPAAQPEVYALGVRNMWRCSFDRGDPSSGTGRGRLFCGDVGQNKFEEVDVVERGGNYGWRAREGFECYDRSLCANTSLNDLLPIFAYPHTVGKSVTGGYVYRGCEYPNLNGLYIFGDFMSGRLMSLQENPGTGQWQYSEICMGHGQTCEFPGLINNYYPYIISFGEDEAGELYFMSTGEPSATAPRGVVYKIIDASSCKARSAMPGYVPAPSVCSSLTSQPFILQWWK

SEQ ID NO: 7409 - protein, 496 aa, Homo sapiens [sequence omitted]

SEQ ID NO: 7410 - protein, 79 aa, Homo sapiens
MSEFWHKLGCCVVEKPQPKKKRRRIDRTMIGEPMNFVHLTHIGSGEMGAGDGLAMTGAVQEQMRSKGNRDRPWSNSRGL

SEQ ID NO: 7411 - protein, 1120 aa, Homo sapiens
MWLKPEEVLLKNALKLWLMERSNDYFVLQRRRGYGEEGGGGLTGLLVGTLDSVLDSTAKVAPFRILHQTPDSQVYLSIACGANREEITKHWDWLEQNIMKTLSVFDSNEDITNFVQGKIRGLIAEEGKHCFAKEDDPEKFREALLKFEKCFGLPEKEKLVTYYSCSYWKGRVPCQGWLYLSTNFLSFYSFLLGSEIKLIISWDEVSKLEKTSNVILTESIHVCSQGENHYFSMFLHINQTYLLMEQLANYAIRRLFDKETFDNDPVLYNPLQITKRGLENRAHSEQFNAFFRLPKGESLKEVHECFLWVPFSHFNTHGKMCISENYICFASQDGNQCSVIIPLREVLAIDKTNDSSKSVIISIKGKTAFRFHEVKDFEQLVAKLRLRCGAASTQYHDISTELAISSESTEPSDNFEVQSLTSQRECSKTVNTEALMTVFHPQNLETLNSKMLKEKMKEQSWKILFAECGRGVSMFRTKKTRDLVVRGIPETLRGELWMLFSGAVNDMATNPDYYTEVVEQSLGTCNLATEEIERDLRRSLPEHPAFQSDTGISALRRVLTAYAYRNPKIGYCQAMNILTSVLLLYAKEEEAFWLLVAVCERMLPDYFNRRIIGALVDQAVFEELIRDHLPQLTEHMTDMTFFSSVSLSWFLTLFISVLPIESAVNVVDCFFYDGIKAILQLGLAILDYNLDKLLTCKDDAEAVTALNRFFDNVTNKDSPLPSNVQQGSNVSDEKTSHTRVDITDLIRESNEKYGNIRYEDIHSMRCRNRLYVIQTLEETTKQNVLRVVSQDVKLSLQELDELYVIFKKELFLSCYWCLGCPVLKHHDPSLPYLEQYQIDCQQFRALYHLLSPWAHSANKDSLALWTFRLLDENSDCLINFKEFSSAIDIMYNGSFTEKLKLLFKLHIPPAYTEVKSKDASKGDELSKEELLYFSQLHVSKPANEKEAESAKHSPEKGKGKIDIQAYLSQWQDELFKKEENIKDLPRMNQSQFIQFSKTLYNLFHEDPEEESLYQAIAVVTSLLLRMEEVGRKLHSPTSSAKGFSGTVCGSGGPSEEKTGSHLEKDPCSFREEPQWSFAFEQILASLLNEPALVRFFEKPIDVKAKLENARISQLRSRTKM

SEQ ID NO: 7412 - protein, 1572 aa, Homo sapiens
MSTPTDPGAMPHPGPSPGPGPSPGPILGPSPGPGPSPGSVHSMMGPSPGPPSVSHPMPTMGSTDFPQEGMHQMHKPIDGIHDKGIVEDIHCGSMKGTGMRPPHPGMGPPQSPMDQHSQGYMSPHPSPLGAPEHVSSPMSGGGPTPPQMPPSQPGALIPGDPQAMSQPNRGPSPFSPVQLHQLRAQILAYKMLARGQPLPETLQLAVQGKRTLPGLQQQQQQQQQQQQQQQQQQQQQQQPQQQPPQPQTQQQQQPALVNYNRPSGPGPELSGPSTPQKLPVPAPGGRPSPAPPAAAQPPAAAVPGPSVPQPAPGQPSPVLQLQQKQSRISPIQKPQGLDPVEILQEREYRLQARIAHRIQELENLPGSLPPDLRTKATVELKALRLLNFQRQLRQEVVACMRRDTTLETALNSKAYKRSKRQTLREARMTEKLEKQQKIEQERKRRQKHQEYLNSILQHAKDFKEYHRSVAGKIQKLSKAVATWHANTEREQKKETERIEKERMRRLMAEDEEGYRKLIDQKKDRRLAYLLQQTDEYVANLTNLVWEHKQAQAAKEKKKRRRRKKKAEENAEGGESALGPDGEPIDESSQMSDLPVKVTHTETGKVLFGPEAPKASQLDAWLEMNPGYEVAPRSDSEESDSDYEEEDEEEESSRQETEEKILLDPNSEEVSEKDAKQIIETAKQDVDDEYSMQYSARGSQSYYTVAHAISERVEKQSALLINGTLKHYQLQGLEWMVSLYNNNLNGILADEMGLGKTIQTIALITYLMEHKRLNGPYLIIVPLSTLSNWTYEFDKWAPSVVKISYKGTPAMRRSLVPQLRSGKFNVLLTTYEYIIKDKHILAKIRWKYMIVDEGHRMKNHHCKLTQVLNTHYVAPRRILLTGTPLQNKLPELWALLNFLLPTIFKSCSTFEQWFNAPFAMTGERVDLNEEETILIIRRLHKVLRPFLLRRLKKEVESQLPEKVEYVIKCDMSALQKILYRHMQAKGILLTDGSEKDKKGKGGAKTLMNTIMQLRKICNHPYMFQHIEESFAEHLGYSNGVINGAELYRASGKFELLDRILPKLRATNHRVLLFCQMTSLMTIMEDYFAFRNFLYLRLDGTTKSEDRAALLKKFNEPGSQYFIFLLSTRAGGLGLNLQAADTVVIFDSDWNPHQDLQAQDRAHRIGQQNEVRVLRLCTVNSVEEKILAAAKYKLNVDQKVIQAGMFDQKSSSHERRAFLQAILEHEEENEEEDEVPDDETLNQMIARREEEFDLFMRMDMDRRREDARNPKRKPRLMEEDELPSWIIKDDAEVERLTCEEEEEKIFGRGSRQRRDVDYSDALTEKQWLRAIEDGNLEEMEEEVRLKKRKRRRNVDKDPAKEDVEKAKKRRGRPPAEKLSPNPPKLTKQMNAIIDTVINYKDSSGRQLSEVFIQLPSRKELPEYYELIRKPVDFKKIKERIRNHKYRSLGDLEKDVMLLCHNAQTFNLEGSQIYEDSIVLQSVFKSARQKIAKEEESEDESNEEEEEEDEEESESEAKSVKVKIKLNKKDDKGRDKGKGKKRPNRGKAKPVVSDFDSDEEQDEREQSEGSGTDDE

SEQ ID NO: 7413 - protein, 921 aa, Homo sapiens
MKTCWKIPVFFFVCSFLEPWASAAVKRRPRFPVNSNSNGGNELCPKIRIGQDDLPGFDLISQFQVDKAASRRAIQRVVGSATLQVAYKLGNNVDFRIPTRNLYPSGLPEEYSFLTTFRMTGSTLKKNWNIWQIQDSSGKEQVGIKINGQTQSVVFSYKGLDGSLQTAAFSNLSSLFDSQWHKIMIGVERSSATLFVDCNRIESLPIKPRGPIDIDGFAVLGKLADNPQVSVPFELQWMLIHCDPLRPRRETCHELPARITPSQTTDERGPPGEQGPPGPPGPPGVPGIDGIDGDRGPKGPPGPPGPAGEPGKPGAPGKPGTPGADGLTGPDGSPGSIGSKGQKGEPGVPGSRGFPGRGIPGPPGPPGTAGLPGELGRVGPVGDPGRRGPPGPPGPPGPRGTIGFHDGDPLCPNACPPGRSGYPGLPGMRGHKGAKGEIGEPGRQGHKGEEGDQGELGEVGAQGPPGAQGLRGITGIVGDKGEKGARGLDGEPGPQGLPGAPGDQGQRGPPGEAGPKGDRGAEGARGIPGLPGPKGDTGLPGVDGRDGIPGMPGTKGEPGKPGPPGDAGLQGLPGVPGIPGAKGVAGEKGSTGAPGKPGQMGNSGKPGQQGPPGEVGPRGPQGLPGSRGELGPVGSPGLPGKLGSLGSPGLPGLPGPPGLPGMKGDRGVVGEPGPKGEQGASGEEGEAGERGELGDIGLPGPKGSAGNPGEPGLRGPEGSRGLPGVEGPRGPPGPRGVQGEQGATGLPGVQGPPGRAPTDQHIKQVCMRVIQEHFAEMAASLKRPDSGATGLPGRPGPPGPPGPPGENGFPGQMGIRGLPGIKGPPGALGLRGPKGDLGEKGERGPPGRGPNGLPGAIGLPGDPGPASYGRNGRDGERGPPGVAGIPGVPGPPGPPGLPGFCEPASCTMQAGQRAFNKGPDP

SEQ ID NO: 7414 - protein, 457 aa, Homo sapiens
MTTDEGAKNNEESPTATVAEQGEDITSKKDRGVLKIVKRVGNGEETPMIGDKVYVHYKGKLSNGKKFDSSHDRNEPFVFSLGKGQVIKAWDIGVATMKKGEICHLLCKPEYAYGSAGSLPKIPSNATLFFEIELLDFKGEDLFEDGGIIRRTKRKGEGYSNPNEGATVEIHLEGRCGGRMFDCRDVAFTVGEGEDHDIPIGIDKALEKMQREEQCILYLGPRYGFGEAGKPKFGIEPNAELIYEVTLKSFEKAKESWEMDTKEKLEQAAIVKEKGTVYFKGGKYMQAVIQYGKIVSWLEMEYGLSEKESKASESFLLAAFLNLAMCYLKLREYTKAVECCDKALGLDSANEKGLYRRGEAQLLMNEFESAKGDFEKVLEVNPQNKAARLQISMCQKKAKEHNERDRRIYANMFKKFAEQDAKEEANKAMGKKTSEGVTNEKGTDSQAMEEEKPEGHV

SEQ ID NO: 7415 - protein, 161 aa, Homo sapiens
MDPNPRAALERQQLRLRERQKFFEDILQPETEFVFPLSHLHLESQRPPIGSISSMEVNVDTLEQVELIDLGDPDAADVFLPCEDPPPTPQSSGMDNHLEELSLPVPTSDRTTSRTSSSSSSDSSTNLHSPNPSDDGADTPLAQSDEEEERGDGGAEPGACS

SEQ ID NO: 7416 - protein, 954 aa, Homo sapiens
MSLPLTEEQRKKIEENRQKALARRAEKLLAEQHQRTSSGTSIAGNPFQAKQGPSQNFPRESCKPVSHGVIFKQQNLSSSSNADQRPHDSHSFQAKGIWKKPEEMPTACPGHSPRSQMALTGISPPLAQSPPEVPKQQLLSYELGQGHAQASPEIRFTPFANPTHKPLAKPKSSQETPAHSSGQPPRDAKLEAKTAKASPSGQNISYIHSSSESVTPRTEGRLQQKSGSSVQKGVNSQKGKCVRNGDRFQVLIGYNAELIAVFKTLPSKNYDPDTKTWNFSMNDYSALMKAAQSLPTVNLQPLEWAYGSSESPSTSSEGQAGLPSAPSLSFVKGRCMLISRAYFEADISYSQDLIALFKQMDSRRYDVKTRKWSFLLEEHSKLIAKVRCLPQVQLDPLPTTLTLAFASQLKKTSLSLTPDVPEADLSEVDPKLVSNLMPFQRAGVNFAIAKGGRLLLADDMGLGKTIQAICIAAFYRKEWPLLVVVPSSVRFTWEQAFLRWLPSLSPDCINVVVTGKDRLTAGLINIVSFDLLSKLEKQLKTPFKVVIIDESHFLKNSRTARCRAAMPVLKVAKRVILLSGTPAMSRPAELYTQIIAVKPTFFPQFHAFGLRYCDAKRMPWGWDYSGSSNLGELKLLLEEAVMLRRLKSDVLSQLPAKQRKIVVIAPGRINARTRAALDAAAKEMTTKDKTKQQQKDALILFFNRTAEAKIPSVIEYILDLLESGREKFLVFAHHKVVLDAITQELERKHVQHIRIDGSTSSAEREDLCQQFQLSERHAVAVLSITAANMGLTFSSADLVVFAELFWNPGVLIQAEDRVHRIGQTSSVGIHYLVAKGTADDYLWPLIQEKIKVLAEAGLSETNFSEMTESTDYLYKDPKQQKIYDLFQKSFEKEGSDMELLEAAESFDPGSASGTSGSSSQNMGDTLDESSLTASPQKKRRFEFFDNWDSFTSPL

SEQ ID NO: 7417 - protein, 119 aa, Homo sapiens
MTAPGAAGRCPPTTWLGSLLLLVCLLASRSITEEVSEYCSHMIGSGHLQSLQRLIDSQMETSCQITFEFVDQEQLKDPVCYLKKAFLLVQDIMEDTMRFRDNTPNAIAIVQLQELSLRL

SEQ ID NO: 7418 - protein, 1205 aa, Homo sapiens
MDAKARNCLLQHREALEKDIKTSYIMDHMISDGFLTISEEEKVRNEPTQQQRAAMLIKMILKKDNDSYVSFYNALLHEGYKDLAALLHDGIPVVSSSSGKDSVSGITSYVRTVLCEGGVPQRPVVFVTRKKLVNAIQQKLSKLKGEPGWVTIHGMAGCGKSVLAAEAVRDHSLLEGCFPGGVHWVSVGKQDKSGLLMKLQNLCTRLDQDESFSQRLPLNIEEAKDRLRILMLRKHPRSLLILDDVWDSWVLKAFDSQCQILLTTRDKSVTDSVMGPKYVVPVESSLGKEKGLEILSLFVNMKKADLPEQAHSIIKECKGSPLVVSLIGALLRDFPNRWEYYLKQLQNKQFKRIRKSSSYDYEALDEAMSISVEMLREDIKDYYTDLSILQKDVKVPTKVLCILWDMETEEVEDILQEFVNKSLLFCDRNGKSFRYYLHDLQVDFLTEKNCSQLQDLHKKIITQFQRYHQPHTLSPDQEDCMYWYNFLAYHMASAKMHKELCALMFSLDWIKAKTELVGPAHLIHEFVEYRHILDEKDCAVSENFQEFLSLNGHLLGRQPFPNIVQLGLCEPETSEVYQQAKLQAKQEVDNGMLYLEWINKKNITNLSRLVVRPHTDAVYHACFSEDGQRIASCGADKTLQVFKAETGEKLLEIKAHEDEVLCCAFSTDDRFIATCSVDKKVKIWNSMTGELVHTYDEHSEQVNCCHFTNSSHHLLLATGSSDCFLKLWDLNQKECRNTMFGHTNSVNHCRFSPDDKLLASCSADGTLKLWDATSANERKSINVKQFFLNLEDPQEDMEVIVKCCSWSADGARIMVAAKNKIFLWNTDSRSKVADCRGHLSWVHGVMFSPDGSSFLTSSDDQTIRLWETKKVCKNSAVMLKQEVDVVFQENEVMVLAVDHIRRLQLINGRTGQIDYLTEAQVSCCCLSPHLQYIAFGDENGAIEILELVNNRIFQSRFQHKKTVWHIQFTADEKTLISSSDDAEIQVWNWQLDKCIFLRGHQETVKDFRLLKNSRLLSWSFDGTVKVWNIITGNKEKDFVCHQGTVLSCDISHDATKFSSTSADKTAKIWSFDLLLPLHELRGHNGCVRCSAFSVDSTLLATGDDNGEIRIWNVSNGELLHLCAPLSEEGAATHGGWVTDLCFSPDGKMLISAGGYIKWWNVVTGESSQTFYTNGTNLKKIHVSPDFKTYVTVDNLGILYILQTLE

SEQ ID NO: 7419 - protein, 1204 aa, Homo sapiens
MAAAAAVGNAVPCGARPCGVRPDGQPKPGPQPRALLAAGPALIANGDELVAAVWPYRRLALLRRLTVLPFAGLLYPAWLGAAAAGCWGWGSSWVQIPEAALLVLATICLAHALTVLSGHWSVHAHCALTCTPEYDPSKATFVKVVPTPNNGSTELVALHRNEGEDGLEVLSFEFQKIKYSYDALEKKQFLPVAFPVGNAFSYYQSNRGFQEDSEIRAAEKKFGSNKAEMVVPDFSELFKERATAPFFVFQVFCVGLWCLDEYWYYSVFTLSMLVAFEASLVQQQMRNMSEIRKMGNKPHMIQVYRSRKWRPIASDEIVPGDIVSIGRSPQENLVPCDVLLLRGRCIVDEAMLTGESVPQMKEPIEDLSPDRVLDLQADSRLHVIFGGTKVVQHIPPQKATTGLKPVDSGCVAYVLRTGFNTSQGKLLRTILFGVKRVTANNLETFIFILFLLVFAIAAAAYVWIEGTKDPSRNRYKLFLECTLILTSVVPPELPIELSLAVNTSLIALAKLYMYCTEPFRIPFAGKVEVCCFDKTGTLTSDSLVVRGVAGLRDGKEVTPVSSIPVETHRALASCHSLMQLDDGTLVGDPLEKAMLTAVDWTLTKDEKVFPRSIKTQGLKIHQRFHFASALKRMSVLASYEKLGSTDLCYIAAVKGAPETLHSMFSQCPPDYHHIHTEISREGARVLALGYKELGHLTHQQAREVKREALECSLKFVGFIVVSCPLKADSKAVIREIQNASHRVVMITGDNPLTACHVAQELHFIEKAHTLILQPPSEKGRQCEWRSIDGSIVLPLARGSPKALALEYALCLTGDGLAHLQATDPQQLLRLIPHVQVFARVAPKQKEFVITSLKELGYVTLMCGDGTNDVGALKHADVGVALLANAPERVVERRRRPRDSPTLSNSGIRATSRTAKQRSGLPPSEEQPTSQRDRLSQVLRDLEDESTPIVKLGDASIAAPFTSKLSSIQCICHVIKQGRCTLVTTLQMFKILALNALILAYSQSVLYLEGVKFSDFQATLQGLLLAGCFLFISRSKPLKTLSRERPLPNIFNLYTILTVMLQFFVHFLSLVYLYREAQARSPEKQEQFVDLYKEFEPSLVNSTVYIMAMAMQMATFAINYKGPPFMESLPENKPLVWSLAVSLLAIIGLLLGSSPDFNSQFGLVDIPVEFKLVIAQVLLLDFCLALLADRVLQFFLGTPKLKVPS

SEQ ID NO: 7420 - protein, 240 aa, Homo sapiens
MSRSNRQKEYKCGDLVFAKMKGYPHWPARIDEMPEAAVKSTANKYQVFFFGTHETAFLGPKDLFPYEESKEKFGKPNKRKGFSEGLWEIENNPTVKASGYQSSQKKSCVEEPEPEPEAAEGDGDKKGNAEGSSDEEGKLVIDEPAKEKNEKGALKRRAGDLLEDSPKRPKEAENPEGEEKEAATLEVERPLPMEVEKNSTPSEPGSGRGPPQEEEEEEDEEEEATKEDAEAPGIRDHESL

SEQ ID NO: 7421 - protein, 116 aa, Homo sapiens
MAPPSVPLVLLLVLLLSLAETPASAPAHRGRGGWTLNSAGYLLGPVLHLPQMGDQDGKRETALEILDLWKAIDGLPYSHPPQPSKRNVMETFAKPEIGDLGMLSMKIPKEEDVLKS

SEQ ID NO: 7422 - protein, 348 aa, Homo sapiens
MAAGVAGWGVEAEEFEDAPDVEPLEPTLSNIIEQRSLKWIFVGGKGGVGKTTCSCSLAVQLSKGRESVLIISTDPAHNISDAFDQKFSKVPTKVKGYDNLFAMEIDPSLGVAELPDEFFEEDNMLSMGKKMMQEAMSAFPGIDEAMSYAEVMRLVKGMNFSVVVFDTAPTGHTLRLLNFPTIVERGLGRLMQIKNQISPFISQMCNMLGLGDMNADQLASKLEETLPVIRSVSEQFKDPEQTTFICVCIAEFLSLYETERLIQELAKCKIDTHNIIVNQLVFPDPEKPCKMCEARHKIQAKYLDQMEDLYEDFHIVKLPLLPHEVRGADKVNTFSALLLEPYKPPSAQ

SEQ ID NO: 7423 - protein, 383 aa, Homo sapiens
MPSGCRCLHLVCLLCILGAPGQPVRADDCSSHCDLAHGCCAPDGSCRCDPGWEGLHCERCVRMPGCQHGTCHQPWQCICHSGWAGKFCDKDEHICTTQSPCQNGGQCMYDGGGEYHCVCLPGFHGRDCERKAGPCEQAGSPCRNGGQCQDDQGFALNFTCRCLVGFVGARCEVNVDDCLMRPCANGATCLDGINRFSCLCPEGFAGRFCTINLDDCASRPCQRGARCRDRVHDFDCLCPSGYGGKTCELVLPVPDPPTTVDTPLGPTSAVVVPATGPAPHSAGAGLLRISVKEVVRRQEAGLGEPSLVALVVFGALTAALVLATVLLTLRAWRRGVCPPGPCCYPAPHYAPACQDQECQVSMLPAGLPLPRDLPPEPGKTTAL

SEQ ID NO: 7424 - protein, 314 aa, Homo sapiens
MLGIWTLLPLVLTSVARLSSKSVNAQVTDINSKGLELRKTVTTVETQNLEGLHHDGQFCHKPCPPGERKARDCTVNGDEPDCVPCQEGKEYTDKAHFSSKCRRCRLCDEGHGLEVEINCTRTQNTKCRCKPNFFCNSTVCEHCDPCTKCEHGIIKECTLTSNTKCKEEVKRKEVQKTCRKHRKENQGSHESPTLNPETVAINLSDVDLSKYITTIAGVMTLSQVKGFVRKNGVNEAKIDEIKNDNVQDTAEQKVQLLRNWHQLHGKKEAYDTLIKDLKKANLCTLAEKIQTIILKDITSDSENSNFRNEIQSLV

SEQ ID NO: 7425 - protein, 306 aa, Homo sapiens
MGCDGGTIPKRHELVKGPKKVEKVDKDAELVAQWNYCTLSQEILRRPIVACELGRLYNKDAVIEFLLDKSAEKALGKAASHIKSIKNVTELKLSDNPAWEGDKGNTKGDKHDDLQRARFICPVVGLEMNGRHRFCFLRCCGCVFSERALKEIKAEVCHTCGAAFQEDDVIMLNGTKEDVDVLKTRMEERRLRAKLEKKTKKPKAAESVSKPDVSEEAPGPSKVKTGKPEEASLDSREKKTNLAPKSTAMNESSSGKAGKPPCGATKRSIADSEESEAYKSLFTTHSSAKRSKEESAHWVTHTSYCF

SEQ ID NO: 7426 - protein, 786 aa, Homo sapiens
MGGRVFLAFCVWLTLPGAETQDSRGCARWCPQNSSCVNATACRCNPGFSSFSEIITTPTETCDDINECATPSKVSCGKFSDCWNTEGSYDCVCSPGYEPVSGAKTFKNESENTCQDVDECQQNPRLCKSYGTCVNTLGSYTCQCLPGFKFIPEDPKVCTDVDECSSGQHQCDSSTVCFNTVGSYSCRCRPGWKPRHGIPNNQKDTVCEDMTFSTWTPPPGVHSQTLSRFFDKVQDLGRDSKTSSAEVTIQNVIKLVDELMEAPGDVEALAPPVRHLIATQLLSNLEDIMRILAKSLPKGPFTYISPSNTELTLMIQERGDKNVTMGQSSARMKLNWAVAAGAEDPGPAVAGILSIQNMTTLLANASLNLHSKKQAELEEIYESSIRGVQLRRLSAVNSIFLSHNNTKELNSPILFAFSHLESSDGEAGRDPPAKDVMPGPRQELLCAFWKSDSDRGGHWATEGCQVLGSKNGSTTCQCSHLSSFAILMAHYDVEDWKLTLITRVGLALSLFCLLLCILTFLLVRPIQGSRTTIHLHLCICLFVGSTIFLAGIENEGGQVGLRCRLVAGLLHYCFLAAFCWMSLEGLELYFLVVRVFQGQGLSTRWLCLIGYGVPLLIVGVSAAIYSKGYGRPRYCWLDFEQGFLWSFLGPVTFIILCNAVIFVTTVWKLTQKFSEINPDMKKLKKARALTITAIAQLFLLGCTWVFGLFIFDDRSLVLTYVFTILNCLQGAFLYLLHCLLNKKVREEYRKWACLVAGGSKYSEFTSTTSGTGHNQTRALRASESGI

SEQ ID NO: 7427 - protein, 165 aa, Homo sapiens; identical to SEQ ID NO: 4074

SEQ ID NO: 7428 - protein, 312 aa, Homo sapiens
MSAFSEAALEKKLSELSNSQQSVQTLSLWLIHHRKHSRPIVTVWERELRKAKPNRKLTFLYLANDVIQNSKRKGPEFTKDFAPVIVEAFKHVSSETDESCKKHLGRVLSIWEERSVYENDVLEQLKQALYGDKKPRKRTYEQIKVDENENCSSLGSPSEPPQTLDLVRALQDLENAASGDAAVHQRIASLPVEVQEVSLLDKITDKESGERLSKMVEDACMLLADYNGRLAAEIDDRKQLTRMLADFLRCQKEALAEKEHKLEEYKRKLARVSLVRKELRSRIQSLPDLSRLPNVTGSHMHLPFAGDIYSED

SEQ ID NO: 7429 - protein, 893 aa, Homo sapiens
MATEEFIIRIPPYHYIHVLDQNSNVSRVEVGPKTYIRQDNERVLFAPMRMVTVPPRHYCTVANPVSRDAQGLVLFDVTGQVRLRHADLEIRLAQDPFPLYPGEVLEKDITPLQVVLPNTALHLKALLDFEDKDGDKVVAGDEWLFEGPGTYIPRKEVEVVEIIQATIIRQNQALRLRARKECWDRDGKERVTGEEWLVTTVGAYLPAVFEEVLDLVDAVILTEKTALHLRARRNFRDFRGVSRRTGEEWLVTVQDTEAHVPDVHEEVLGVVPITTLGPHNYCVILDPVGPDGKNQLGQKRVVKGEKSFFLQPGEQLEQGIQDVYVLSEQQGLLLRALQPLEEGEDEEKVSHQAGDHWLIRGPLEYVPSAKVEVVEERQAIPLDENEGIYVQDVKTGKVRAVIGSTYMLTQDEVLWEKELPPGVEELLNKGQDPLADRGEKDTAKSLQPLAPRNKTRVVSYRVPHNAAVQVYDYREKRARVVFGPELVSLGPEEQFTVLSLSAGRPKRPHARRALCLLLGPDFFTDVITIETADHARLQLQLAYNWHFEVNDRKDPQETAKLFSVPDFVGDACKAIASRVRGAVASVTFDDFHKNSARIIRTAVFGFETSEAKGPDGMALPRPRDQAVFPQNGLVVSSVDVQSVEPVDQRTRDALQRSVQLAIEITTNSQEAAAKHEAQRLEQEARGRLERQKILDQSEAEKARKELLELEALSMAVESTGTAKAEAESRAEAARIEGEGSVLQAKLKAQALAIETEAELQRVQKVRELELVYARAQLELEVSKAQQLAEVEVKKFKQMTEAIGPSTIRDLAVAGPEMQVKLLQSLGLKSTLITDGSTPINLFNTAFGLLGMGPEGQPLGRRVASGPSPGEGISPQSAQAPQAPGDNHVVPVLR

SEQ ID NO: 7430 - protein, 153 aa, Homo sapiens
MVATKTFALLLLSLFLAVGLGEKKEGHFSALPSLPVGSHAKVSSPQPRGPRYAEGTFISDYSIAMDKIHQQDFVNWLLAQKGKKNDWKHNITQREARALELASQANRKEEEAVEPQSSPAKNPSDEDLLRDLLIQELLACLLDQTNLCRLRSR

SEQ ID NO: 7431 - protein, 942 aa, Homo sapiens
MTGSNSHITILTLKVLPHFESLGKQEKIPNKMSAFRNHCPHLDSVGEITKEDLIQKSLGTCQDCKVQGPNLWACLENRCSYVGCGESQVDHSTIHSQETKHYLTVNLTTLRVWCYACSKEVFLDRKLGTQPSLPHVRQPHQIQENSVQDFKIPSNTTLKTPLVAVFDDLDIEADEEDELRARGLTGLKNIGNTCYMNAALQALSNCPPLTQFFLDCGGLARTDKKPAICKSYLKLMTELWHKSRPGSVVPTTLFQGIKTVNPTFRGYSQQDAQEFLRCLMDLLHEELKEQVMEVEEDPQTITTEETMEEDKSQSDVDFQSCESCSNSDRAENENGSRCFSEDNNETTMLIQDDENNSEMSKDWQKEKMCNKINKVNSEGEFDKDRDSISETVDLNNQETVKVQIHSRASEYITDVHSNDLSTPQILPSNEGVNPRLSASPPKSGNLWPGLAPPHKKAQSASPKRKKQHKKYRSVISDIFDGTIISSVQCLTCDRVSVTLETFQDLSLPIPGKEDLAKLHSSSHPTSIVKAGSCGEAYAPQGWIAFFMEYVKRFVVSCVPSWFWGPVVTLQDCLAAFFARDELKGDNMYSCEKCKKLRNGVKFCKVQNFPEILCIHLKRFRHELMFSTKISTHVSFPLEGLDLQPFLAKDSPAQIVTYDLLSVICHHGTASSGHYIAYCRNNLNNLWYEFDDQSVTEVSESTVQNAEAYVLFYRKSSEEAQKERRRISNLLNIMEPSLLQFYISRQWLNKFKTFAEPGPISNNDFLCIHGGVPPRKAGYIEDLVLMLPQNIWDNLYSRYGGGPAVNHLYICHTCQIEAEKIEKRRKTELEIFIRLNRAFQKEDSPATFYCISMQWFREWESFVKGKDGDPPGPIDNTKIAVTKCGNVMLRQGADSGQISEETWNFLQSIYGGGPEVILRPPVVHVDPDILQAEEKIEVETRSL

SEQ ID NO: 7432 - protein, 194 aa, Homo sapiens
MAKQKRKVPEVTEKKNKKLKKASAEGPLLGPEAAPSGEGAGSKGEAVLRPGLDAEPELSPEEQRVLERKLKKERKKEERQRLREAGLVAQHPPARRSGAELALDYLCRWAQKHKNWRFQKTRQTWLLLHMYDSDKVPDEHFSTLLAYLEGLQGRARELTVQKAEALMRELDEEGSDPPLPGRAQRIRQVLQLLS

SEQ ID NO: 7433 - protein, 720 aa, Homo sapiens
MNNHVSSKPSTMKLKHTINPILLYFIHFLISLYTILTYIPFYFFSESRQEKSNRIKAKPVNSKPDSAYRSVNSLDGLASVLYPGCDTLDKVFTYAKNKFKNKRLLGTREVLNEEDEVQPNGKIFKKVILGQYNWLSYEDVFVRAFNFGNGLQMLGQKPKTNIAIFCETRAEWMIAAQACFMYNFQLVTLYATLGGPAIVHALNETEVTNIITSKELLQTKLKDIVSLVPRLRHIITVDGKPPTWSEFPKGIIVHTMAAVEALGAKASMENQPHSKPLPSDIAVIMYTSGSTGLPKGVMISHSNIIAGITGMAERIPELGEEDVYIGYLPLAHVLELSAELVCLSHGCRIGYSSPQTLADQSSKIKKGSKGDTSMLKPTLMAAVPEIMDRIYKNVMNKVSEMSSFQRNLFILAYNYKMEQISKGRNTPLCDSFVFRKVRSLLGGNIRLLLCGGAPLSATTQRFMNICFCCPVGQGYGLTESAGAGTISEVWDYNTGRVGAPLVCCEIKLKNWEEGGYFNTDKPHPRGEILIGGQSVTMGYYKNEAKTKADFFEDENGQRWLCTGDIGEFEPDGCLKIIDRKKDLVKLQAGEYVSLGKVEAALKNLPLVDNICAYANSYHSYVIGFVVPNQKELTELARKKGLKGTWEELCNSCEMENEVLKVLSEAAISASLEKFEIPVKIRLSPEPWTPETGLVTDAFKLKRKELKTHYQADIERMYGRK

SEQ ID NO: 7434 - protein, 1003 aa, Homo sapiens
MPSKFSCRQLREAGQCFESFLVVRGLDMETDRERLRTIYNRDFKISFGTPAPGFSSMLYGMKIANLAYVTKTRVRFFRLDRWADVRFPEKRRMKLGSDISKHHKSLLAKIFYDRAEYLHGKHGVDVEVQGPHEARDGQLLIRLDLNRKEVLTLRLRNGGTQSVTLTHLFPLCRTPQFAFYNEDQELPCPLGPGECYELHVHCKTSFVGYFPATVLWELLGPGESGSEGAGTFYIARFLAAVAHSPLAAQLKPMTPFKRTRITGNPVVTNRIEEGERPDRAKGYDLELSMALGTYYPPPRLRQLLPMLLQGTSIFTAPKEIAEIKAQLETALKWRNYEVKLRLLLHLEELQMEHDIRHYDLESVPMTWDPVDQNPRLLTLEVPGVTESRPSVLRGDHLFALLSSETHQEDPITYKGFVHKVELDRVKLSFSMSLLSRFVDGLTFKVNFTFNRQPLRVQHRALELTGRWLLWPMLFPVAPRDVPLLPSDVKLKLYDRSLESNPEQLQAMRHIVTGTTRPAPYIIFGPPGTGKTVTLVEAIKQVVKHLPKAHILACAPSNSGADLLCQRLRVHLPSSIYRLLAPSRDIRMVPEDIKPCCNWDAKKGEYVFPAKKKLQEYRVLITTLITAGRLVSAQFPIDHFTHIFIDEAGHCMEPESLVAIAGLMEVKETGDPGGQLVLAGDPRQLGPVLRSPLTQKHGLGYSLLERLLTYNSLYKKGPDGYDPQFITKLLRNYRSHPTILDIPNQLYYEGELQACADVVDRERFCRWAGLPRQGFPIIFHGVMGKDEREGNSPSFFNPEEAATVTSYLKLLLAPSSKKGKARLSPRSVGVISPYRKQVEKIRYCITKLDRELRGLDDIKDLKVGSVEEFQGQERSVILISTVRSSQSFVQLDLDFNLGFLKNPKRFNVAVTRAKALLIIVGNPLLLGHDPDWKVFLEFCKENGGYTGCPFPAKLDLQQGQNLLQGLSKLSPSTSGPHSHDYLPQEREGEGGLSLQVEPEWRNEL

SEQ ID NO: 7435 - protein, 550 aa, Homo sapiens
MVRGWEPPPGLDCAISEGHKSEGTMPPNKEASGLSSSPAGLICLPPISEELQLVWTQAAQTSELDSNEHLLKTFSYFPYPSLADIALLCLRYGLQMEKVKTWFMAQRLRCGISWSSEEIEETRARVVYRRDQLHFKSLLSFTHHAGRPPEEVPPPPVPAPEQVGIGIGPPTLSKPTQTKGLKVEPEEPSQMPPLPQSHQKLKESLMTPGSGAFPYQSDFWQHLQSSGLSKEQAGRGPNQSHGIGTASWNHSTTVPQPQARDKPPPIALIASSCKEESASSVTPSSSSTSSSFQVLANGATAASKPLQPLGCVPQSVSPSEQALPPHLEPAWPQGLRHNSVPGRVGPTEYLSPDMQRQRKTKRKTKEQLAILKSFFLQCQWARREDYQKLEQITGLPRPEIIQWFGDTRYALKHGQLKWFRDNAVPGAPSFQDPAIPTPPPSTRSLNERAETPPLPIPPPPPDIQPLERYWAAHQQLRETDIPQLSQASRLSTQQVLDWFDSRLPQPAEVVVCLDEEEEEEEEELPEDDEEEEEEEEEDDDDDDDDVIIQD

SEQ ID NO: 7436 - protein, 342 aa, Homo sapiens
MAVSVTPIRDTKWLTLEVCREFQRGTCSRPDTECKFAHPSKSCQVENGRVIACFDSLKGRCSRENCKYLHPPPHLKTQLEINGRNNLIQQKNMAMLAQQMQLANAMMPGAPLQPVPMFSVAPSLATNASAAAFNPYLGPVSPSLVPAEILPTAPMLVTGNPGVPVPAAAAAAAQKLMRTDRLEVCREYQRGNCNRGENDCRFAHPADSTMIDTNDNTVTVCMDYIKGRCSREKCKYFHPPAHLQAKIKAAQYQVNQAAAAQAAATAAAMGIPQAVLPPLPKRPALEKTNGATAVFNTGIFQYQQALANMQLQQHTAFLPPGSILCMTPATSVDTHNICRTSD

SEQ ID NO: 7437 - protein, 797 aa, Homo sapiens
MDELAGGGGGGPGMAAPPRQQQGPGGNLGLSPGGNGAAGGGGPPASEGAGPAAGPELSRPQQYTIPGILHYIQHEWARFEMERAHWEVERAELQARIAFLQGERKGQENLKKDLVRRIKMLEYALKQERAKYHKLKYGTELNQGDLKMPTFESEETKDTEAPTAPQNSQLTWKQGRQLLRQYLQEVGYTDTILDVRSQRVRSLLGLSNSEPNGSVETKNLEQILNGGESPKQKGQEIKRSSGDVLETFNFLENADDSDEDEENDMIEGIPEGKDKHRMNKHKIGNEGLAADLTDDPDTEEALKEFDFLVTAEDGEGAGEARSSGDGTEWDKDDLSPTAEVWDVDQGLISKLKEQYKKERKGKKGVKRANRTKLYDMIADLGDDELPHIPSGIINQSRSASTRMTDHEGARAEEAEPITFPSGGGKSFIMGSDDVLLSVLGLGDLADLTVTNDADYSYDLPANKDAFRKTWNPKYTLRSHFDGVRALAFHPVEPVLVTASEDHTLKLWNLQKTVPAKKSASLDVEPIYTFRAHIGPVLSLAISSNGEQCFSGGIDATIQWWNMPSPSVDPYDTYEPNVLAGTLVGHTDAVWGLAYSGIKNQLLSCSADGTVRLWNPQEKLPCICTYNGDKKHGIPTSVDFIGCDPAHMVTSFNTGSAVIYDLETSQSLVILSSQVDSGLQSNNHINRVVSHPTLPVTITAHEDRHIKFFDNKTGKMIHSMVAHLDAVTSLAVDPNGIYLMSGSHDCSIRLWNLDSKTCVQEITAHRKKLDESIYDVAFHSSKAYIASAGADALAKVFV

SEQ ID NO: 7438 - protein, 742 aa, Homo sapiens
MLSLKKYLTEGLLQFTILLSLIGVRVDVDTYLTSQLPPLREIILGPSSAYTQTQFHNLRNTLDGYGIHPKSIDLDNYFTARRLLSQVRALDRFQVPTTEVNAWLVHRDPEGSVSGSQPNSGLALESSSGLQDVTGPDNGVRESETEQGFGEDLEDLGAVAPPVSGDLTKEDIDLIDILWRQDIDLGAGREVFDYSHRQKEQDVEKELRDGGEQDTWAGEGAEALARNLLVDGETGESFPAQFPADISSITEAVPSESEPPALQNNLLSPLLTGTESPFDLEQQWQDLMSIMEMQAMEVNTSASEILYSAPPGDPLSTNYSLAPNTPINQNVSLHQASLGGCSQDFLLFSPEVESLPVASSSTLLPLAPSNSTSLNSTFGSTNLTGLFFPPQLNGTANDTAGPELPDPLGGLLDEAMLDEISLMDLAIEEGFNPVQASQLEEEFDSDSGLSLDSSHSPSSLSSSEGSSSSSSSSSSSSSSASSSASSSFSEEGAVGYSSDSETLDLEEAEGAVGYQPEYSKFCRMSYQDPAQLSCLPYLEHVGHNHTYNMAPSALDSADLPPPSALKKGSKEKQADFLDKQMSRDEHRARAMKIPFTNDKIINLPVEEFNELLSKYQLSEAQLSLIRDIRRRGKNKMAAQNCRKRKLDTILNLERDVEDLQRDKARLLREKVEFLRSLRQMKQKVQSLYQEVFGRLRDENGRPYSPSQYALQYAGDGSVLLIPRTMADQQARRQERKPKDRRK

SEQ ID NO: 7439 - protein, 226 aa, Homo sapiens
MSRIYHDGALRNKAVQSVRLPGAWDPAAHQGGNGVLLEGELIDVSRHSILDTHGRKERYYVLYIRPSHIHRRKFDAKGNEIEPNFSATRKVNTGFLMSSYKVEAKGDTDRLTPEALKGLVNKPELLALTESLTPDHTVAFWMPESEMEVMELELGAGVRLKTRGDGPFLDSLAKLEAGTVTKCNFTGDGKTGASWTDNIMAQKCSKGAAAEIREQGDGAEDEEWDD

SEQ ID NO: 7440 - protein, 594 aa, Homo sapiens
MAAPVKGNRKQSTEGDALDPPASPKPAGKQNGIQNPISLEDSPEAGGEREEEQEREEEQAFLVSLYKFMKERHTPIERVPHLGFKQINLWKIYKAVEKLGAYELVTGRRLWKNVYDELGGSPGSTSAATCTRRHYERLVLPYVRHLKGEDDKPLPTSKPRKQYKMAKENRGDDGATERPKKAKEERRMDQMMPGKTKADAADPAPLPSQEPPRNSTEQQGLASGSSVSFVGASGCPEAYKRLLSSFYCKGTHGIMSPLAKKKLLAQVSKVEALQCQEEGCRHGAEPQASPAVHLPESPQSPKGLTENSRHRLTPQEGLQAPGGSLREEAQAGPCPAAPIFKGCFYTHPTEVLKPVSQHPRDFFSRLKDGVLLGPPGKEGLSVKEPQLVWGGDANRPSAFHKGGSRKGILYPKPKACWVSPMAKVPAESPTLPPTFPSSPGLGSKRSLEEEGAAHSGKRLRAVSPFLKEADAKKCGAKPAGSGLVSCLLGPALGPVPPEAYRGTMLHCPLNFTGTPGPLKGQAALPFSPLVIPAFPAHFLATAGPSPMAAGLMHFPPTSFDSALRHRLCPASSAWHAPPVTTYAAPHFFHLNTKL

SEQ ID NO: 7441 - protein, 325 aa, Homo sapiens
MSMSPTVIILACLGFFLDQSVWAHVGGQDKPFCSAWPSAVVPQGGHVTLRCHYRRGFNIFTLYKKDGVPVPELYNRIFWNSFLISPVTPAHAGTYRCRGFHPHSPTEWSAPSNPLVIMVTGLYEKPSLTARPGPTVRAGENVTLSCSSQSSFDIYHLSREGEAHELRLPAVPSINGTFQADFPLGPATHGETYRCFGSFHGSPYEWSDPSDPLPVSVTDAAVMNQEPAGHRTVNREDSDEQDPQEVTYAQLDHCIFTQRKITGPSQRSKRPSTDTSVCIELPNAEPRALSPAHEHHSQALMGSSRETTALSQTQLASSNVPAAGI

SEQ ID NO: 7442 - protein, 776 aa, Homo sapiens
MNNSLENTISFEEYIRVKARSVPQHRMKEFLDSLASKGPEALQEFQQTATTTMVYQQGGNCIYTDSTEVAGSLLELACPVTTSVQPQTQQEQQIQVQQPQQVQVQVQVQQSPQQVSAQLSPQLTVHQPTEQPIQVQVQIQGQAPQSAAPSIQTPSLQSPSPSQLQAAQIQVQHVQAAQQIQAAEIPEEHIPHQQIQAQLVAGQSLAGGQQIQIQTVGALSPPPSQQGSPREGERRVGTASVLQPVKKRKVDMPITVSYAISGQPVATVLAIPQGQQQSYVSLRPDLLTVDSAHLYSATGTITSPTGETWTIPVYSAQPRGDPQQQSITHIAIPQEAYNAVHVSGSPTALAAVKLEDDKEKMVGTTSVVKNSHEEVVQTLANSLFPAQFMNGNIHIPVAVQAVAGTYQNTAQTVHIWDPQQQPQQQTPQEQTPPPQQQQQQLQVTCSAQTVQVAEVEPQSQPQPSPELLLPNSLKPEEGLEVWKNWAQTKNAELEKDAQNRLAPIGRRQLLRFQEDLISSAVAELNYGLCLMTREARNGEGEPYDPDVLYYIFLCIQKYLFENGRVDDIFSDLYYVRFTEWLHEVLKDVQPRVTPLGYVLPSHVTEEMLWECKQLGAHSPSTLLTTLMFFNTKYFLLKTVDQHMKLAFSKVLRQTKKNPSNPKDKSTSIRYLKALGIHQTGQKVTDDMYAEQTENPENPLRCPIKLYDFYLFKCPQSVKGRNDTFYLTPEPVVAPNSPIWYSVQPISREQMGQMLTRILVIREIQEAIAVANASTMH

SEQ ID NO: 7443 - protein, 163 aa, Homo sapiens
MVRFKHRYLLCELVSDDPRCRLSLDDRVLSSLVRDTIARVHGTFGAAACSIGFAVRYLNAYTGIVLLRCRKEFYQLVWSALPFITYLENKGHRYPCFFNTLHVGGTIRTCQKFLIQYNRRQLLILLQNCTDEGEREAIQKSVTRSCLLEEEEESGEEAAEAME

SEQ ID NO: 7444 - protein, 737 aa, Homo sapiens
MALCSALMTIFTIKMGTAKQAIDQGRSPVIIDNTNIQAWEMKPYVEVAIGKGYRVEFHEPETWWKFDPEELEKRNKHGVSRKKIAQMLDRYEYQMSISIVMNSVEPSHKSTQRPPPPQGRQRERVLKKTGHRLSKTKQKRNRKRNKKQNSQNRIMEENSLEFLSDLTPGDQDPSQSEEEDIEKTRRESEYPFIDGLQNEVGDFVTGYKEKRWKNKDPKDSFQNVMSIVELDNTPKNYLSKEGDNLFVSLLLRPNEISVTCPILTQNLSCVTTDDCSGMKVEKHIRNRHTIALDTQDLSAETSCLFMKKREIVDKNLSHEPILCHQHGIRMSDKVLREEQVYTTKINHWAFFTTNLSDEDLQLGSDRQPYFGSWPAGPHKFICEQRPKKDRACKLAGPDSRGQWIQMIFTSVAASEPGNNPEILTDKLLIGNEDFSPPPETMDSFIETNLFRSCLPQPDIPKNALESTKNKKRRKKRIFNLVPNFDLLGQSRIGVKEREKCDLLTKNHGLKITLGEEKDRISERNSEEENKQKLMTFDHHPLWFYLDIIKATPLNIDGQRYSHCLSFNRLRCSASLYKNYIPSFVLHNLSSIWKPSFTNKKLFLTFESQTRVGNKLNDAGFISPEILHSHPDTSCSLGVTSDFHFLNERFDRKLKRWEEPKELPAEDSQDLTSTDYRSLELPLSQGFAFQLVKLFGSPGVPMESLLPDDYVVPLDWKTLKMIYLQWKMSVEKRQKKIG

SEQ ID NO: 7445 - protein, 357 aa, Homo sapiens
MTSELDIFVGNTTLIDEDVYRLWLDGYSVTDAVALRVRSGILEQTGATAAVLQSDTMDHYRTFHMLERLLHAPPKLLHQLIFQIPPSRQALLIERYYAFDEAFVREVLGKKLSKGTKKDLDDISTKTGITLKSCRRQFDNFKRVFKVVEEMRGSLVDNIQQHFLLSDRLARDYAAIVFFANNRFETGKKKLQYLSFGDFAFCAELMIQNWTLGAVDSQMDDMDMDLDKEFLQDLKELKVLVADKDLLDLHKSLVCTALRGKLGVFSEMEANFKNLSRGLVNVAAKLTHNKDVRDLFVDLVEKFVEPCRSDHWPLSDVRFFLNQYSASVHSLDGFRHQALWDRYMGTLRGCLLRLYHD

SEQ ID NO: 7446 - protein, 433 aa, Homo sapiens
MLKVSAVLCVCAAAWCSQSLAAAAAVAAAGGRSDGGNFLDDKQWLTTISQYDKEVGQWNKFRDDDYFRTWSPGKPFDQALDPAKDPCLKMKCSRHKVCIAQDSQTAVCISHRRLTHRMKEAGVDHRQWRGPILSTCKQCPVVYPSPVCGSDGHTYSFQCKLEYQACVLGKQISVKCEGHCPCPSDKPTSTSRNVKRACSDLEFREVANRLRDWFKALHESGSQNKKTKTLLRPERSRFDTSILPICKDSLGWMFNRLDTNYDLLLDQSELRSIYLDKNEQCTKAFFNSCDTYKDSLISNNEWCYCFQRQQDPPCQTELSNIQKRQGVKKLLGQYIPLCDEDGYYKPTQCHGSVGQCWCVDRYGNEVMGSRINGVADCAIDFEISGDFASGDFHEWTDDEDDEDDIMNDEDEIEDDDEDEGDDDDGGDDHDVYI

SEQ ID NO: 7447 - protein, 319 aa, Homo sapiens
MLFWVLGLLILCGFLWTRKGKLKIEDITDKYIFITGCDSGFGNLAARTFDKKGFHVIAACLTESGSTALKAETSERLRTVLLDVTDPENVKRTAQWVKNQVGEKGLWGLINNAGVPGVLAPTDWLTLEDYREPIEVNLFGLISVTLNMLPLVKKAQGRVINVSSVGGRLAIVGGGYTPSKYAVEGFNDSLRRDMKAFGVHVSCIEPGLFKTNLADPVKVIEKKLAIWEQLSPDIKQQYGEGYIEKSLDKLKGNKSYVNMDLSPVVECMDHALTSLFPKTHYAAGKDAKIFWIPLSHMPAALQDFLLLKQKAELANPKAV

SEQ ID NO: 7448 - protein, 707 aa, Homo sapiens
MVSWGRFICLVVVTMATLSLARPSFSLVEDTTLEPEDAISSGDDEDDTDGAEDFVSENSNNKRAPYWTNTEKMEKRLHAVPAANTVKFRCPAGGNPMPTMRWLKNGKEFKQEHRIGGYKVRNQHWSLIMESVVPSDKGNYTCVVENEYGSINHTYHLDVVERSPHRPILQAGLPANASTVVGGDVEFVCKVYSDAQPHIQWIKHVEKNGSKYGPDGLPYLKVLKAAGVNTTDKEIEVLYIRNVTFEDAGEYTCLAGNSIGISFHSAWLTVLPAPGREKEITASPDYLEIAIYCIGVFLIACMVVTVILCRMKNTTKKPDFSSQPAVHKLTKRIPLRRQVTVSAESSSSMNSNTPLVRITTRLSSTADTPMLAGVSEYELPEDPKWEFPRDKLTLGKPLGEGCFGQVVMAEAVGIDKDKPKEAVTVAVKMLKDDATEKDLSDLVSEMEMMKMIGKHKNIINLLGACTQDGPLYVIVEYASKGNLREYLRARRPPGMEYSYDINRVPEEQMTFKDLVSCTYQLARGMEYLASQKCIHRDLAARNVLVTENNVMKIADFGLARDINNIDYYKKTTNGRLPVKWMAPEALFDRVYTHQSDVWSFGVLMWEIFTLGGSPYPGIPVEELFKLLKEGHRMDKPANCTNELYMMMRDCWHAVPSQRPTFKQLVEDLDRILTLTTNEEEKKVSGAVDCHKPPCNPSHLPCVLAVDQ

SEQ ID NO: 7449 - protein, 621 aa, Homo sapiens
MAELTVEVRGSNGAFYKGFIKDVHEDSLTVVFENNWQPERQVPFNEVRLPPPPDIKKEISEGDEVEVYSRANDQEPCGWWLAKVRMMKGEFYVIEYAACDATYNEIVTFERLRPVNQNKTVKKNTFFKCTVDVPEDLREACANENAHKDFKKAVGACRIFYHPETTQLMILSASEATVKRVNILSDMHLRSIRTKLMLMSRNEEATKHLECTKQLAAAFHEEFVVREDLMGLAIGTHGSNIQQARKVPGVTAIELDEDTGTFRIYGESADAVKKARGFLEFVEDFIQVPRNLVGKVIGKNGKVIQEIVDKSGVVRVRIEGDNENKLPREDGMVPFVFVGTKESIGNVQVLLEYHIAYLKEVEQLRMERLQIDEQLRQIGSRSYSGRGRGRRGPNYTSGYGTNSELSNPSETESERKDELSDWSLAGEDDRDSRHQRDSRRRPGGRGRSVSGGRGRGGPRGGKSSISSVLKDPDSNPYSLLDNTESDQTADTDASESHHSTNRRRRSRRRRTDEDAVLMDGMTESDTASVNENGLVTVADYISRAESQSRQRNLPRETLAKNKKEMAKDVIEEHGPSEKAINGPTSASGDDISKLQRTPGEEKINTLKEENTQEAAVLNGVS

SEQ ID NO: 7450 - protein, 486 aa, Homo sapiens
MLGKDYMLAIILVNCDDDLWGDHSLEVEAGLPPGWRKIHDAAGTYYWHVPSGSTQWQRPTWELGDAEDPGTGTEGIWGLRPPKGRSFSSLESSLDRSNSLSWYGGESYIQSMEPGAKCFAVRSLGWVEVPEEDLAPGKSSIAVNNCIQQLAQTRSRSQPPDGAWGEGQNMLMILKKDAMSLVNPLDHSLIHCQPLVHIRVWGVGSSKGRDRDFAFVASDKDSCMLKCHVFCCDVPAKAIASALHGLCAQILSERVEVSGDASCCSPDPISPEDLPRQVELLDAVSQAAQKYEALYMGTLPVTKAMGMDVLNEAIGTLTARGDRNAWVPTMLSVSDSLMTAHPIQAEASTEEEPLWQCPVRLVTFIGVGRDPHTFGLIADLGRQSFQCAAFWCQPHAGGLSEAVQAACMVQYQKCLVASAARGKAWGAQARARLRLKRTSSMDSPGGPLPLPLLKGGVGGAGATPRKRGVFSFLDAFRLKPSLLHMP

SEQ ID NO: 7451 - protein, 1457 aa, Homo sapiens
MAGNSLVLPIVLWGRKAPTHCISAVLLTDDGATIVTGCHDGQICLWDLSVELQINPRALLFGHTASITCLSKACASSDKQYIVSASESGEMCLWDVSDGRCIEFTKLACTHTGIQFYQFSVGNQREGRLLCHGHYPEILVVDATSLEVLYSLVSKISPDWISSMSIIRSHRTQEDTVVALSVTGILKVWIVTSEISDMQDTEPIFEEESKPIYCQNCQSISFCAFTQRSLLVVCSKYWRVFDAGDYSLLCSGPSENGQTWTGGDFVSSDKVIIWTENGQSYIYKLPASCLPASDSFRSDVGKAVENLIPPVQHILLDRKDKELLICPPVTRFFYGCREYFHKLLIQGDSSGRLNIWNISDTADKQGSEEGLAMTTSISLQEAFDKLNPCPAGIIDQLSVIPNSNEPLKVTASVYIPAHGRLVCGREDGSIVIVPATQTAIVQLLQGEHMLRRGWPPHRTLRGHRNKVTCLLYPHQVSARYDQRYLISGGVDFSVIIWDIFSGEMKHIFCVHGGEITQLLVPPENCSARVQHCICSVASDHSVGLLSLREKKCIMLASRHLFPIQVIKWRPSDDYLVVGCSDGSVYVWQMDTGALDRCVMGITAVEILNACDEAVPAAVDSLSHPAVNLKQAMTRRSLAALKNMAHHKLQTLATNLLASEASDKGNLPKYSHNSLMVQAIKTNLTDPDIHVLFFDVEALIIQLLTEEASRPNTALISPENLQKASGSSDKGGSFLTGKRAAVLFQQVKETIKENIKEHLLDDEEEDEEIMRQRREESDPEYRSSKSKPLTLLEYNLTMDTAKLFMSCLHAWGLNEVLDEVCLDRLGMLKPHCTVSFGLLSRGGHMSLMLPGYNQPACKLSHGKTEVGRKLPASEGVGKGTYGVSRAVTTQHLLSIISLANTLMSMTNATFIGDHMKKGPTRPPRPSTPDLSKARGSPPTSSNIVQGQIKQGWSQLAAMHCVMLPDLLGLDKFRPPLLEMLARRWQDRCLEVREAAQALLLAELRRIEQAGRKEAIDAWAPYLPQYIDHVISPGVTSEAAQTITTAPDASGPEAKVQEEEHDLVDDDITTGCLSSVPQMKKISTSYEERRKQATAIVLLGVIGAEFGAEIEPPKLLTRPRSSSQIPEGFGLTSGGSNYSLARHTCKALTFLLLQPPSPKLPPHSTIRRTAIDLIGRGFTVWEPYMDVSAVLMGLLELCADAEKQLANITMGLPLSPAADSARSARHALSLIATARPPAFITTIAKEVHRHTALAANTQSQQNMHTTTLARAKGEILRVIEILIEKMPTDVVDLLVEVMDIIMYCLEGSLVKKKGLQECFPAICRFYMVSYYERNHRIAVGARHGSVALYDIRTGKCQTIHGHKGPITAVAFAPDGRYLATYSNTDSHISFWQMNTSLLGSIGMLNSAPQLRCIKTYQVPPVQPASPGSHNALKLARLIWTSNRNVILMAHDGKEHRFMV

SEQ ID NO: 7452 - protein, 253 aa, Homo sapiens
MEAEGLDWLLVPLHQLVSWGAAAAMVFGGVVPYVPQYRDIRRTQNADGFSTYVCLVLLVANILRILFWFGRRFESPLLWQSAIMILTMLLMLKLCTEVRVANELNARRRSFTDFDPHHFWQWSSFSDYVQCVLAFTGVAGYITYLSIDSALFVETLGFLAVLTEAMLGVPQLYRNHRHQSTEGMSIKMVLMWTSGDAFKTAYFLLKGAPLQFSVCGLLQVLVDLAILGQAYAFARHPQKPAPHAVHPTGTKAL

SEQ ID NO: 7453 - protein, 1288 aa, Homo sapiens
MAGPCPRSGAERAGSCWQDPLAVALSRGRQLAAPPGRGCARSRPLSVVYVLTREPQPGLEPREGTEAEPLPLRCLREACAQVPRPRPPPQLRSLPFGTLELGDTAALDAFYNADVVVLEVSSSLVQPSLFYHLGVRESFSMTNNVLLCSQADLPDLQALREDVFQKNSDCVGSYTLIPYVVTATGRVLCGDAGLLRGLADGLVQAGVGTEALLTPLVGRLARLLEATPTDSCGYFRETIRRDIRQARERFSGPQLRQELARLQRRLDSVELLSPDIIMNLLLSYRDVQDYSAIIELVETLQALPTCDVAEQHNVCFHYTFALNRRNRPGDRAKALSVLLPLVQLEGSVAPDLYCMCGRIYKDMFFSSGFQDAGHREQAYHWYRKAFDVEPSLHSGINAAVLLIAAGQHFEDSKELRLIGMKLGCLLARKGCVEKMQYYWDVGFYLGAQILANDPTQVVLAAEQLYKLNAPIWYLVSVMETFLLYQHFRPTPEPPGGPPRRAHFWLHFLLQSCQPFKTACAQGDQCLVLVLEMNKVLLPAKLEVRGTDPVSTVTLSLLEPETQDIPSSWTFPVASICGVSASKRDERCCFLYALPPAQDVQLCFPSVGHCQWFCGLIQAWVTNPDSTAPAEEAEGAGEMLEFDYEYTETGERLVLGKGTYGVVYAGRDRHTRVRIAIKEIPERDSRFSQPLHEEIALHRRLRHKNIVRYLGSASQGGYLKIFMEEVPGGSLSSLLRSVWGPLKDNESTISFYTRQILQGLGYLHDNHIVHRDIKGDNVLINTFSGLLKISDFGTSKRLAGITPCTETFTGTLQYMAPEIIDQGPRGYGKAADIWSLGCTVIEMATGRPPFHELGSPQAAMFQVGMYKVHPPMPSSLSAEAQAFLLRTFEPDPRLRASAQTLLGDPFLQPGKRSRSPSSPRHAPRPSDAPSASPTPSANSTTQSQTFPCPQAPSQHPPSPPKRCLSYGGTSQLRVPEEPAAEEPASPEESSGLSLLHQESKRRAMLAAVLEQELPALAENLHQEQKQEQGARLGRNHVEELLRCLGAHIHTPNRRQLAQELRALQGRLRAQGLGPALLHRPLFAFPDAVKQILRKRQIRPHWMFVLDSLLSRAVRAALGVLGPEVEKEAVSPRSEELSNEGDSQQSPGQQSPLPVEPEQGPAPLMVQLSLLRAETDRLREILAGKEREYQALVQRALQRLNEEARTYVLAPEPPTALSTDQGLVQWLQELNVDSGTIQMLLNHSFTLHTLLTYATRDDLIYTRIRGGMVCRIWRAILAQRAGSTPVTSGP

SEQ ID NO: 7454 - protein, 949 aa, Homo sapiens
MTDSKYFTTTKKGEIFELKAELNSDKKEKKKEAVKKVIASMTVGKDVSALFPDVVNCMQTDNLELKKLVYLYLMNYAKSQPDMAIMAVNTFVKDCEDPNPLIRALAVRTMGCIRVDKITEYLCEPLRKCLKDEDPYVRKTAAVCVAKLHDINAQLVEDQGFLDTLKDLISDSNPMVVANAVAALSEIAESHPSSNLLDLNPQSINKLLTALNECTEWGQIFILDCLANYMPKDDREAQSICERVTPRLSHANSAVVLSAVKVLMKFMEMLSKDLDYYGTLLKKLAPPLVTLLSAEPELQYVALRNINLIVQKRPEILKHEMKVFFVKYNDPIYVKLEKLDIMIRLASQANIAQVLAELKEYATEVDVDFVRKAVRAIGRCAIKVEQSAERCVSTLLDLIQTKVNYVVQEAIVVIKDIFRKYPNKYESVIATLCENLDSLDEPEARAAMIWIVGEYAERIDNADELLESFLEGFHDESTQVQLQLLTAIVKLFLKKPTETQELVQQVLSLATQDSDNPDLRDRGYIYWRLLSTDPVAAKEVVLAEKPLISEETDLIEPTLLDELICYIGTLASVYHKPPSAFVEGGRGVVHKSLPPRTASSESAESPETAPTGAPPGEQPDVIPAQGDLLGDLLNLDLGPPVSGPPLATSSVQMGAVDLLGGGLDSLMGDEPEGIGGTNFVAPPTAAVPANLGAPIGSGLSDLFDLTSGVGTLSGSYVAPKAVWLPAMKAKGLEISGTFTRQVGSISMDLQLTNKALQVMTDFAIQFNRNSFGLAPAAPLQVHAPLSPNQTVEISLPLSTVGSVMKMEPLNNLQVAVKNNIDVFYFSTLYPLHILFVEDGKMDRQMFLATWKDIPNENEAQFQIRDCPLNAEAASSKLQSSNIFTVAKRNVEGQDMLYQSLKLTNGIWVLAELRIQPGNPSCTDLELSLKCRAPEVSQHVYQAYETILKN

SEQ ID NO: 7455 - protein, 292 aa, Homo sapiens
MEKRTCALCPKDVEYNVLYFAQSENIAAHENCLLYSSGLVECEDQDPLNPDRSFDVESVKKEIQRGRKLKCKFCHKRGATVGCDLKNCNKNYHFFCAKKDDAVPQSDGVRGIYKLLCQQHAQFPIIAQSAKFSGVKRKRGRKKPLSGNHVQPPETMKCNTFIRQVKEEHGRHTDATVKVPFLKKCKEAGLLNYLLEEILDKVHSIPEKLMDETTSESDYEEIGSALFDCRLFEDTFVNFQAAIEKKIHASQQRWQQLKEEIELLQDLKQTLCSFQENRDLMSSSTSISSLSY

SEQ ID NO: 7456 - protein, 1097 aa, Homo sapiens
MAAAAAEQQQFYLLLGNLLSPDNVVRKQAEETYENIPGQSKITFLLQAIRNTTAAEEARQMAAVLLRRLLSSAFDEVYPALPSDVQTAIKSELLMIIQMETQSSMRKKVCDIAAELARNLIDEDGNNQWPEGLKFLFDSVSSQNVGLREAALHIFWNFPGIFGNQQQHYLDVIKRMLVQCMQDQEHPSIRTLSARATAAFILANEHNVALFKHFADLLPGFLQAVNDSCYQNDDSVLKSLVEIADTVPKYLRPHLEATLQLSLKLCGDTSLNNMQRQLALEVIVTLSETAAAMLRKHTNIVAQTIPQMLAMMVDLEEDEDWANADELEDDDFDSNAVAGESALDRMACGLGGKLVLPMIKEHIMQMLQNPDWKYRHAGLMALSAIGEGCHQQMEGILNEIVNFVLLFLQDPHPRVRYAACNAVGQMATDFAPGFQKKFHEKVIAALLQTMEDQGNQRVQAHAAAALINFTEDCPKSLLIPYLDNLVKHLHSIMVLKLQELIQKGTKLVLEQVVTSIASVADTAEEKFVPYYDLFMPSLKHIVENAVQKELRLLRGKTIECISLIGLAVGKEKFMQDASDVMQLLLKTQTDFNDMEDDDPQISYMISAWARMCKILGKEFQQYLPVVMGPLMKTASIKPEVALLDTQDMENMSDDDGWEFVNLGDQQSFGIKTAGLEEKSTACQMLVCYAKELKEGFVEYTEQVVKLMVPLLKFYFHDGVRVAAAESMPLLLECARVRGPEYLTQMWHFMCDALIKAIGTEPDSDVLSEIMHSFAKCIEVMGDGCLNNEHFEELGGILKAKLEEHFKNQELRQVKRQDEDYDEQVEESLQDEDDNDVYILTKVSDILHSIFSSYKEKVLPWFEQLLPLIVNLICPHRPWPDRQWGLCIFDDVIEHCSPASFKYAEYFLRPMLQYVCDNSPEVRQAAAYGLGVMAQYGGDNYRPFCTEALPLLVRVIQSADSKTKENVNATENCISAVGKIMKFKPDCVNVEEVLPHWLSWLPLHEDKEEAVQTFNYLCDLIESNHPIVLGPNNTNLPKIFSIIAEGEMHEAIKHEDPCAKRLANVVRQVQTSGGLWTECIAQLSPEQQAAIQELLNSA

SEQ ID NO: 7457 - protein, 135 aa, Homo sapiens
MRIMLLFTAILAFSLAQSFGAVCKEPQEEVVPGGGRSKRDPDLYQLLQRLFKSHSSLEGLLKALSQASTDPKESTSPEKRDMHDFFVGLMGKRSVQPEGKTGPFLPSVRVPRPLHPNQLGSTGKSSLGTEEQRPL

SEQ ID NO: 7458 - protein, 634 aa, Homo sapiens
MSLVPATNYIYTPLNQLKGGTIVNVYGVVKFFKPPYLSKGTDYCSVVTIVDQTNVKLTCLLFSGNYEALPIIYKNGDIVRFHRLKIQVYKKETQGITSSGFASLTFEGTLGAPIIPRTSSKYFNFTTEDHKMVEALRVWASTHMSPSWTLLKLCDVQPMQYFDLTCQLLGKAEVDGASFLLKVWDGTRTPFPSWRVLIQDLVLEGDLSHIHRLQNLTIDILVYDNHVHVARSLKVGSFLRIYSLHTKLQSMNSENQTMLSLEFHLHGGTSYGRGIRVLPESNSDVDQLKKDLESANLTANQHSDVICQSEPDDSFPSSGSVSLYEVERCQQLSATILTDHQYLERTPLCAILKQKAPQQYRIRAKLRSYKPRRLFQSVKLHCPKCHLLQEVPHEGDLDIIFQDGATKTPDVKLQNTSLYDSKIWTTKNQKGRKVAVHFVKNNGILPLSNECLLLIEGGTLSEICKLSNKFNSVIPVRSGHEDLELLDLSAPFLIQGTIHHYGCKQCSSLRSIQNLNSLVDKTSWIPSSVAEALGIVPLQYVFVMTFTLDDGTGVLEAYLMDSDKFFQIPASEVLMDDDLQKSVDMIMDMFCPPGIKIDAYPWLECFIKSYNVTNGTDNQICYQIFDTTVAEDVI

SEQ ID NO: 7459 - protein, 198 aa, Homo sapiens
MATAEPSGRALRLSTPGPRPSGARDRAPGAAGPPSGQIGNRALRLGERTPAAVEKRGPYMVTRAPSIQAKLQKHRDLAKAVLRRKGMLGASPNRPDSSGKRSVKFNKGYTALSQSPDENLVSLDSDSDGELGSRYSSGYSSAEQVNQDVSRQLLQDGYHLDEIPDDEDLDLIPPKPMASSTCSCCWCCLGDSSSCTLQ

SEQ ID NO: 7460 - protein, 931 aa, Homo sapiens
MLLFFTLGLLIHFVFFASIFDIYFTSPLVHGMTPQFTPLPPPARRLVLFVADGLRADALYELDENGNSRAPFIRNIIMHEGSWGISHTRVPTESRPGHVALIAGFYEDVSAVAKGWKENPVEFDSLFNESKYTWSWGSPDILPMFAKGASGDHVYTYSYDAKREDFGAQDATKLDTWVFDNVKDFFHHARNNQSLFSKINEEKIVFFLHLLGIDTNGHAHRPSSRDYKHNIKKVDDGVKEIVSMFNHFYGNDGKTTFIFTSDHGMTDWGSHGAGHPSETLTPLVTWGAGIKYPQRVSAQQFDDAFLKEWRLENWKRLDVNQADIAPLMTSLIGVPFPLNSVGILPVDYLNNTDLFKAESMFTNAVQILEQFKVKMTQKKEVTLPFLFTPFKLLSDSKQFNILRKARSYIKHRKFDEVVSLCKELIHLALKGLSYYHTYDRFFLGVNVVIGFVGWISYASLLIIKSHSNLIKGVSKEVKKPSHLLPCSFVAIGILVAFFLLIQACPWTYYVYGLLPLPIWYAVLREFQVIQDLVVSVLTYPLSHFVGYLLAFTLGIEVLVLSFFYRYMLTAGLTAFAAWPFLTRLWTRAKMTSLSWTFFSLLLAVFPLMPVVGRKPDISLVMGAGLLVLLLSLCVVTSLMKRKDSFIKEELLVHLLQVLSTVLSMYVVYSTQSSLLRKQGLPLMNQIISWATLASSLVVPLLSSPVLFQRLFSILLSLMSTYLLLSTGYEALFPLVLSCLMFVWINIEQETLQQSGVCCKQKLTSIQFSYNTDITQFRQLYLDDIRRAFFLVFFLVTAFFGTGNIASINSFDLASVYCFLTVFSPFMMGALMMWKILIPFVLVMCAFEAVQLTTQLSSKSLFLIVLVISDIMALHFFFLVKDYGSWLDIGTSISHYVIVMSMTIFLVFLNGLAQLLTTKKLRLCGKPKSHFM

SEQ ID NO: 7461 - protein, 1205 aa, Homo sapiens
MRKPRRKSRQNAEGRRSPSPYSLKCSPTRETLTYAQAQRIVEVDIDGRLHRISIYDPLKIITEDELTAQDITECNSNKENSEQPQFPGKSKKPSSKGKKKESCSKHASGTSFHLPQPSFRMVDSGIQPEAPPLPAAYYRYIEKPPEDLDAEVEYDMDEEDLAWLDMVNEKRRVDGHSLVSADTFELLVDRLEKESYLESRSSGAQQSLIDEDAFCCVCLDDECHNSNVILFCDICNLAVHQECYGVPYIPEGQWLCRCCLQSPSRPVDCILCPNKGGAFKQTSDGHWAHVVCAIWIPEVCFANTVFLEPIEGIDNIPPARWKLTCYICKQKGLGAAIQCHKVNCYTAFHVTCAQRAGLFMKIEPMRETSLNGTIFTVRKTAYCEAHSPPGAATARRKGDSPRSISETGDEEGLKEGDGEEEEEEEVEEEEQEAQGGVSGSLKGVPKKSKMSLKQKIKKEPEEAGQDTPSTLPMLAVPQIPSYRLNKICSGLSFQRKNQFMQRLHNYWLLKRQARNGVPLIRRLHSHLQSQRNAEQREQDEKTSAVKEELKYWQKLRHDLERARLLIELIRKREKLKREQVKVQQAAMELELMPFNVLLRTTLDLLQEKDPAHIFAEPVNLSEVPDYLEFISKPMDFSTMRRKLESHLYRTLEEFEEDFNLIVTNCMKYNAKDTIFHRAAVRLRDLGGAILRHARRQAENIGYDPERGTHLPESPKLEDFYRFSWEDVDNILIPENRAHLSPEVQLKELLEKLDLVSAMRSSGARTRRVRLLRREINALRQKLAQPPPPQPPSLNKTVSNGELPAGPQGDAAVLEQALQEEPEDDGDRDDSKLPPPPTLEPTGPAPSLSEQESPPEPPTLKPINDSKPPSRFLKPRKVEEDELLEKSPLQLGNEPLQRLLSDNGINRLSLMAPDTPAGTPLSGVGRRTSVLFKKAKNGVKLQRSPDRVLENGEDHGVAGSPASPASIEEERHSRKRPRSRSCSESEGERSPQQEEETGMTNGFGKHTESGSDSECSLGLSGGLAFEACSGLTPPKRSRGKPALSRVPFLEGVNGDSDYNGSGRSLLLPFEDRGDLEPLELVWAKCRGYPSYPALIIDPKMPREGLLHNGVPIPVPPLDVLKLGEQKQAEAGEKLFLVLFFDNKRTWQWLPRDKVLPLGVEDTVDKLKMLEGRKTSIRKSVQVAYDRAMIHLSRVRGPHSFVTSSYL

SEQ ID NO: 7462 - protein, 4551 aa, Homo sapiens
MSGAGGAFASPREVLLERPCWLDGGCEPARRGYLYQQLCCVDERDRVQKKTFTKWVNKHLIKAQRHISDLYEDLRDGHNLISLLEVLSGDSLPREKGRMRFHKLQNVQIALDYLRHRQVKLVNIRNDDIADGNPKLTLGLIWTIILHFQISDIQVSGQSEDMTAKEKLLLWSQRMVEGYQGLRCDNFTSSWRDGRLFNAIIHRHKPLLIDMNKVYRQTNLENLDQAFSVAERDLGVTRLLDPEDVDVPQPDEKSIITYVSSLYDAMPRVPDVQDGVRANELQLRWQEYRELVLLLLQWMRHHTAAFEERRFPSSFEEIEILWSQFLKFKEMELPAKEADKNRSKGIYQSLEGAVQAGQLKVPPGYHPLDVEKEWGKLHVAILEREKQLRSEFERLECLQRIVTKLQMEAGLCEEQLNQADALLQSDVRLLAAGKVPQRAGEVERDLDKADSMIRLLFNDVQTLKDGRHPQGEQMYRRVYRLHERLVAIRTEYNLRLKAGVAAPATQVAQVTLQSVQRRPELEDSTLRYLQDLLAWVEENQHRVDGAEWGVDLPSVEAQLGSHRGLHQSIEEFRAKIERARSDEGQLSPATRGAYRDCLGRLDLQYAKLLNSSKARLRSLESLHSFVAAATKELMWLNEKEEEEVGFDWSDRNTNMTAKKESYSALMRELELKEKKIKELQNAGDRLLREDHPARPTVESFQAALQTQWSWMLQLCCCIEAHLKENAAYFQFFSDVREAEGQLQKLQEALRRKYSCDRSATVTRLEDLLQDAQDEKEQLNEYKGHLSGLAKRAKAVVQLKPRHPAHPMRGRLPLLAVCDYKQVEVTVHKGDECQLVGPAQPSHWKVLSSSGSEAAVPSVCFLVPPPNQEAQEAVTRLEAQHQALVTLWHQLHVDMKSLLAWQSLRRDVQLIRSWSLATFRTLKPEEQRQALHSLELHYQAFLRDSQDAGGFGPEDRLMAEREYGSCSHHYQQLLQSLEQGAQEESRCQRCISELKDIRLQLEACETRTVHRLRLPLDKEPARECAQRIAEQQKAQAEVEGLGKGVARLSAEAEKVLALPEPSPAAPTLRSELELTLGKLEQVRSLSAIYLEKLKTISLVIRGTQGAEEVLRAHEEQLKEAQAVPATLPELEATKASLKKLRAQAEAQQPTFDALRDELRGAQEVGERLQQRHGERDVEVERWRERVAQLLERWQAVLAQTDVRQRELEQLGRQLRYYRESADPLGAWLQDARRRQEQIQAMPLADSQAVREQLRQEQALLEEIERHGEKVEECQRFAKQYINAIKDYELQLVTYKAQLEPVASPAKKPKVQSGSESVIQEYVDLRTHYSELTTLTSQYIKFISETLRRMEEEERLAEQQRAEERERLAEVEAALEKQRQLAEAHAQAKAQAEREAKELQQRMQEEVVRREEAAVDAQQQKRSIQEELQQLRQSSEAEIQAKARQAEAAERSRLRIEEEIRVVRLQLEATERQRGGAEGELQALRARAEEAEAQKRQAQEEAERLRRQVQDESQRKRQAEVELASRVKAEAEAAREKQRALQALEELRLQAEEAERRLRQAEVERARQVQVALETAQRSAEAELQSKRASFAEKTAQLERSLQEEHVAVAQLREEAERRAQQQAEAERAREEAERELERWQLKANEALRLRLQAEEVAQQKSLAQAEAEKQKEEAEREARRRGKAEEQAVRQRELAEQELEKQRQLAEGTAQQRLAAEQELIRLRAETEQGEQQRQLLEEELARLQREAAAATQKRQELEAELAKVRAEMEVLLASKARAEEESRSTSEKSKQRLEAEAGRFRELAEEAARLRALAEEAKRQRQLAEEDAARQRAEAERVLAEKLAAIGEATRLKTEAEIALKEKEAENERLRRLAEDEAFQRRRLEEQAAQHKADIEERLAQLRKASDSELERQKGLVEDTLRQRRQVEEEILALKASFEKAAAGKAELELELGRIRSNAEDTLRSKEQAELEAARQRQLAAEEERRRREAEERVQKSLAAEEEAARQRKAALEEVERLKAKVEEARRLRERAEQESARQLQLAQEAAQKRLQAEEKAHAFAVQQKEQELQQTLQQEQSVLDQLRGEAEAARRAAEEAEEARVQAEREAAQSRRQVEEAERLKQSAEEQAQARAQAQAAAEKLRKEAEQEAARRAQAEQAALRQKQAADAEMEKHKKFAEQTLRQKAQVEQELTTLRLQLEETDHQKNLLDEELQRLKAEATEAARQRSQVEEELFSVRVQMEELSKLKARIEAENRALILRDKDNTQRFLQEEAEKMKQVAEEAARLSVAAQEAARLRQLAEEDLAQQRALAEKMLKEKMQAVQEATRLKAEAELLQQQKELAQEQARRLQEDKEQMAQQLAEETQGFQRTLEAERQRQLEMSAEAERLKLRVAEMSRAQARAEEDAQRFRKQAEEIGEKLHRTELATQEKVTLVQTLEIQRQQSDHDAERLREAIAELEREKEKLQQEAKLLQLKSEEMQTVQQEQLLQETQALQQSFLSEKDSLLQRERFIEQEKAKLEQLFQDEVAKAQQLREEQQRQQQQMEQERQRLVASMEEARRRQHEAEEGVRRKQEELQQLEQQRRQQEELLAEENQRLREQLQLLEEQHRAALAHSEEVTASQVAATKTLPNGRDALDGPAAEAEPEHSFDGLRRKVSAQRLQEAGILSAEELQRLAQGHTTVDELARREDVRHYLQGRSSIAGLLLKATNEKLSVYAALQRQLLSPGTALILLEAQAASGFLLDPVRNRRLTVNEAVKEGVVGPELHHKLLSAERAVTGYKDPYTGQQISLFQAMQKGLIVREHGIRLLEAQIATGGVIDPVHSHRVPVDVAYRRGYFDEEMNRVLADPSDDTKGFFDPNTHENLTYLQLLERCVEDPETGLCLLPLTDKAAKGGELVYTDSEARDVFEKATVSAPFGKFQGKTVTIWEIINSEYFTAEQRRDLLRQFRTGRITVEKIIKIIITVVEEQEQKGRLCFEGLRSLVPAAELLESRVIDRELYQQLQRGERSVRDVAEVDTVRRALRGANVIAGVWLEEAGQKLSIYNALKKDLLPSDMAVALLEAQAGTGHIIDPATSARLTVDEAVRAGLVGPEFHEKLLSAEKAVTGYRDPYTGQSVSLFQALKKGLIPREQGLRLLDAQLSTGGIVDPSKSHRVPLDVACARGCLDEETSRALSAPRADAKAYSDPSTGEPATYGELQQRCRPDQLTGLSLLPLSEKAARARQEELYSELQARETFEKTPVEVPVGGFKGRTVTVWELISSEYFTAEQRQELLRQFRTGKVTVEKVIKILITIVEEVETLRQERLSFSGLRAPVPASELLASGVLSRAQFEQLKDGKTTVKDLSELGSVRTLLQGSGCLAGIYLEDTKEKVSIYEAMRRGLLRATTAALLLEAQAATGFLVDPVRNQRLYVHEAVKAGVVGPELHEQLLSAEKAVTGYRDPYSGSTISLFQAMQKGLVLRQHGIRLLEAQIATGGIIDPVHSHRVPVDVAYQRGYFSEEMNRVLADPSDDTKGFFDPNTHENLTYRQLLERCVEDPETGLRLLPLKGAEKAEVVETTQVYTEEETRRAFEETQIDIPGGGSHGGSTMSLWEVMQSDLIPEEQRAQLMADFQAGRVTKERMIIIIIEIIEKTEIIRQQGLASYDYVRRRLTAEDLFEARIISLETYNLLREGTRSLREALEAESAWCYLYGTGSVAGVYLPGSRQTLSIYQALKKGLLSAEVARLLLEAQAATGFLLDPVKGERLTVDEAVRKGLVGPELHDRLLSAERAVTGYRDPYTEQTISLFQAMKKELIPTEEALRLLDAQLATGGIVDPRLGFHLPLEVAYQRGYLNKDTHDQLSEPSEVRSYVDPSTDERLSYTQLLRRCRRDDGTGQLLLPLSDARKLTFRGLRKQITMEELVRSQVMDEATALQLREGLTSIEEVTKNLQKFLEGTSCIAGVFVDATKERLSVYQAMKKGIIRPGTAFELLEAQAATGYVIDPIKGLKLTVEEAVRMGIVGPEFKDKLLSAERAVTGYKDPYSGKLISLFQAMKKGLILKDHGIRLLEAQIATGGIIDPEESHRLPVEVAYKRGLFDEEMNEILTDPSDDTKGFFDPNTEENLTYLQLMERCITDPQTGLCLLPLKEKKRERKTSSKSSVRKRRVVIVDPETGKEMSVYEAYRKGLIDHQTYLELSEQECEWEEITISSSDGVVKSMIIDRRSGRQYDIDDAIAKNLIDRSALDQYRAGTLSITEFADMLSGNAGGFRSRSSSVGSSSSYPISPAVSRTQLASWSDPTEETGPVAGILDTETLEKVSITEAMHRNLVDNITGQRLLEAQACTGGIIDPSTGERFPVTDAVNKGLVDKIMVDRINLAQKAFCGFEDPRTKTKMSAAQALKKGWLYYEAGQRFLEVQYLTGGLIEPDTPGRVPLDEALQRGTVDARTAQKLRDVGAYSKYLTCPKTKLKISYKDALDRSMVEEGTGLRLLEAAAQSTKGYYSPYSVSGSGSTAGSRTGSRTGSRAGSRRGSFDATGSGFSMTFSSSSYSSSGYGRRYASGSSASLGGPESAVA

SEQ ID NO: 7463 - protein, 376 aa, Homo sapiens
MLPLSIKDDEYKPPKFNLFGKISGWFRSILSDKTSRNLFFFLCLNLSFAFVELLYGIWSNCLGLISDSFHMFFDSTAILAGLAASVISKWRDNDAFSYGYVRAEVLAGFVNGLFLIFTAFFIFSEGVERALAPPDVHHERLLLVSILGFVVNLIGIFVFKHGGHGHSHGSGHGHSHSLFNGALDQAHGHVDHCHSHEVKHGAAHSHDHAHGHGHFHSHDGPSLKETTGPSRQILQGVFLHILADTLGSIGVIASAIMMQNFGLMIADPICSILIAILIVVSVIPLLRESVGILMQRTPPLLENSLPQCYQRVQQLQGVYSLQEQHFWTLCSDVYVGTLKLIVAPDADARWILSQTHNIFTQAGVRQLYVQIDFAAM

SEQ ID NO: 7464 - protein, 893 aa, Homo sapiens
MPVRKQDTQRALHLLEEYRSKLSQTEDRQLRSSIERVINIFQSNLFQALIDIQEFYEVTLLDNPKCIDRSKPSEPIQPVNTWEISSLPSSTVTSETLPSSLSPSVEKYRYQDEDTPPQEHISPQITNEVIGPELVHVSEKNLSEIENVHGFVSHSHISPIKANPPPVLVNTDSLETPTYVNGTDADYEYEEITLERGNSGLGFSIAGGTDNPHIGDDSSIFITKIITGGAAAQDGRLRVNDCILRVNEVDVRDVTHSKAVEALKEAGSIVRLYVKRRKPVSEKIMEIKLIKGPKGLGFSIAGGVGNQHIPGDNSIYVTKIIEGGAAHKDGKLQIGDKLLAVNNVCLEEVTHEEAVTALKNTSDFVYLKVAKPTSMYMNDGYAPPDITNSSSQPVDNHVSPSSFLGQTPASPARYSPVSKAVLGDDEITREPRKVVLHRGSTGLGFNIVGGEDGEGIFISFILAGGPADLSGELRKGDRIISVNSVDLRAASHEQAAAALKNAGQAVTIVAQYRPEEYSRFEAKIHDLREQMMNSSISSGSGSLRTSQKRSLYVRALFDYDKTKDSGLPSQGLNFKFGDILHVINASDDEWWQARQVTPDGESDEVGVIPSKRRVEKKERARLKTVKFNSKTRDKGQSFNDKRKKNLFSRKFPFYKNKDQSEQETSDADQHVTSNASDSESSYRGQEEYVLSYEPVNQQEVNYTRPVIILGPMKDRINDDLISEFPDKFGSCVPHTTRPKRDYEVDGRDYHFVTSREQMEKDIQEHKFIEAGQYNNHLYGTSVQSVREVAEKGKHCILDVSGNAIKRLQIAQLYPISIFIKPKSMENIMEMNKRLTEEQARKTFERAMKLEQEFTEHFTAIVQGDTLEDIYNQVKQIIEEQSGSYIWVPAKEKL

SEQ ID NO: 7465 - protein, 1205 aa, Homo sapiens
MTNPSDRVLPANSMAESREGDFGCTVMELRKLMELRSRDALTQINVHYGGVQNLCSRLKTSPVEGLSGNPADLEKRRQVFGHNVIPPKKPKTFLELVWEALQDVTLIILEIAAIISLVLSFYRPAGEENELCGQVATTPEDENEAQAGWIEGAAILFSVIIVVLVTAFNDWSKEKQFRGLQCRIEQEQKFSIIRNGQLIQLPVAEIVVGDIAQVKYGDLLPADGILIQGNDLKIDESSLTGESDHVKKSLDKDPMLLSGTHVMEGSGRMVVTAVGVNSQTGIILTLLGVNEDDEGEKKKKGKKQGVPENRNKAKTQDGVALEIQPLNSQEGIDNEEKDKKAVKVPKKEKSVLQGKLTRLAVQIGKAGLLMSALTVFILILYFVIDNFVINRRPWLPECTPIYIQYFVKFFIIGITVLVVAVPEGLPLAVTISLAYSVKKMMKDNNLVRHLDACETMGNATAICSDKTGTLTMNRMTVVQAYIGGIHYRQIPSPDVFLPKVLDLIVNGISINSAYTSKILPPEKEGGLPRQVGNKTECALLGFVTDLKQDYQAVRNEVPEEKLYKVYTFNSVRKSMSTVIRNPNGGFRMYSKGASEIILRKCNRILDRKGEAVPFKNKDRDDMVRTVIEPMACDGLRTICIAYRDFDDTEPSWDNENEILTELTCIAVVGIEDPVRPEVPDAIAKCKQAGITVRMVTGDNINTARAIATKCGILTPGDDFLCLEGKEFNRLIRNEKGEVEQEKLDKIWPKLRVLARSSPTDKHTLVKGIIDSTVGEHRQVVAVTGDGTNDGPALKKADVGFAMGIAGTDVAKEASDIILTDDNFTSIVKAVMWGRNVYDSISKFLQFQLTVNVVAVIVAFTGACITQDSPLKAVQMLWVNLIMDTFASLALATEPPTESLLKRRPYGRNKPLISRTMMKNILGHAFYQLIVIFILVFAGEKFFDIDSGRKAPLHSPPSQHYTIVFNTFVLMQLFNEINSRKIHGEKNVFSGIYRNIIFCSVVLGTFICQIFIVEFGGKPFSCTSLSLSQWLWCLFIGIGELLWGQFISAIPTRSLKFLKEAGHGTTKEEITKDAEGLDEIDHAEMELRRGQILWFRGLNRIQTQIKVVKAFHSSLHESIQKPYNQKSIHSFMTHPEFAIEEELPRTPLLDEEEEENPDKASKFGTRVLLLDGEVTPYANTNNNAVDCNQVQLPQSDSSLQSLETSV

SEQ ID NO: 7466 - protein, 529 aa, Homo sapiens
MFMFNWFTDCLWTLFLSNYQPSVESSSPGGSATSDDHEFDPSADMLVHDFDDERTLEEEEMMEGETNFSSEIEDLAREGDMPIHELLSLYGYGSTVRLPEEDEEEEEEEEEGEDDEDADNDDNSGCSGENKEENIKDSSGQEDETQSSNDDPSQSVASQDAQEIIRPRRCKYFDTNSEVEEESEEDEDYIPSEDWKKEIMVGSMFQAEIPVGICRYKENEKVYENDDQLLWDPEYLPEDKVIIFLKDASRRTGDEKGVEAIPEGSHIKDNEQALYELVKCNFDTEEALRRLRFNVKAAREELSVWTEEECRNFEQGLKAYGKDFHLIQANKVRTRSVGECVAFYYMWKKSERYDFFAQQTRFGKKKYNLHPGVTDYMDRLLDESESAASSRAPSPPPTASNSSNSQSEKEDGTVSTANQNGVSSNGPGEILNKEEVKVEGLHINGPTGGNKKPLHADMDTNGYETDNLTTDPKLAHMTARNENDFDEKSERPAKRRRVNSNGKESPGSSEFFQEAVSHGKFEELENTDD

SEQ ID NO: 7467 - protein, 278 aa, Homo sapiens
MEPRAADGCFLGDVGFWVERTPVHEAAQRGESLQLQQLIESGACVNQVTVDSITPLHAASLQGQARCVQLLLAAGAQVDARNIDGSTPLCDACASGSIECVKLLLSYGAKVNPPLYTASPLHEACMSGSSECVRLLIDVGANLEAHDCHFGTPLHVACAREHLDCVKVLLNAGANVNAAKLHETALHHAAKVKNVDLIEMLIEFGGNIYARDNRGKKPSDYTWSSSAPAKCFEYYEKTPLTLSQLCRVNLRKATGVRGLEKIAKLNIPPRLIDYLSYN

SEQ ID NO: 7468 - protein, 616 aa, Homo sapiens
MDLWQLLLTLALAGSSDAFSGSEDSSKEPKFTKCRSPERETFSCHWTDEVHHGTKNLGPIQLFYTRRNTQEWTQEWKECPDYVSAGENSCYFNSSFTSIWIPYCIKLTSNGGTVDEKCFSVDEIVQPDPPIALNWTLLNVSLTGIHADIQVRWEAPRNADIQKGWMVLEYELQYKEVNETKWKMMDPILTTSVPVYSLKVDKEYEVRVRSKQRNSGNYGEFSEVLYVTLPQMSQFTCEEDFYFPWLLIIIFGIFGLTVMLFVFLFSKQQRIKMLILPPVPVPKIKGIDPDLLKEGKLEEVNTILAIHDSYKPEFHSDDSWVEFIELDIDEPDEKTEESDTDRLLSSDHEKSHSNLGVKDGDSGRTSCCEPDILETDFNANDIHEGTSEVAQPQRLKGEADLLCLDQKNQNNSPYHDACPATQQPSVIQAEKNKPQPLPTEGAESTHQAAHIQLSNPSSLSNIDFYAQVSDITPAGSVVLSPGQKNKAGMSQCDMHPEMVSLCQENFLMDNAYFCEADAKKCIPVAPHIKVESHIQPSLNQEDIYITTESLTTAAGRPGTGEHVPGSEMPVPDYTSIHIVQSPQGLILNATALPLPDKEFLSSCGYVSTDQLNKIMP

SEQ ID NO: 7469 - protein, 369 aa, Homo sapiens
MEPPGRRECPFPSWRFPGLLLAAMVLLLYSFSDACEEPPTFEAMELIGKPKPYYEIGERVDYKCKKGYFYIPPLATHTICDRNHTWLPVSDDACYRETCPYIRDPLNGQAVPANGTYEFGYQMHFICNEGYYLIGEEILYCELKGSVAIWSGKPPICEKVLCTPPPKIKNGKHTFSEVEVFEYLDAVTYSCDPAPGPDPFSLIGESTIYCGDNSVWSRAAPECKVVKCRFPVVENGKQISGFGKKFYYKATVMFECDKGFYLDGSDTIVCDSNSTWDPPVPKCLKGPRPTYKPPVSNYPGYPKPEEGILDSLDVWVIAVIVIAIVVGVAVICVVPYRYLQRRKKKGKADGGAEYATYQTKSTTPAEQRG

SEQ ID NO: 7470 - protein, 915 aa, Homo sapiens
MVQLRKLLRVLTLMKFPCCVLEVLLCALAAAARGQEMYAPHSIRIEGDVTLGGLFPVHAKGPSGVPCGDIKRENGIHRLEAMLYALDQINSDPNLLPNVTLGARILDTCSRDTYALEQSLTFVQALIQKDTSDVRCTNGEPPVFVKPEKVVGVIGASGSSVSIMVANILRLFQIPQISYASTAPELSDDRRYDFFSRVVPPDSFQAQAMVDIVKALGWNYVSTLASEGSYGEKGVESFTQISKEAGGLCIAQSVRIPQERKDRTIDFDRIIKQLLDTPNSRAVVIFANDEDIKQILAAAKRADQVGHFLWVGSDSWGSKINPLHQHEDIAEGAITIQPKRATVEGFDAYFTSRTLENNRRNVWFAEYWEENFNCKLTISGSKKEDTDRKCTGQERIGKDSNYEQEGKVQFVIDAVYAMAHALHHMNKDLCADYRGVCPEMEQAGGKKLLKYIRNVNFNGSAGTPVMFNKNGDAPGRYDIFQYQTTNTSNPGYRLIGQWTDELQLNIEDMQWGKGVREIPASVCTLPCKPGQRKKTQKGTPCCWTCEPCDGYQYQFDEMTCQHCPYDQRPNENRTGCQDIPIIKLEWHSPWAVIPVFLAMLGIIATIFVMATFIRYNDTPIVRASGRELSYVLLTGIFLCYIITFLMIAKPDVAVCSFRRVFLGLGMCISYAALLTKTNRIYRIFEQGKKSVTAPRLISPTSQLAITSSLISVQLLGVFIWFGVDPPNIIIDYDEHKTMNPEQARGVLKCDITDLQIICSLGYSILLMVTCTVYAIKTRGVPENFNEAKPIGFTMYTTCIVWLAFIPIFFGTAQSAEKLYIQTTTLTISMNLSASVALGMLYMPKVYIIIFHPELNVQKRKRSFKAVVTAATMSSRLSHKPSDRPNGEAKTELCENVDPNSPAAKKKYVSYNNLVI

SEQ ID NO: 7471 - protein, 659 aa, Homo sapiens
MQGSSLWLSLTFRSARVLSRARFFEWQSPGLPNTAAMENGTGPYGEERPREVQETTVTEGAAKIAFPSANEVFYNPVQEFNRDLTCAVITEFARIQLGAKGIQIKVPGEKDTQKVVVDLSEQEEEKVELKESENLASGDQPRTAAVGEICEEGLHVLEGLAASGLRSIRFALEVPGLRSVVANDASTRAVDLIRRNVQLNDVAHLVQPSQADARMLMYQHQRVSERFDVIDLDPYGSPATFLDAAVQAVSEGGLLCVTCTDMAVLAGNSGETCYSKYGAMALKSRACHEMALRIVLHSLDLRANCYQRFVVPLLSISADFYVRVFVRVFTGQAKVKASASKQALVFQCVGCGAFHLQRLGKASGVPSGRAKFSAACGPPVTPECEHCGQRHQLGGPMWAEPIHDLDFVGRVLEAVSANPGRFHTSERIRGVLSVITEELPDVPLYYTLDQLSSTIHCNTPSLLQLRSALLHADFRVSLSHACKNAVKTDAPASALWDIMRCWEKECPVKRERLSETSPAFRILSVEPRLQANFTIREDANPSSRQRGLKRFQANPEANWGPRPRARPGGKAADEAMEERRRLLQNKRKEPPEDVAQRAARLKTFPCKRFKEGTCQRGDQCCYSHSPPTPRVSADAAPDCPETSNQTPPGPGAAAGPGID

SEQ ID NO: 7472 - protein, 831 aa, Homo sapiens
MDVSLCPAKCSFWRIFLLGSVWLDYVGSVLACPANCVCSKTEINCRRPDDGNLFPLLEGQDSGNSNGNASINITDISRNITSIHIENWRSLHTLNAVDMELYTGLQKLTIKNSGLRSIQPRAFAKNPHLRYINLSSNRLTTLSWQLFQTLSLRELQLEQNFFNCSCDIRWMQLWQEQGEAKLNSQNLYCINADGSQLPLFRMNISQCDLPEISVSHVNLTVREGDNAVITCNGSGSPLPDVDWIVTGLQSINTHQTNLNWTNVHAINLTLVNVTSEDNGFTLTCIAENVVGMSNASVALTVYYPPRVVSLEEPELRLEHCIEFVVRGNPPPTLHWLHNGQPLRESKIIHVEYYQEGEISEGCLLFNKPTHYNNGNYTLIAKNPLGTANQTINGHFLKEPFPVDEVSPTPPITVTHKPEEDTFGVSIAVGLAAFACVLLVVLFVMINKYGRRSKFGMKGPVAVISGEEDSASPLHHINHGITTPSSLDAGPDTVVIGMTRIPVIENPQYFRQGHNCHKPDTYVQHIKRRDIVLKRELGEGAFGKVFLAECYNLSPTKDKMLVAVKALKDPTLAARKDFQREAELLTNLQHEHIVKFYGVCGDGDPLIMVFEYMKHGDLNKFLRAHGPDAMILVDGQPRQAKGELGLSQMLHIASQIASGMVYLASQHFVHRDLATRNCLVGANLLVKIGDFGMSRDVYSTDYYRLFNPSGNDFCIWCEVGGHTMLPIRWMPPESIMYRKFTTESDVWSFGVILWEIFTYGKQPWFQLSNTEVIECITQGRVLERPRVCPKEVYDVMLGCWQREPQQRLNIKEIYKILHALGKATPIYLDILG

SEQ ID NO: 7473 - protein, 354 aa, Homo sapiens
MDMMLLVQGACCSNQWLAAVLLSLCCLLPSCLPAGQSVDFPWAAVDNMMVRKGDTAVLRCYLEDGASKGAWLNRSSIIFAGGDKWSVDPRVSISTLNKRDYSLQIQNVDVTDDGPYTCSVQTQHTPRTMQVHLTVQVPPKIYDISNDMTVNEGTNVTLTCLATGKPEPSISWRHISPSAKPFENGQYLDIYGITRDQAGEYECSAENDVSFPDVRKVKVVVNFAPTIQEIKSGTVTPGRSGLIRCEGAGVPPPAFEWYKGEKKLFNGQQGIIIQNFSTRSILTVTNVTQEHFGNYTCVAANKLGTTNASLPLNPPSTAQYGITGSADVLFSCWYLVLTLSSFTSIFYLKNAILQ

SEQ ID NO: 7474 - protein, 392 aa, Homo sapiens
MEDLDQSPLVSSSDSPPRPQPAFKYQFVREPEDEEEEEEEEEEDEDEDLEELEVLERKPAAGLSAAPVPTAPAAGAPLMDFGNDFVPPAPRGPLPAAPPVAPERQPSWDPSPVSSTVPAPSPLSAAAVSPSKLPEDDEPPARPPPPPPASVSPQAEPVWTPPAPAPAAPPSTPAAPKRRGSSGSVDETLFALPAASEPVIRSSAVVDLLYWRDIKKTGVVFGASLFLLLSLTVFSIVSVTAYIALALLSVTISFRIYKGVIQAIQKSDEGHPFRAYLESEVAISEELVQKYSNSALGHVNCTIKELRRLFLVDDLVDSLKFAVLMWVFTYVGALFNGLTLLILALISLFSVPVIYERHQAQIDHYLGLANKNVKDAMAKIQAKIPGLKRKAE

SEQ ID NO: 7475 - protein, 473 aa, Homo sapiens
MRAGPGPTVTLALVLAVSWAMELKPTAPPIFTGRPFVVAWDVPTQDCGPRLKVPLDLNAFDVQASPNEGFVNQNITIFYRDRLGLYPRFDSAGRSVHGGVPQNVSLWAHRKMLQKRVEHYIRTQESAGLAVIDWEDWRPVWVRNWQDKDVYRRLSRQLVASRHPDWPPDRIVKQAQYEFEFAAQQFMLETLRYVKAVRPRHLWGFYLFPDCYNHDYVQNWESYTGRCPDVEVARNDQLAWLWAESTALFPSVYLDETLASSRHGRNFVSFRVQEALRVARTHHANHALPVYVFTRPTYSRRLTGLSEMDLISTIGESAALGAAGVILWGDAGYTTSTETCQYLKDYLTRLLVPYVVNVSWATQYCSRAQCHGHGRCVRRNPSASTFLHLSTNSFRLVPGHAPGEPQLRPVGELSWADIDHLQTHFRCQCYLGWSGEQCQWDHRQAAGGASEAWAGSHLTSLLALAALAFTWTL

SEQ ID NO: 7476 - protein, 872 aa, Homo sapiens
MNYPGRGSPRSPEHNGRGGGGGAWELGSDARPAFGGGVCCFEHLPGGDPDDGDVPLALLRGEPGLHLAPGTDDHNHHLALDPCLSDENYDFSSAESGSSLRYYSEGESGGGGSSLSLHPPQQPPLVPTNSGGGGATGGSPGERKRTRLGGPAARHRYEVVTELGPEEVRWFYKEDKKTWKPFIGYDSLRIELAFRTLLQTTGARPQGGDRDGDHVCSPTGPASSSGEDDDEDRACGFCQSTTGHEPEMVELVNIEPVCVRGGLYEVDVTQGECYPVYWNQADKIPVMRGQWFIDGTWQPLEEEESNLIEQEHLNCFRGQQMQENFDIEVSKSIDGKDAVHSFKLSRNHVDWHSVDEVYLYSDATTSKIARTVTQKLGFSKASSSGTRLHRGYVEEATLEDKPSQTTHIVFVVHGIGQKMDQGRIIKNTAMMREAARKIEERHFSNHATHVEFLPVEWRSKLTLDGDTVDSITPDKVRGLRDMLNSSAMDIMYYTSPLYRDELVKGLQQELNRLYSLFCSRNPDFEEKGGKVSIVSHSLGCVITYDIMTGWNPVRLYEQLLQKEEELPDERWMSYEERHLLDELYITKRRLKEIEERLHGLKASSMTQTPALKFKVENFFCMGSPLAVFLALRGIRPGNTGSQDHILPREICNRLLNIFHPTDPVAYRLEPLILKHYSNISPVQIHWYNTSNPLPYEHMKPSFLNPAKEPTSVSENEGISTIPSPVTSPVLSRRHYGESITNIGKASILGAASIGKGLGGMLFSRFGRSSTTQSSETSKDSMEDEKKPVASPSATTVGTQTLPHSSSGFLDSALELDHRIDFELREGLVESRYWSAVTSHTAYWSSLDVALFLLTFMYKHEHDDDAKPNLDPI

SEQ ID NO: 7477 - protein, 442 aa, Homo sapiens
MSALGAVIALLLWGQLFAVDSGNDVTDIADDGCPKPPEIAHGYVEHSVRYQCKNYYKLRTEGDGVYTLNDKKQWINKAVGDKLPECEADDGCPKPPEIAHGYVEHSVRYQCKNYYKLRTEGDGEAMPCSLPHVNLRVTFTSPADVGKEGMLMMMSPSPRVYTLNNEKQWINKAVGDKLPECEAVCGKPKNPANPVQRILGGHLDAKGSFPWQAKMVSHHNLTTGATLINEQWLLTTAKNLFLNHSENATAKDIAPTLTLYVGKKQLVEIEKVVLHPNYSQVDIGLIKLKQKVSVNERVMPICLPSKDYAEVGRVGYVSGWGRNANFKFTDHLKYVMLPVADQDQCIRHYEGSTVPEKKTPKSPVGVQPILNEHTFCAGMSKYQEDTCYGDAGSAFAVHDLEEDTWYATGILSFDKSCAVAEYGVYVKVTSIQDWVQKTIAEN

SEQ ID NO: 7478 - protein, 259 aa, Homo sapiens
MLPSTSVNSLVQGNGVLNSRDAARHTAGAKRYKYLRRLFRFRQMDFEFAAWQMLYLFTSPQRVYRNFHYRKQTKDQWARDDPAFLVLLSIWLCVSTIGFGFVLDMGFFETIKLLLWVVLIDCVGVGLLIATLMWFISNKYLVKRQSRDYDVEWGYAFDVHLNAFYPLLVILHFIQLFFINHVILTDTFIGYLVGNTLWLVAVGYYIYVTFLGYSALPFLKNTVILLYPFAPLILLYGLSLALGWNFTHTLCSFYKYRVK

SEQ ID NO: 7479 - protein, 658 aa, Homo sapiens
MFVSYLILTLLHVQTAVLARPGGESIGCDDYLGSDKVVDKCGVCGGDNTGCQVVSGVFKHALTSLGYHRVVEIPEGATKINITEMYKSNNYLALRSRSGRSIINGNWAIDRPGKYEGGGTMFTYKRPNEISSTAGESFLAEGPTNEILDVYMIHQQPNPGVHYEYVIMGTNAISPQVPPHRRPGEPFNGQMVTEGRSQEEGEQKGRNEEKEDLRGEAPEMFTSESAQTFPVRHPDRFSPHRPDNLVPPAPQPPRRSRDHNWKQLGTTECSTTCGKGSQYPIFRCVHRSTHEEAPESYCDSSMKPTPEEEPCNIFPCPAFWDIGEWSECSKTCGLGMQHRQVLCRQVYANRSLTVQPYRCQHLEKPETTSTCQLKICSEWQIRTDWTSCSVPCGVGQRTRDVKCVSNIGDVVDDEECNMKLRPNDIENCDMGPCAKSWFLTEWSERCSAECGAGVRTRSVVCMTNHVSSLPLEGCGNNRPAEATPCDNGPCTGKVEWFAGSWSQCSIECGSGTQQREVICVRKNADTFEVLDPSECSFLEKPPSQQSCHLKPCGAKWFSTEWSMCSKSCQGGFRVREVRCLSDDMTLSNLCDPQLKPEERESCNPQDCVPEVDENCKDKYYNCNVVVQARLCVYNYYKTACCASCTRVANRQTGFLGSR

SEQ ID NO: 7480 - protein, 396 aa, Homo sapiens
MFLKAVVLTLALVAVAGARAEVSADQVATVMWDYFSQLSNNAKEAVEHLQKSELTQQLNALFQDKLGEVNTYAGDLQKKLVPFATELHERLAKDSEKLKEEIGKELEELRARLLPHANEVSQKIGDNLRELQQRLEPYADQLRTQVSTQAEQLRRQLTPYAQRMERVLRENADSLQASLRPHADELKAKIDQNVEELKGRLTPYADEFKVKIDQTVEELRRSLAPYAQDTQEKLNHQLEGLTFQMKKNAEELKARISASAEELRQRLAPLAEDVRGNLRGNTEGLQKSLAELGGHLDQQVEEFRRRVEPYGENFNKALVQQMEQLRQKLGPHAGDVEGHLSFLEKDLRDKVNSFFSTFKEKESQDKTLSLPELEQQQEQQQEQQQEQVQMLAPLES

SEQ ID NO: 7481 - protein, 926 aa, Homo sapiens
MDMFPLTWVFLALYFSRHQVRGQPDPPCGGRLNSKDAGYITSPGYPQDYPSHQNCEWIVYAPEPNQKIVLNFNPHFEIEKHDCKYDFIEIRDGDSESADLLGKHCGNIAPPTIISSGSMLYIKFTSDYARQGAGFSLRYEIFKTGSEDCSKNFTSPNGTIESPGFPEKYPHNLDCTFTILAKPKMEIILQFLIFDLEHDPLQVGEGDCKYDWLDIWDGIPHVGPLIGKYCGTKTPSELRSSTGILSLTFHTDMAVAKDGFSARYYLVHQEPLENFQCNVPLGMESGRIANEQISASSTYSDGRWTPQQSRLHGDDNGWTPNLDSNKEYLQVDLRFLTMLTAIATQGAISRETQNGYYVKSYKLEVSTNGEDWMVYRHGKNHKVFQANNDATEVVLNKLHAPLLTRFVRIRPQTWHSGIALRLELFGCRVTDAPCSNMLGMLSGLIADSQISASSTQEYLWSPSAARLVSSRSGWFPRIPQAQPGEEWLQVDLGTPKTVKGVIIQGARGGDSITAVEARAFVRKFKVSYSLNGKDWEYIQDPRTQQPKLFEGNMHYDTPDIRRFDPIPAQYVRVYPERWSPAGIGMRLEVLGCDWTDSKPTVETLGPTVKSEETTTPYPTEEEATECGENCSFEDDKDLQLPSGFNCNFDFLEEPCGWMYDHAKWLRTTWASSSSPNDRTFPDDRNFLRLQSDSQREGQYARLISPPVHLPRSPVCMEFQYQATGGRGVALQVVREASQESKLLWVIREDQGGEWKHGRIILPSYDMEYQIVFEGVIGKGRSGEIAIDDIRISTDVPLENCMEPISAFAVDIPEIHEREGYEDEIDDEYEVDWSNSSSATSGSGAPSTDKEKSWLYTLDPILITIIAMSSLGVLLGATCAGLLLYCTCSYSGLSSRSCTTLENYNFELYDGLKHKVKMNHQKCCSEA

SEQ ID NO: 7482 - protein, 89 aa, Homo sapiens
MASVSELACIYSALILHDDEVTVTALANVNIGSLICNVGAGGPAPAAGAAPAGGPAPSTAAAPAEEKKVEAKKEESEESDDDMGFGLFD

SEQ ID NO: 7483 - protein, 420 aa, Homo sapiens
METFDPTELPELLKLYYRRLFPYSQYYRWLNYGGVIKNYFQHREFSFTLKDDIYIRYQSFNNQSDLEKEMQKMNPYKIDIGAVYSHRPNQHNTVKLGAFQAQEKELVFDIDMTDYDDVRRCCSSADICPKCWTLMTMAIRIIDRALKEDFGFKHRLWVYSGRRGVHCWVCDESVRKLSSAVRSGIVEYLSLVKGGQDVKKKVHLSEKIHPFIRKSINIIKKYFEEYALVNQDILENKESWDKILALVPETIHDELQQSFQKSHNSLQRWEHLKKVASRYQNNIKNDKYGPWLEWEIMLQYCFPRLDINVSKGINHLLKSPFSVHPKTGRISVPIDLQKVDQFDPFTVPTISFICRELDAISTNEEEKEENEAESDVKHRTRDYKKTSLAPYVKVFEHFLENLDKSRKGELLKKSDLQKDF

SEQ ID NO: 7484 - protein, 238 aa, Homo sapiens
MALVPCQVLRMAILLSYCSILCNYKAIEMPSHQTYGGSWKFLTFIDLVIQAVFFGICVLTDLSSLLTRGSGNQEQERQLKKLISLRDWMLAVLAFPVGVFVVAVFWIIYAYDREMIYPKLLDNFIPGWLNHGMHTTVLPFILIEMRTSHHQYPSRSSGLTAICTFSVGYILWVCWVHHVTGMWVYPFLEHIGPGARIIFFGSTTILMNFLYLLGEVLNNYIWDTQKSMEEEKEKPKLE

SEQ ID NO: 7485 - protein, 449 aa, Homo sapiens
MVMEKPSPLLVGREFVRQYYTLLNKAPEYLHRFYGRNSSYVHGGVDASGKPQEAVYGQNDIHHKVLSLNFSECHTKIRHVDAHATLSDGVVVQVMGLLSNSGQPERKFMQTFVLAPEGSVPNKFYVHNDMFRYEDEVFGDSEPELDEESEDEVEEEQEERQPSPEPVQENANSGYYEAHPVTNGIEEPLEESSHEPEPEPESETKTEELKPQVEEKNLEELEEKSTTPPPAEPVSLPQEPPKPRVEAKPEVQSQPPRVREQRPRERPGFPPRGPRPGRGDMEQNDSDNRRIIRYPDSHQLFVGNLPHDIDENELKEFFMSFGNVVELRINTKGVGGKLPNFGFVVFDDSEPVQRILIAKPIMFRGEVRLNVEEKKTRAARERETRGGGDDRRDIRRNDRGPGGPRGIVGGGMMRDRDGRGPPPRGGMAQKLGSGRGTGQMEGRFTGQRR

SEQ ID NO: 7486 - protein, 384 aa, Homo sapiens
MLSAAHDILSHKRTSGNQSHVDPGPTPIPHNSSSRFDCNSVSTAAVLLADILPTLVIKLLAPLGLHLLPYSPRVLVSGICAAGSFVLVAFSHSVGTSLCGVVFASISSGLGEVTFLSLTAFYPRAVISWWSSGTGGAGLLGALSYLGLTQAGLSPQQTLLSMLGIPALLLASYFLLLTSPEAQDPGGEEEAESAARQPLIRTEAPESKPGSSSSLSLRERWTVFKGLLWYIVPLVVVYFAEYFINQGLFELLFFWNTSLSHAQQYRWYQMLYQAGVFASRSSLRCCRIRFTWALALLQCLNLVFLLADVWFGFLPSIYLVFLIILYEGLLGGAAYVNTFHNIALETSDEHREFAMAATCISDTLGISLSGLLALPLHDFLCQLS

SEQ ID NO: 7487 - protein, 149 aa, Homo sapiens
MASSDIQVKELEKRASGQAFELILSPRSKESVPEFPLSPPKKKDLSLEEIQKKLEAAEERRKSHEAEVLKQLAEKREHEKEVLQKAIEENNNFSKMAEEKLTHKMEANKENREAQMAAKLERLREKDKHIEEVRKNKESKDPADETEAD

SEQ ID NO: 7488 - protein, 2176 aa, Homo sapiens
MLRGPGPGLLLLAVQCLGTAVPSTGASKSKRQAQQMVQPQSPVAVSQSKPGCYDNGKHYQINQQWERTYLGNALVCTCYGGSRGFNCESKPEAEETCFDKYTGNTYRVGDTYERPKDSMIWDCTCIGAGRGRISCTIANRCHEGGQSYKIGDTWRRPHETGGYMLECVCLGNGKGEWTCKPIAEKCFDHAAGTSYVVGETWEKPYQGWMMVDCTCLGEGSGRITCTSRNRCNDQDTRTSYRIGDTWSKKDNRGNLLQCICTGNGRGEWKCERHTSVQTTSSGSGPFTDVRAAVYQPQPHPQPPPYGHCVTDSGVVYSVGMQWLKTQGNKQMLCTCLGNGVSCQETAVTQTYGGNSNGEPCVLPFTYNGRTFYSCTTEGRQDGHLWCSTTSNYEQDQKYSFCTDHTVLVQTRGGNSNGALCHFPFLYNNHNYTDCTSEGRRDNMKWCGTTQNYDADQKFGFCPMAAHEEICTTNEGVMYRIGDQWDKQHDMGHMMRCTCVGNGRGEWTCIAYSQLRDQCIVDDITYNVNDTFHKRHEEGHMLNCTCFGQGRGRWKCDPVDQCQDSETGTFYQIGDSWEKYVHGVRYQCYCYGRGIGEWHCQPLQTYPSSSGPVEVFITETPSQPNSHPIQWNAPQPSHISKYILRWRPKNSVGRWKEATIPGHLNSYTIKGLKPGVVYEGQLISIQQYGHQEVTRFDFTTTSTSTPVTSNTVTGETTPFSPLVATSESVTEITASSFVVSWVSASDTVSGFRVEYELSEEGDEPQYLDLPSTATSVNIPDLLPGRKYIVNVYQISEDGEQSLILSTSQTTAPDAPPDTTVDQVDDTSIVVRWSRPQAPITGYRIVYSPSVEGSSTELNLPETANSVTLSDLQPGVQYNITIYAVEENQESTPVVIQQETTGTPRSDTVPSPRDLQFVEVTDVKVTIMWTPPESAVTGYRVDVIPVNLPGEHGQRLPISRNTFAEVTGLSPGVTYYFKVFAVSHGRESKPLTAQQTTKLDAPTNLQFVNETDSTVLVRWTPPRAQITGYRLTVGLTRRGQPRQYNVGPSVSKYPLRNLQPASEYTVSLVAIKGNQESPKATGVFTTLQPGSSIPPYNTEVTETTIVITWTPAPRIGFKLGVRPSQGGEAPREVTSDSGSIVVSGLTPGVEYVYTIQVLRDGQERDAPIVNKVVTPLSPPTNLHLEANPDTGVLTVSWERSTTPDITGYRITTTPTNGQQGNSLEEVVHADQSSCTFDNLSPGLEYNVSVYTVKDDKESVPISDTIIPAVPPPTDLRFTNIGPDTMRVTWAPPPSIDLTNFLVRYSPVKNEEDVAELSISPSDNAVVLTNLLPGTEYVVSVSSVYEQHESTPLRGRQKTGLDSPTGIDFSDITANSFTVHWIAPRATITGYRIRHHPEHFSGRPREDRVPHSRNSITLTNLTPGTEYVVSIVALNGREESPLLIGQQSTVSDVPRDLEVVAATPTSLLISWDAPAVTVRYYRITYGETGGNSPVQEFTVPGSKSTATISGLKPGVDYTITVYAVTGRGDSPASSKPISINYRTEIDKPSQMQVTDVQDNSISVKWLPSSSPVTGYRVTTTPKNGPGPTKTKTAGPDQTEMTIEGLQPTVEYVVSVYAQNPSGESQPLVQTAVTTIPAPTDLKFTQVTPTSLSAQWTPPNVQLTGYRVRVTPKEKTGPMKEINLAPDSSSVVVSGLMVATKYEVSVYALKDTLTSRPAQGVVTTLENVSPPRRARVTDATETTITISWRTKTETITGFQVDAVPANGQTPIQRTIKPDVRSYTITGLQPGTDYKIYLYTLNDNARSSPVVIDASTAIDAPSNLRFLATTPNSLLVSWQPPRARITGYIIKYEKPGSPPREVVPRPRPGVTEATITGLEPGTEYTIYVIALKNNQKSEPLIGRKKTGQEALSQTTISWAPFQDTSEYIISCHPVGTDEEPLQFRVPGTSTSATLTGLTRGATYNVIVEALKDQQRHKVREEVVTVGNSVNEGLNQPTDDSCFDPYTVSHYAVGDEWERMSESGFKLLCQCLGFGSGHFRCDSSRWCHDNGVNYKIGEKWDRQGENGQMMSCTCLGNGKGEFKCDPHEATCYDDGKTYHVGEQWQKEYLGAICSCTCFGGQRGWRCDNCRRPGGEPSPEGTTGQSYNQYSQRYHQRTNTNVNCPIECFMPLDVQADREDSRE

SEQ ID NO: 7489 - protein, 770 aa, Homo sapiens
MPASAARPRPGPGQPTASPFPLLLLAVLSGPVSGRVPRSVPRTSLPISEADSCLTRFAVPHTYNYSVLLVDPASHTLYVGARDTIFALSLPFSGERPRRIDWMVPEAHRQNCRKKGKKEDECHNFVQILAIANASHLLTCGTFAFDPKCGVIDVSRFQQVERLESGRGKCPFEPAQRSAAVMAGGVLYAATVKNYLGTEPIITRAVGRAEDWIRTDTLPSWLNAPAFVAAVALSPAEWGDEDGDDEIYFFFTETSRAFDSYERIKVPRVARVCAGDLGGRKTLQQRWTTFLKADLLCPGPEHGRASSVLQDVAVLRPELGAGTPIFYGIFSSQWEGATISAVCAFRPQDIRTVLNGPFRELKHDCNRGLPVVDNDVPQPRPGECITNNMKLRHFGSSLSLPDRVLTFIRDHPLMDRPVFPADGHPLLVTTDTAYLRVVAHRVTSLSGKEYDVLYLGTEDGHLHRAVRIGAQLSVLEDLALFPEPQPVENMKLYHSWLLVGSRTEVTQVNTTNCGRLQSCSECILAQDPVCAWSFRLDECVAHAGEHRGLVQDIESADVSSLCPKEPGERPVVFEVPVATAAHVVLPCSPSSAWASCVWHQPSGVTALTPRRDGLEVVVTPGAMGAYACECQEGGAAHVVAAYSLVWGSQRDAPSRAHTVGAGLAGFFLGILAASLTLILIGRRQQRRRQRELLARDKVGLDLGAPPSGTTSYSQDPPSPSPEDERLPLALAKRGSGFGGFSPPFLLDPCPSPAHIRLTGAPLATCDETSI

SEQ ID NO: 7490 - protein, 751 aa, Homo sapiens
MLPGLALLLLAAWTARALEVPTDGNAGLLAEPQIAMFCGRLNMHMNVQNGKWDSDPSGTKTCIDTKEGILQYCQEVYPELQITNVVEANQPVTIQNWCKRGRKQCKTHPHFVIPYRCLVGEFVSDALLVPDKCKFLHQERMDVCETHLHWHTVAKETCSEKSTNLHDYGMLLPCGIDKFRGVEFVCCPLAEESDNVDSADAEEDDSDVWWGGADTDYADGSEDKVVEVAEEEEVAEVEEEEADDDEDDEDGDEVEEEAEEPYEEATERTTSIATTTTTTTESVEEVVREVCSEQAETGPCRAMISRWYFDVTEGKCAPFFYGGCGGNRNNFDTEEYCMAVCGSAIPTTAASTPDAVDKYLETPGDENEHAHFQKAKERLEAKHRERMSQVMREWEEAERQAKNLPKADKKAVIQHFQEKVESLEQEAANERQQLVETHMARVEAMLNDRRRLALENYITALQAVPPRPRHVFNMLKKYVRAEQKDRQHTLKHFEHVRMVDPKKAAQIRSQVMTHLRVIYERMNQSLSLLYNVPAVAEEIQDEVDELLQKEQNYSDDVLANMISEPRISYGNDALMPSLTETKTTVELLPVNGEFSLDDLQPWHSFGADSVPANTENEVEPVDARPAADRGLTTRPGSGLTNIKTEEISEVKMDAEFRHDSGYEVHHQKLVFFAEDVGSNKGAIIGLMVGGVVIATVIVITLVMLKKKQYTSIHHGVVEVDAAVTPEERHLSKMQQNGYENPTYKFFEQMQN

SEQ ID NO: 7491 - protein, 1015 aa, Homo sapiens
MPRATALGALVSLLLLLPLPRGAGGLGERPDATADYSELDGEEGTEQQLEHYHDPCKAAVFWGDIALDEDDLKLFHIDKARDWTKQTVGATGHSTGGLEEQASESSPDTTAMDTGTKEAGKDGRENTTLLHSPGTLHAAAKTFSPRVRRATTSRTERIWPGGVIPYVIGGNFTGSQRAIFKQAMRHWEKHTCVTFIERTDEESFIVFSYRTCGCCSYVGRRGGGPQAISIGKNCDKFGIVAHELGHVVGFWHEHTRPDRDQHVTIIRENIQPGQEYNFLKMEAGEVSSLGETYDFDSIMHYARNTFSRGVFLDTILPRQDDNGVRPTIGQRVRLSQGDIAQARKLYKCPACGETLQDTTGNFSAPGFPNGYPSYSHCVWRISVTPGEKIVLNFTSMDLFKSRLCWYDYVEVRDGYWRKAPLLGRFCGDKIPEPLVSTDSRLWVEFRSSSNILGKGFFAAYEATCGGDMNKDAGQIQSPNYPDDYRPSKECVWRITVSEGFHVGLTFQAFEIERHDSCAYDYLEVRDGPTEESALIGHFCGYEKPEDVKSSSNRLWMKFVSDGSINKAGFAANFFKEVDECSWPDHGGCEHRCVNTLGSYKCACDPGYELAADKKMCEVACGGFITKLNGTITSPGWPKEYPTNKNCVWQVVAPAQYRISLQFEVFELEGNDVCKYDFVEVRSGLSPDAKLHGRFCGSETPEVITSQSNNMRVEFKSDNTVSKRGFRAHFFSDKDECAKDNGGCQHECVNTFGSYLCRCRNGYWLHENGHDCKEAGCAHKISSVEGTLASPNWPDKYPSRRECTWNISSTAGHRVKLTFNEFEIEQHQECAYDHLEMYDGPDSLAPILGRFCGSKKPDPTVASGSSMFLRFYSDASVQRKGFQAVHSTECGGRLKAEVQTKELYSHAQFGDNNYPSEARCDWVIVAEDGYGVELTFRTFEVEEEADCGYDYMEAYDGYDSSAPRLGRFCGSGPLEEIYSAGDSLMIRFRTDDTINKKGFHARYTSTKFQDALHMKK

SEQ ID NO: 7492 - protein, 236 aa, Homo sapiens [sequence omitted]

SEQ ID NO: 7493 - protein, 431 aa, Homo sapiens
MDSAITLWQFLLQLLQKPQNKHMICWTSNDGQFKLLQAEEVARLWGIRKNKPNMNYDKLSRALRYYYVKNIIKKVNGQKFVYKFVSYPEILNMDPMTVGRIEGDCESLNFSEVSSSSKDVENGGKDKPPQPGAKTSSRNDYIHSGLYSSFTLNSLNSSNVKLFKLIKTENPAEKLAEKKSPQEPTPSVIKFVTTPSKKPPVEPVAATISIGPSISPSSEETIQALETLVSPKLPSLEAPTSASNVMTAFATTPPISSIPPLQEPPRTPSPPLSSHPDIDTDIDSVASQPMELPENLSLEPKDQDSVLLEKDKVNNSSRSKKPKGLELAPTLVITSSDPSPLGILSPSLPTASLTPAFFSQTPIILTPSPLLSSIHFWSTLSPVAPLSPARLQGANTLFQFPSVLNSHGPFTLSGLDGPSTPGPFSPDLQKT

SEQ ID NO: 7494 - protein, 938 aa, Homo sapiens
MLWPRLAAAEWAALAWELLGASVLLIAVRWLVRRLGPRPGGLGRSGTPVPPPSAAAAPASGEMTMDALLARLKLLNPDDLREEIVKAGLKCGPITSTTRFIFEKKLAQALLEQGGRLSSFYHHEAGVTALSQDPQRILKPAEGNPTDQAGFSEDRDFGYSVGLNPPEEEAVTSKTCSVPPSDTDTYRAGATASKEPPLYYGVCPVYEDVPARNERIYVYENKKEALQAVKMIKGSRFKAFSTREDAEKFARGICDYFPSPSKTSLPLSPVKTAPLFSNDRLKDGLCLSESETVNKERANSYKNPRTQDLTAKLRKAVEKGEEDTFSDLIWSNPRYLIGSGDNPTIVQEGCRYNVMHVAAKENQASICQLTLDVLENPDFMRLMYPDDDEAMLQKRIRYVVDLYLNTPDKMGYDTPLHFACKFGNADVVNVLSSHHLIVKNSRNKYDKTPEDVICERSKNKSVELKERIREYLKGHYYVPLLRAEETSSPVIGELWSPDQTAEASHVSRYGGSPRDPVLTLRAFAGPLSPAKAEDFRKLWKTPPREKAGFLHHVKKSDPERGFERVGRELAHELGYPWVEYWEFLGCFVDLSSQEGLQRLEEYLTQQEIGKKAQQETGEREASCRDKATTSGSNSISVRAFLDEDDMSLEEIKNRQNAARNNSPPTVGAFGHTRCSAFPLEQEADLIEAAEPGGPHSSRNGLCHPLNHSRTLAGKRPKAPRGEEAHLPPVSDLTVEFDKLNLQNIGRSVSKTPDESTKTKDQILTSRINAVERDLLEPSPADQLGNGHRRTESEMSARIAKMSLSPSSPRHEDQLEVTREPARRLFLFGEEPSKLDQDVLAALECADVDPHQFPAVHRWKSAVLCYSPSDRQSWPSPAVKGRFKSQLPDLSGPHSYSPGRNSVAGSNPAKPGLGSPGRYSPVHGSQLRRMARLAELAAL

SEQ ID NO: 7495 - protein, 185 aa, Homo sapiens
MKMFESADSTATRSGQDLWAEICSCLPNPEQEDGANNAFSDSFVDSCPEGEGQREVADFAVQPAVKPWAPLQDSEVYLASLEKKLRRIKGLNQEVTSKDMLRTLAQAKKECWDRFLQEKLASEFFVDGLDSDESTLEHFKRWLQPDKVAVSTEEVQYLIPPESQVEKPVAEDEPAAGDKPAAAEQ

SEQ ID NO: 7496 - protein, 455 aa, Homo sapiens
MAAPEEHDSPTEASQPIVEEEETKTFKDLGVTDVLCEACDQLGWTKPTKIQIEAIPLALQGRDIIGLAETGSGKTGAFALPILNALLETPQRLFALVLTPTRELAFQISEQFEALGSSIGVQSAVIVGGIDSMSQSLALAKKPHIIIATPGRLIDHLENTKGFNLRALKYLVMDEADRILNMDFETEVDKILKVIPRDRKTFLFSATMTKKVQKLQRAALKNPVKCAVSSKYQTVEKLQQYYIFIPSKFKDTYLVYILNELAGNSFMIFCSTCNNTQRTALLLRNLGFTAIPLHGQMSQSKRLGSLNKFKAKARSILLATDVASRGLDIPHVDVVVNFDIPTHSKDYIHRVGRTARAGRSGKAITFVTQYDVELFQRIEHLIGKKLPGFPTQDDEVMMLTERVAEAQRFARMELREHGEKKKRSREDAGDNDDTEGAIGVRNKVAGGKMKKRKGR

SEQ ID NO: 7497 - protein, 312 aa, Homo sapiens
MANNDAVLKRLEQKGAEADQIIEYLKQQVSLLKEKAILQATLREEKKLRVENAKLKKEIEELKQELIQAEIQNGVKQIPFPSGTPLHANSMVSENVIQSTAVTTVSSGTKEQIKGGTGDEKKAKEKIEKKGEKKEKKQQSIAGSADSKPIDVSRLDLRIGCIITARKHPDADSLYVEEVDVGEIAPRTVVSGLVNHVPLEQMQNRMVILLCNLKPAKMRGVLSQAMVMCASSPEKIEILAPPNGSVPGDRITFDAFPGEPDKELNPKKKIWEQIQPDLHTNDECVATYKGVPFEVKGKGVCRAQTMSNSGIK

SEQ ID NO: 7498 - protein, 203 aa, Homo sapiens
MTQDRPLLAVQEALKKCFPVVEEQQGLWQSALRDCQPLLSSLSNLAEQLQAAQNLRFEDVPALRAFPDLKERLRRKQLVAGDIVLDKLGERLAILLKVRDMVSSHVERVFQIYEQHADTVGIDAVLQPSAVSPSVADMLEWLQDIERHYRKSYLKRKYLLSSIQWGDLANIQALPKAWDRISKDEHQDLVQDILLNVSFFLEE

SEQ ID NO: 7499 - protein, 409 aa, Homo sapiens
MQVTLKTLQQQTFKIDIDPEETVKALKEKIESEKGKDAFPVAGQKLIYAGKILNDDTALKEYKIDEKNFVVVMVTKPKAVSTPAPATTQQSAPASTTAVTSSTTTTVAQAPTPVPALAPTSTPASITPASATASSEPAPASAAKQEKPAEKPAETPVATSPTATDSTSGDSSRSNLFEDATSALVTGQSYENMVTEIMSMGYEREQVIAALRASFNNPDRAVEYLLMGIPGDRESQAVVDPPQAASTGAPQSSAVAAAAATTTATTTTTSSGGHPLEFLRNQPQFQQMRQIIQQNPSLLPALLQQIGRENPQLLQQISQHQEHFIQMLNEPVQEAGGQGGGGGGGSGGIAEAGSGHMNYIQVTPQEKEAIERLKALGFPEGLVIQAYFACEKNENLAANFLLQQNFDED

SEQ ID NO: 7500 - protein, 6907 aa, Homo sapiens
MASSPELPTEDEQGSWGIDDLHISLQAEQEDTQKKAFTCWINSQLARHTSPSVISDLFTDIKKGHVLLDLLEVLSGQQLPRDKGSNTFQCRINIEHALTFLRNRSIKLINIHVTDIIDGNPSIILGLIWTIILHFHIEKLAQTLSCNYNQPSLDDVSVVDSSPASSPPAKKCSKVQARWQMSARKALLLWAQEQCATYESVNVTDFKSSWRNGMAFLAIIHALRPDLIDMKSVKHRSNKDNLREAFRIAEQELKIPRLLEPEDVDVVDPDEKSIMTYVAQFLQYSKDAPGTGEEAQGKVKDAMGWLTLQKEKLQKLLKDSENDTYFKKYNSLLSFMESFNEEKKSFLDVLSIKRDLDELDKDHLQLREAWDGLDHQINAWKIKLNYALPPPLHQTEAWLQEVEELMDEDLSASQDHSQAVTLIQEKMTLFKSLMDRFEHHSNILLTFENKDENHLPLVPPNKLEEMKRRINNILEKKFILLLEFHYYKCLVLGLVDEVKSKLDIWNIKYGSRESVELLLEDWHKFIEEKEFLARLDTSFQKCGEIYKNLAGECQNINKQYMMVKSDVCMYRKNIYNVKSTLQKVLACWATYVENLRLLRACFEETKKEEIKEVPFETLAQWNLEHATLNEAGNFLVEVSNDVVGSSISKELRRLNKRWRKLVSKTQLEMNLPLMIKKQDQPTFDNSGNILSKEEKATVEFSTDMSVELPENYNQNIKAGEKHEKENEEFTGQLKVAKDVEKLIGQVEIWEAEAKSVLDQDDVDTSMEESLKHLIAKGSMFDELMARSEDMLQMDIQNISSQESFQHVLTTGLQAKIQEAKEKVQINVVKLIAALKNLTDVSPDLDIRLKMEESQKELESYMMRAQQLLGQRESPGELISKHKEALIISNTKSLAKYLKAVEELKNNVTEDIKMSLEEKSRDVCAKWESLHHELSLYVQQLKIDIEKGKLSDNILKLEKQINKEKKLIRRGRTKGLIKEHEACFSEEGCLYQLNHHMEVLRELCEELPSQKSQQEVKRLLKDYEQKIERLLKCASEIHMTLQPTAGGTSKNEGTITTSENRGGDPHSEAPFAKSDNQPSTEKAMEPTMKFSLASVLRPLQEESIMEKDYSASINSLLERYDTYRDILEHHLQNNKFRITSDFSSEEDRSSSCLQAKLTDLQVIKNETDARWKEFEIISLKLENHVNDIKKPFVIKERDTLKERERELQMTLNTRMESLETALRLVLPVEKASLLLCGSDLPLHKMAIQGFHLIDADRIYQHLRNIQDSIAKQIEICNRLEEPGNFVLKELHPFDLHAMQNIILKYKTQFEGMNHRVQRSEDTLKALEDFLASLRTAKLSAEPVTDLSASDTQVAQENTLTVKNKEGEIHLMKDKAKHLDKCLKMLDMSFKDAERGDDTSCENLLDAFSIKLSETHGYGVQEEFTEENKLLEACIFKNNELLKNIQDVQSQISKIGLKDPTVPAVKHRKKSLIRLDKVLDEYEEEKRHLQEMANSLPHFKDGREKTVNQQCQNTVVLWENTKALVTECLEQCGRVLELLKQYQNFKSILTTLIQKEESVISLQASYMGKENLKKRIAEIEIVKEEFNEHLEVVDKINQVCKNLQFYLNKMKTFEEPPFEKEANIIVDRWLDINEKTEDYYENLGRALALWDKLFNLKNVIDEWTEKALQKMELHQLTEEDRERLKEELQVHEQKTSEFSRRVAEIQFLLQSSEIPLELQVMESSILNKMEHVQKCLTGESNCHALSGSTAELREDLDQAKTQIGMTESLLKALSPSDSLEIFTKLEEIQQQILQQKHSMILLENQIGCLTPELSELKKQYESVSDLFNTKKSVLQDHFSKLLNDQCKNFNDWFSNIKVNLKECFESSETKKSVEQKLQKLSDFLTLEGRNSKIKQVDSVLKHVKKHLPKAHVKELISWLVGQEFELEKMESICQARAKELEDSLQQLLRLQDDHRNLRKWLTNQEEKWKGMEEPGEKTELFCQALARKREQFESVAQLNNSLKEYGFTEEEEIIMEATCLMDRYQTLLRQLSEIEEEDKLLPTEDQSFNDLAHDVIHWIKEIKESLMVLNSSEGKMPLEERIQKIKEIILLKPEGDARIETIMKQAESSEAPLVQKTLTDISNQWDNTLHLASTYLSHQEKLLLEGEKYLQSKEDLRLMLIELKKKQEAGFALQHGLQEKKAQLKIYKKFLKKAQDLTSLLKELKSQGNYLLECTKNPSFSEEPWLEIKHLHESLLQQLQDSVQNLDGHVREHDSYQVCVTDLNTTLDNFSKEFVSFSDKPVDQIAVEEKLQKLQELENRLSLQDGTLKKILALAKSVKQNTSSVGQKIIKDDIKSLQCKQKDLENRLASAKQEMECCLNSILKSKRSTEKKGKFTLPGREKQATSDVQESTQESAAVEKLEEDWEINKDSAVEMAMSKQLSLNAQESMKNTEDERKVNELQNQPLELDTMLRNEQLEEIEKLYTQLEAKKAAIKPLEQTECLNKTETGALVLHNIGYSAQHLDNLLQALITLKKNKESQYCVLRDFQEYLAAVESSMKALLTDKESLKVGPLDSVTYLDKIKKFIASIEKEKDSLGNLKIKWENLSNHVTDMDKKLLESQIKQLEHGWEQVEQQIQKKYSQQVVEYDEFTTLMNKVQDTEISLQQQQQHLQLRLKSPEERAGNQSMIALTTDLQATKHGFSVLKGQAELQMKRIWGEKEKKNLEDGINNLKKQWETLEPLHLEAENQIKKCDIRNKMKETILWAKNLLGELNPSIPLLPDDILSQIRKCKVTHDGILARQQSVESLAEEVKDKVPSLTTYEGSDLNNTLEDLRNQYQMLVLKSTQRSQQLEFKLEERSNFFAIIRKFQLMVQESETLIIPRVETAATEAELKHHHVTLEASQKELQEIDSGISTHLQELTNIYEELNVFERLFLEDQLKNLKIRTNRIQRFIQNTCNEVEHKIKFCRQFHEKTSALQEEADSIQRNELLLNQEVNKGVKEEIYNLKDRLTAIKCCILQVLKLKKVFDYIGLNWDFSQLDQLQTQVFEKEKELEEKIKQLDTFEEEHGKYQALLSKMRAIDLQIKKMTEVVLKAPDSSPESRRLNAQILSQRIEKAKCLCDEIIKKLNENKTFDDSFKEKEILQIKLNAEENDKLYKVLQNMVLELSPKELDEKNCQDKLETSLHVLNQIKSQLQQPLLINLEIKHIQNEKDNCEAFQEQVWAEMCSIKAVTAIEKQREENSSEASDVETKLREFEDLQMQLNTSIDLRTNVLNDAYENLTRYKEAVTRAVESITSLEAIIIPYRVDVGNPEESLEMPLRKQEELESTVAHIQDLTEKLGMISSPEAKLQLQYTLQELVSKNSAMKEAFKAQETEAERYLENYKCYRKMEEDIYTNLSKMETVLGQSMSSLPLSYREALERLEQSKALVSNLISTKEELMKLRQILRLLRLRCTENDGICLLKIVSALWEKWLSLLEAAKEWEMWCEELKQEWKFVSEEIEREAIILDNLQEELPEISKTKEAATTEELSELLDCLCQYGENVEKQQLLLTLLLQRIRSIQNVPESSGAVETVPAFQEITSMKERCNKLLQKVQKNKELVQTEIQERHSFTKEIIALKNFFQQTTTSFQNMAFQDHPEKSEQFEELQSILKKGKLTFENIMEKLRIKYSEMYTIVPAEIESQVEECRKALEDIDEKISNEVLKSSPSYAMRRKIEEINNGLHNVEKMLQQKSKNIEKAQEIQKKMWDELDLWHSKLNELDSEVQDIVEQDPGQAQEWMDNLMIPFQQYQQVSQRAECRTSQLNKATVKMEEYSDLLKSTEAWIENTSHLLANPADYDSLRTLSHHASTVQMALEDSEQKHNLLHSIFMDLEDLSIIFETDELTQSIQELSNQVTALQQKIMESLPQIQRMADDVVAIESEVKSMEKRVSKIKTILLSKEIFDFSPEEHLKHGEVILENIRPMKKTIAEIVSYQVELRLPQTGMKPLPVFQRTNQLLQDIKLLENVTQEQNELLKVVIKQTNEWDEEIENLKQILNNYSAQFSLEHMSPDQADKLPQLQGEIERMEKQILSLNQRKEDLLVDLKATVLNLHQHLKQEQEGVERDRLPAVTSEEGGVAERDASERKLNRRGSMSYLAAVEEEVEESSVKSDNGDEKAEPSPQSWSSLWKHDKDMEEDRASSSSGTIVQEAYGKISTSDNSMAQILTPDSLNTEQGPECSLRPNQTEEGTTPPIEADTLDSSDAQGGLEPRVEKTRPEPTEVLHACKTQVAELELWLQQANVAVEPETLNADMQQVLEQQLVGCQAMLTEIEHKVAFLLETCKDQGLGDNGATQHEAEALSLKLKTVKCNLEKVQMMLQEKHSEDQHPTILKKSSEPEHQEALQPVNLSELESIVTERPQFSRQKDFQQQQVLELKPMEQKDFIKFIEFNAKKMWPQYCQHDNDTTQESSASNQASSPENDVPDSILSPQGQNGDKWQYLHHELSSKIKLPLPQLVEPQVSTNMGILPSVTMYNFRYPTTEELKTYTTQLEDLRQEASNLQTQENMTEEAYINLDKKLFELFLTLSQCLSSVEEMLEMPRLYREDGSGQQVHYETLALELKKLYLALSDKKGDLLKAMTWPGENTNLLLECFDNLQVCLEHTQAAAVCRSKSLKAGLDYNRSYQNEIKRLYHQLIKSKTSLQQSLNEISGQSVAEQLQKADAYTVELENAESRVAKLRDEGERLHLPYALLQEVYKLEDVLDSMWGMLRARYTELSSPFVTESQQDALLQGMVELVKIGKEKLAHGHLKQTKSKVALQAQIENHKVFFQKLVADMLLIQAYSAKILPSLLQNRETFWAEQVTEVKILEEKSRQCGMKLQSLLQKWEEFDENYASLEKDLEILISTLPSVSLVEETEERLVERISFYQQIKRNIGGKHARLYQTLNEGKQLVASVSCPELEGQIAKLEEQWLSLNKKIDHELHRLQALLKHLLSYNRDSDQLTKWLESSQHTLNYWKEQSLNVSQDLDTIRSNINNFFEFSKEVDEKSSLKTAVISIGNQLLHLKETDTATLRASLAQFEQKWTMLITQLPDIQEKLHQLQMEKLPSRKAITEMISWMNNVEHQTSDEDSVHSPSSASQVKHLLQKHKEFRMEMDYKQWIVDFVNQSLLQLSTCDVESKRYERTEFAEHLGEMNRQWHRVHGMLNRKIQHLEQLLESITESENKIQILNNWLEAQEERLKTLQKPESVISVQKLLLDCQDIENQLAIKSKALDELKQSYLTLESGAVPLLEDTASRIDELFQKRSSVLTQVNQLKTSMQSVLQEWKIYDQLYDEVNMMTIRFWYCMEHSKPVVLSLETLRCQVENLQSLQDEAESSEGSWEKLQEVIGKLKGLCPSVAEIIEEKCQNTHKRWTQVNQAIADQLQKAQSLLQLWKAYSNAHGEAAARLKQQEAKFQQLANISMSGNNLAEILPPALQDIKELQHDVQKTKEAFLQNSSVLDRLPQPAESSTHMLLPGPLHSLQRAAYLEKMLLVKANEFEFVLSQFKDFGVRLESLKGLIMHEEENLDRLHQQEKENPDSFLNHVLALTAQSPDIEHLNEVSLKLPLSDVAVKTLQNMNRQWIRATATALERCSELQGIGLNEKFLYCCEKWIQLLEKIEEALKVDVANSLPELLEQQKTYKMLEAEVSINQTIADSYVTQSLQLLDTTEIENRPEFITEFSKLTDRWQNAVQGVRQRKGDVDGLVRQWQDFTTSVENLFRFLTDTSHLLSAVKGQERFSLYQTRSLIHELKNKEIHFQRRRTTCALTLEAGEKLLLTTDLKTKESVGRRISQLQDSWKDMEPQLAEMIKQFQSTVETWDQCEKKIKELKSRLQVLKAQSEDPLPELHEDLHNEKELIKELEQSLASWTQNLKELQTMKADLTRHVLVEDVMVLKEQIEHLHRQWEDLCLRVAIRKQEIEDRLNTWVVFNEKNKELCAWLVQMENKVLQTADISIEEMIEKLQKDCMEEINLFSENKLQLKQMGDQLIKASNKSRAAEIDDKLNKINDRWQHLFDVIGSRVKKLKETFAFIQQLDKNMSNLRTWLARIESELSKPVVYDVCDDQEIQKRLAEQQDLQRDIEQHSAGVESVFNICDVLLHDSDACANETECDSIQQTTRSLDRRWRNICAMSMERRMKIEETWRLWQKFLDDYSRFEDWLKSAERTAACPNSSEVLYTSAKEELKRFEAFQRQIHERLTQLELINKQYRRLARENRTDTASRLKQMVHEGNQRWDNLQRRVTAVLRRLRHFTNQREEFEGTRESILVWLTEMDLQLTNVEHFSESDADDKMRQLNGFQQEITLNTNKIDQLIVFGEQLIQKSEPLDAVLIEDELEELHRYCQEVFGRVSRFHRRLTSCTPGLEDEKEASENETDMEDPREIQTDSWRKRGESEEPSSPQSLCHLVAPGHERSGCETPVSVDSIPLEWDHTGDVGGSSSHEEDEEGPYYSALSDVEIPENPEAYLKMTTKTLKASSGKSISDGHSWHVPDSPSCPEHHYKQMEGDRNVPPVPPASSTPYKPPYGKLLLPPGTDGGKEGPRVLNGNPQQEDGGLAGITEQQSGAFDRWEMIQAQELHNKLKIKQNLQQLNSDISAITTWLKKTEAELEMLKMAKPPSDIQEIELRVKRLQEILKAFDTYKALVVSVNVSSKEFLQTESPESTELQSRLRQLSLLWEAAQGAVDSWRGGLRQSLMQCQDFHQLSQNLLLWLASAKNRRQKAHVTDPKADPRALLECRRELMQLEKELVERQPQVDMLQEISNSLLIKGHGEDCIEAEEKVHVIEKKLKQLREQVSQDLMALQGTQNPASPLPSFDEVDSGDQPPATSVPAPRAKFRAVRTTEGEEETESRVPGSTRPQRSFLSRVVRAALPLQLLLLLLLLLACLLPSSEEDYSCTQANNFARSFYPMLRYTNGPPPT

SEQ ID NO: 7501 - protein, 575 aa, Homo sapiens
MADRGGVGEAAAVGASPASVPGLNPTLGWRERLRAGLAGTGASLWFVAGLGLLYALRIPLRLCENLAAVTVFLNSLTPKFYVALTGTSSLISGLIFIFEWWYFHKHGTSFIEQVSVSHLQPLMGGTESSISEPGSPSRNRENETSRQNLSECKVWRNPLNLFRGAEYRRYTWVTGKEPLTYYDMNLSAQDHQTFFTCDTDFLRPSDTVMQKAWRERNPPARIKAAYQALELNNDCATAYVLLAEEEATTIVDAERLFKQALKAGETIYRQSQQCQHQSPQHEAQLRRDTNVLVYIKRRLAMCARKLGRIREAVKIMRDLMKEFPPLTMLNIHENLLESLLELQAYPDVQAVLAKYDDISLPKSAAICYTAALLKTRTVSEKFSPETASRRGLSTAEINAVEAIHRAVEFNPHVPKYLLEMKSLILPPEHILKRGDSEAIAYAFFHLQHWKRIEGALNLLQCTWEGTFRMIPYPLEKGHLFYPYPSCTETADRELLPTFHHVSVYPKKELPLFIHFTAGFCSSTAMIAILTHQFPEIMGIFAKAVLGLWCPQPWASSGFEENTQDLKSEDLGLSSG

SEQ ID NO: 7502 - protein, 223 aa, Homo sapiens
MWDLVLSIALSVGCTGAVPLIQSRIVGGWECEKHSQPWQVAVYSHGWAHCGGVLVHPQWVLTAAHCLKKNSQVWLGRHNLFEPEDTGQRVPVSHSFPHPLYNMSLLKHQSLRPDEDSSHDLMLLRLSEPAKITDVVKVLGLPTQEPALGTTCYASGWGSIEPEEFLRPRSLQCVSLHLLSNDMCARAYSEKVTEFMLCAGLWTGGKDTCGVSHPYSQHLEGKG

SEQ ID NO: 7503 - protein, 142 aa, Homo sapiens
MSESLVVCDVAEDLVEKLRKFRFRKETNNAAIIMKIDKDKRLVVLDEELEGISPDELKDELPERQPRFIVYSYKYQHDDGRVSYPLCFIFSSPVGCKPEQQMMYAGSKNKLVQTAELTKVFEIRNTEDLTEEWLREKLGFFH

SEQ ID NO: 7504 - protein, 103 aa, Homo sapiens [sequence omitted]

SEQ ID NO: 7505 - protein, 1011 aa, Homo sapiens
MRVFLLCAYILLLMVSQLRAVSFPEDDEPLNTVDYHYSRQYPVFRGRPSGNESQHRLDFQLMLKIRDTLYIAGRDQVYTVNLNEMPKTEVIPNKKLTWRSRQQDRENCAMKGKHKDECHNFIKVFVPRNDEMVFVCGTNAFNPMCRYYRLSTLEYDGEEISGLARCPFDARQTNVALFADGKLYSATVADFLASDAVIYRSMGDGSALRTIKYDSKWIKEPHFLHAIEYGNYVYFFFREIAVEHNNLGKAVYSRVARICKNDMGGSQRVLEKHWTSFLKARLNCSVPGDSFFYFDVLQSITDIIQINGIPTVVGVFTTQLNSIPGSAVCAFSMDDIEKVFKGRFKEQKTPDSVWTAVPEDKVPKPRPGCCAKHGLAEAYKTSIDFPDETLSFIKSHPLMDSAVPPIADEPWFTKTRVRYRLTAISVDHSAGPYQNYTVIFVGSEAGMVLKVLAKTSPFSLNDSVLLEEIEAYNHAKCSAENEEDKKVISLQLDKDHHALYVAFSSCIIRIPLSRCERYGSCKKSCIASRDPYCGWLSQGSCGRVTPGMLLLTEDFFAFHNHSAEGYEQDTEFGNTAHLGDCHGVRWEVQSGESNQMVHMNVLITCVFAAFVLGAFIAGVAVYCYRDMFVRKNRKIHKDAESAQSCTDSSGSFAKLNGLFDSPVKEYQQNIDSPKLYSNLLTSRKELPPNGDTKSMVMDHRGQPPELAALPTPESTPVLHQKTLQAMKSHSEKAHGHGASRKETPQFFPSSPPPHSPLSHGHIPSAIVLPNATHDYNTSFSNSNAHKAEKKLQNIDHPLTKSSSKRDHRRSVDSRNTLNDLLKHLNDPNSNPKAIMGDIQMAHQNLMLDPMGSMSEVPPKVPNREASLYSPPSTLPRNSPTKRVDVPTTPGVPMTSLERQRGYHKNSSQRHSISAMPKNLNSPNGVLLSRQPSMNRGGYMPTPTGAKVDYIQGTPVSVHLQPSLSRQSSYTSNGTLPRTGLKRTPSLKPDVPPKPSFVPQTPSVRPLNKYTY

SEQ ID NO: 7506 - protein, 1430 aa, Homo sapiens
MTVFRQENVDDYYDTGEELGSGQFAVVKKCREKSTGLQYAAKFIKKRRTKSSRRGVSREDIEREVSILKEIQHPNVITLHEVYENKTDVILILELVAGGELFDFLAEKESLTEEEATEFLKQILNGVYYLHSLQIAHFDLKPENIMLLDRNVPKPRIKIIDFGLAHKIDFGNEFKNIFGTPEFVAPEIVNYEPLGLEADMWSIGVITYILLSGASPFLGDTKQETLANVSAVNYEFEDEYFSNTSALAKDFIRRLLVKDPKKRMTIQDSLQHPWIKPKDTQQALSRKASAVNMEKFKKFAARKKWKQSVRLISLCQRLSRSFLSRSNMSVARSDDTLDEEDSFVMKAIIHAINDDNVPGLQHLLGSLSNYDVNQPNKHGTPPLLIAAGCGNIQILQLLIKRGSRIDVQDKGGSNAVYWAARHGHVDTLKFLSENKCPLDVKDKSGEMALHVAARYGHADVAQLLCSFGSNPNIQDKEEETPLHCAAWHGYYSVAKALCEAGCNVNIKNREGETPLLTASARGYHDIVECLAEHGADLNACDKDGHIALHLAVRRCQMEVIKTLLSQGCFVDYQDRHGNTPLHVACKDGNMPIVVALCEANCNLDISNKYGRTPLHLAANNGILDVVRYLCLMGASVEALTTDGKTAEDLARSEQHEHVAGLLARLRKDTHRGLFIQQLRPTQNLQPRIKLKLFGHSGSGKTTLVESLKCGLLRSFFRRRRPRLSSTNSSRFPPSPLASKPTVSVSINNLYPGCENVSVRSRSMMFEPGLTKGMLEVFVAPTHHPHCSADDQSTKAIDIQNAYLNGVGDFSVWEFSGNPVYFCCYDYFAANDPTSIHVVVFSLEEPYEIQLNQVIFWLSFLKSLVPVEEPIAFGGKLKNPLQVVLVATHADIMNVPRPAGGEFGYDKDTSLLKEIRNRFGNDLHISNKLFVLDAGASGSKDMKVLRNHLQEIRSQIVSVCPPMTHLCEKIISTLPSWRKLNGPNQLMSLQQFVYDVQDQLNPLASEEDLRRIAQQLHSTGEINIMQSETVQDVLLLDPRWLCTNVLGKLLSVETPRALHHYRGRYTVEDIQRLVPDSDVEELLQILDAMDICARDLSSGTMVDVPALIKTDNLHRSWADEEDEVMVYGGVRIVPVEHLTPFPCGIFHKVQVNLCRWIHQQSTEGDADIRLWVNGCKLANRGAELLVLLVNHGQGIEVQVRGLETEKIKCCLLLDSVCSTIENVMATTLPGLLTVKHYLSPQQLREHHEPVMIYQPRDFFRAQTLKETSLTNTMGGYKESFSSIMCFGCHDVYSQASLGMDIHASDLNLLTRRKLSRLLDPPDPLGKDWCLLAMNLGLPDLVAKYNTSNGAPKDFLPSPLHALLREWTTYPESTVGTLMSKLRELGRRDAADFLLKASSVFKINLDGNGQEAYASSCNSGTSYNSISSVVSR

SEQ ID NO: 7507 - protein, 3126 aa, Homo sapiens
MEDEERQKKLEAGKAKLAQFRQRKAQSDGQSPSKKQKKKRKTSSSKHDVSAHHDLNIDQSQCNEMYINSSQRVESTVIPESTIMRTLHSGEITSHEQGFSVELESEISTTADDCSSEVNGCSFVMRTGKPTNLLREEEFGVDDSYSEQGAQDSPTHLEMMESELAGKQHEIEELNRELEEMRVTYGTEGLQQLQEFEAAIKQRDGIITQLTANLQQARREKDETMREFLELTEQSQKLQIQFQQLQASETLRNSTHSSTAADLLQAKQQILTHQQQLEEQDHLLEDYQKKKEDFTMQISFLQEKIKVYEMEQDKKVENSNKEEIQEKETIIEELNTKIIEEEKKTLELKDKLTTADKLLGELQEQIVQKNQEIKNMKLELTNSKQKERQSSEEIKQLMGTVEELQKRNHKDSQFETDIVQRMEQETQRKLEQLRAELDEMYGQQIVQMKQELIRQHMAQMEEMKTRHKGEMENALRSYSNITVNEDQIKLMNVAINELNIKLQDTNSQKEKLKEELGLILEEKCALQRQLEDLVEELSFSREQIQRARQTIAEQESKLNEAHKSLSTVEDLKAEIVSASESRKELELKHEAEVTNYKIKLEMLEKEKNAVLDRMAESQEAELERLRTQLLFSHEEELSKLKEDLEIEHRINIEKLKDNLGIHYKQQIDGLQNEMSQKIETMQFEKDNLITKQNQLILEISKLKDLQQSLVNSKSEEMTLQINELQKEIEILRQEEKEKGTLEQEVQELQLKTELLEKQMKEKENDLQEKFAQLEAENSILKDEKKTLEDMLKIHTPVSQEERLIFLDSIKSKSKDSVWEKEIEILIEENEDLKQQCIQLNEEIEKQRNTFSFAEKNFEVNYQELQEEYACLLKVKDDLEDSKNKQELEYKSKLKALNEELHLQRINPTTVKMKSSVFDEDKTFVAETLEMGEVVEKDTTELMEKLEVTKREKLELSQRLSDLSEQLKQKHGEISFLNEEVKSLKQEKEQVSLRCRELEIIINHNRAENVQSCDTQVSSLLDGVVTMTSRGAEGSVSKVNKSFGEESKIMVEDKVSFENMTVGEESKQEQLILDHLPSVTKESSLRATQPSENDKLQKELNVLKSEQNDLRLQMEAQRICLSLVYSTHVDQVREYMENEKDKALCSLKEELIFAQEEKIKELQKIHQLELQTMKTQETGDEGKPLHLLIGKLQKAVSEECSYFLQTLCSVLGEYYTPALKCEVNAEDKENSGDYISENEDPELQDYRYEVQDFQENMHTLLNKVTEEYNKLLVLQTRLSKIWGQQTDGMKLEFGEENLPKEETEFLSIHSQMTNLEDIDVNHKSKLSSLQDLEKTKLEEQVQELESLISSLQQQLKETEQNYEAEIHCLQKRLQAVSESTVPPSLPVDSVVITESDAQRTMYPGSCVKKNIDGTIEFSGEFGVKEETNIVKLLEKQYQEQLEEEVAKVIVSMSIAFAQQTELSRISGGKENTASSKQAHAVCQQEQHYFNEMKLSQDQIGFQTFETVDVKFKEEFKPLSKELGEHGKEILLSNSDPHDIPESKDCVLTISEEMFSKDKTFIVRQSIHDEISVSSMDASRQLMLNEEQLEDMRQELVRQYQEHQQATELLRQAHMRQMERQREDQEQLQEEIKRLNRQLAQNGNENQGEVEEQTFKEKELDRKPEDVPPEILSNERYALQKANNRLLKILLEVVKTTAAVEETIGRHVLGILDRSSKSQSSASLIWRSEAEASVKSCVHEEHTRVTDESIPSYSGSDMPRNDINMWSKVTEEGTELSQRLVRSGFAGTEIDPENEELMLNISSRLQAAVEKLLEAISETSSQLEHAKVTQTELMRESFRQKQEATESLKCQEELRERLHEESRAREQLAVELSKAEGVIDGYADEKTLFERQIQEKTDIIDRLEQELLCASNRLQELEAEQQQIQEERELLSRQKEAMKAEAGPVEQQLLQETEKLMKEKLEVQCQAEKVRDDLQKQVKALEIDVEEQVSRFIELEQEKNTELMDLRQQNQALEKQLEKMRKFLDEQAIDREHERDVFQQEIQKLEQQLKVVPRFQPISEHQTREVEQLANHLKEKTDKCSELLLSKEQLQRDIQERNEEIEKLEFRVRELEQALLVSADTFQKVEDRKHFGAVEAKPELSLEVQLQAERDAIDRKEKEITNLEEQLEQFREELENKNEEVQQLHMQLEIQKKESTTRLQELEQENKLFKDDMEKLGLAIKESDAMSTQDQHVLFGKFAQIIQEKEVEIDQLNEQVTKLQQQLKITTDNKVIEEKNELIRDLETQIECLMSDQECVKRNREEEIEQLNEVIEKLQQELANIGQKTSMNAHSLSEEADSLKHQLDVVIAEKLALEQQVETANEEMTFMKNVLKETNFKMNQLTQELFSLKRERESVEKIQSIPENSVNVAIDHLSKDKPELEVVLTEDALKSLENQTYFKSFEENGKGSIINLETRLLQLESTVSAKDLELTQCYKQIKDMQEQGQFETEMLQKKIVNLQKIVEEKVAAALVSQIQLEAVQEYAKFCQDNQTISSEPERTNIQNLNQLREDELGSDISALTLRISELESQVVEMHTSLILEKEQVEIAEKNVLEKEKKLLELQKLLEGNEKKQREKEKKRSPQDVEVLKTTTELFHSNEESGFFNELEALRAESVATKAELASYKEKAEKLQEELLVKETNMTSLQKDLSQVRDHLAEAKEKLSILEKEDETEVQESKKACMFEPLPIKLSKSIASQTDGTLKISSSNQTPQILVKNAGIQINLQSECSSEEVTEIISQFTEKIEKMQELHAAEILDMESRHISETETLKREHYVAVQLLKEECGTLKAVIQCLRSKEGSSIPELAHSDAYQTREICSSDSGSDWGQGIYLTHSQGFDIASEGRGEESESATDSFPKKIKGLLRAVHNEGMQVLSLTESPYSDGEDHSIQQVSEPWLEERKAYINTISSLKDLITKMQLQREAEVYDSSQSHESFSDWRGELLLALQQVFLEERSVLLAAFRTELTALGTTDAVGLLNCLEQRIQEQGVEYQAAMECLQKADRRSLLSEIQALHAQMNGRKITLKREQESEKPSQGMLYDKLIWLHKQVKRFHFVFFLIIIKLKHIFLVTFSSHSHNVKDTIYINYSRG

SEQ ID NO: 7508 - protein, 294 aa, Homo sapiens
MEYPAPATVQAADGGAAGPYSSSELLEGQEPDGVRFDRERARRLWEAVSGAQPVGREEVEHMIQKNQCLFTNTQCKVCCALLISESQKLAHYQSKKHANKVKRYLAIHGMETLKGETKKLDSDQKSSRSKDKNQCCPICNMTFSSPVVAQSHYLGKTHAKNLKLKQQSTKVEALHQNREMIDPDKFCSLCHATFNDPVMAQQHYVGKKHRKQETKLKLMARYGRLADPAVTDFPAGKGYPCKTCKIVLNSIEQYQAHVSGFKHKNQSPKTVASSLGQIPMQRQPIQKDSTTLED

SEQ ID NO: 7509 - protein, 318 aa, Homo sapiens
MRLLAGWLCLSLASVWLARRMWTLRSPLTRSLYVNMTSGPGGPAAAAGGRKENHQWYVCNREKLCESLQAVFVQSYLDQGTQIFLNNSIEKSGWLFIQLYHSFVSSVFSLFMSRTSINGLLGRGSMFVFSPDQFQRLLKINPDWKTHRLLDLGAGDGEVTKIMSPHFEEIYATELSETMIWQLQKKKYRVLGINEWQNTGFQYDVISCLNLLDRCDQPLTLLKDIRSVLEPTRGRVILALVLPFHPYVENVGGKWEKPSEILEIKGQNWEEQVNSLPEVFRKAGFVIEAFTRLPYLCEGDMYNDYYVLDDAVFVLKPV

SEQ ID NO: 7510 - protein, 378 aa, Homo sapiens
MATALPPRLQPVRGNETLREHYQYVGKLAGRLKEASEGSTLTTVLFLVICSFIVLENLMVLIAIWKNNKFHNRMYFFIGNLALCDLLAGIAYKVNILMSGKKTFSLSPTVWFLREGSMFVALGASTCSLLAIAIERHLTMIKMRPYDANKRHRVFLLIGMCWLIAFTLGALPILGWNCLHNLPDCSTILPLYSKKYIAFCISIFTAILVTIVILYARIYFLVKSSSRKVANHNNSERSMALLRTVVIVVSVFIACWSPLFILFLIDVACRVQACPILFKAQWFIVLAVLNSAMNPVIYTLASKEMRRAFFRLVCNCLVRGRGARASPIQPALDPSRSKSSSSNNSSHSPKVKEDLPHTAPSSCIMDKNAALQNGIFCN

SEQ ID NO: 7511 - protein, 2452 aa, Homo sapiens
MDPSGVKVLETAEDIQERRQQVLDRYHRFKELSTLRRQKLEDSYRFQFFQRDAEELEKWIQEKLQIASDENYKDPTNLQGKLQKHQAFEAEVQANSGAIVKLDETGNLMISEGHFASETIRTRLMELHRQWELLLEKMREKGIKLLQAQKLVQYLRECEDVMDWINDKEAIVTSEELGQDLEHVEVLQKKFEEFQTDMAAHEERVNEVNQFAAKLIQEQHPEEELIKTKQDEVNAAWQRLKGLALQRQGKLFGAAEVQRFNRDVDETISWIKEKEQLMASDDFGRDLASVQALLRKHEGLERDLAALEDKVKALCAEADRLQQSHPLSATQIQVKREELITNWEQIRTLAAERHARLNDSYRLQRFLADFRDLTSWVTEMKALINADELASDVAGAEALLDRHQEHKGEIDAHEDSFKSADESGQALLAAGHYASDEVREKLTVLSEERAALLELWELRRQQYEQCMDLQLFYRDTEQVDNWMSKQEAFLLNEDLGDSLDSVEALLKKHEDFEKSLSAQEEKITALDEFATKLIQNNHYAMEDVATRRDALLSRRNALHERAMRRRAQLADSFHLQQFFRDSDELKSWVNEKMKTATDEAYKDPSNLQGKVQKHQAFEAELSANQSRIDALEKAGQKLIDVNHYAKDEVAARMNEVISLWKKLLEATELKGIKLREANQQQQFNRNVEDIELWLYEVEGHLASDDYGKDLTNVQNLQKKHALLEADVAAHQDRIDGITIQARQFQDAGHFDAENIKKKQEALVARYEALKEPMVARKQKLADSLRLQQLFRDVEDEETWIREKEPIAASTNRGKDLIGVQNLLKKHQALQAEIAGHEPRIKAVTQKGNAMVEEGHFAAEDVKAKLHELNQKWEALKAKASQRRQDLEDSLQAQQYFADANEAESWMREKEPIVGSTDYGKDEDSAEALLKKHEALMSDLSAYGSSIQALREQAQSCRQQVAPTDDETGKELVLALYDYQEKSPREVTMKKGDILTLLNSTNKDWWKVEVNDRQGFVPAAYVKKLDPAQSASRENLLEEQGSIALRQEQIDNQYHSLLELGEKRKGMLEKSCKKFMLFREANELQQWINEKEAALTSEEVGADLEQVEVLQKKFDDFQKDLKANESRLKDINKVAEDLESEGLMAEEVQAVQQQEVYGMMPRDETDSKTASPWKSARLMVHTVATFNSIKELNERWRSLQQLAEERSQLLGSAHEVQRFHRDADETKEWIEEKNQALNTDNYGHDLASVQALQRKHEGFERDLAALGDKVNSLGETAERLIQSHPESAEDLQEKCTELNQAWSSLGKRADQRKAKLGDSHDLQRFLSDFRDLMSWINGIRGLVSSDELAKDVTGAEALLERHQEHRTEIDARAGTFQAFEQFGQQLLAHGHYASPEIKQKLDILDQERADLEKAWVQRRMMLDQCLELQLFHRDCEQAENWMAAREAFLNTEDKGDSLDSVEALIKKHEDFDKAINVQEEKIAALQAFADQLIAAGHYAKGDISSRRNEVLDRWRRLKAQMIEKRSKLGESQTLQQFSRDVDEIEAWISEKLQTASDESYKDPTNIQSKHQKHQAFEAELHANADRIRGVIDMGNSLIERGACAGSEDAVKARLAALADQWQFLVQKSAEKSQKLKEANKQQNFNTGIKDFDFWLSEVEALLASEDYGKDLASVNNLLKKHQLLEADISAHEDRLKDLNSQADSLMTSSAFDTSQVKDKRDTINGRFQKIKSMAASRRAKLNESHRLHQFFRDMDDEESWIKEKKLLVGSEDYGRDLTGVQNLRKKHKRLEAELAAHEPAIQGVLDTGKKLSDDNTIGKEEIQQRLAQFVEHWKELKQLAAARGQRLEESLEYQQFVANVEEEEAWINEKMTLVASEDYGDTLAAIQGLLKKHEAFETDFTVHKDRVNDVCTNGQDLIKKNNHHEENISSKMKGLNGKVSDLEKAAAQRKAKLDENSAFLQFNWKADVVESWIGEKENSLKTDDYGRDLSSVQTLLTKQETFDAGLQAFQQEGIANITALKDQLLAAKHVQSKAIEARHASLMKRWSQLLANSAARKKKLLEAQSHFRKVEDLFLTFAKKASAFNSWFENAEEDLTDPVRCNSLEEIKALREAHDAFRSSLSSAQADFNQLAELDRQIKSFRVASNPYTWFTMEALEETWRNLQKIIKERELELQKEQRRQEENDKLRQEFAQHANAFHQWIQETRTYLLDGSCMVEESGTLESQLEATKRKHQEIRAMRSQLKKIEDLGAAMEEALILDNKYTEHSTVGLAQQWDQLDQLGMRMQHNLEQQIQARNTTGVTEEALKEFSMMFKHFDKDKSGRLNHQEFKSCLRSLGYDLPMVEEGEPDPEFEAILDTVDPNRDGHVSLQEYMAFMISRETENVKSSEEIESAFRALSSEGKPYVTKEELYQNLTREQADYCVSHMKPYVDGKGRELPTAFDYVEFTRSLFVN

SEQ ID NO: 7512 - protein, 1086 aa, Homo sapiens
MKDSCITVMAMALLSGFFFFAPASSYNLDVRGARSFSPPRAGRHFGYRVLQVGNGVIVGAPGEGNSTGSLYQCQSGTGHCLPVTLRGSNYTSKYLGMTLATDPTDGSILFAAVQFSTSYKTEFDFSDYVKRKDPDALLKHVKHMLLLTNTFGAINYVATEVFREELGARPDATKVLIIITDGEATDSGNIDAAKDIIRYIIGIGKHFQTKESQETLHKFASKPASEFVKILDTFEKLKDLFTELQKKIYVIEGTSKQDLTSFNMELSSSGISADLSRGHAVVGAVGAKDWAGGFLDLKADLQDDTFIGNEPLTPEVRAGYLGYTVTWLPSRQKTSLLASGAPRYQHMGRVLLFQEPQGGGHWSQVQTIHGTQIGSYFGGELCGVDVDQDGETELLLIGAPLFYGEQRGGRVFIYQRRQLGFEEVSELQGDPGYPLGRFGEAITALTDINGDGLVDVAVGAPLEEQGAVYIFNGRHGGLSPQPSQRIEGTQVLSGIQWFGRSIHGVKDLEGDGLADVAVGAESQMIVLSSRPVVDMVTLMSFSPAEIPVHEVECSYSTSNKMKEGVNITICFQIKSLIPQFQGRLVANLTYTLQLDGHRTRRRGLFPGGRHELRRNIAVTTSMSCTDFSFHFPVCVQDLISPINVSLNFSLWEEEGTPRDQRAGKDIPPILRPSLHSETWEIPFEKNCGEDKKCEANLRVSFSPARSRALRLTAFASLSVELSLSNLEEDAYWVQLDLHFPPGLSFRKVEMLKPHSQIPVSCEELPEESRLLSRALSCNVSSPIFKAGHSVALQMMFNTLVNSSWGDSVELHANVTCNNEDSDLLEDNSATTIIPILYPINILIQDQEDSTLYVSFTPKGPKIHQVKHMYQVRIQPSIHDHNIPTLEAVVGVPQPPSEGPITHQWSVQMEPPVPCHYEDLERLPDAAEPCLPGALFRCPVVFRQEILVQVIGTLELVGEIEASSMFSLCSSLSISFNSSKHFHLYGSNASLAQVVMKVDVVYEKQMLYLYVLSGIGGLLLLLLIFIVLYKVGFFKRNLKEKMEAGRGVPNGIPAEDSEQLASGQEAGDPGCLKPLHEKDSESGGGKD

SEQ ID NO: 7513 - protein, 392 aa, Homo sapiens [sequence omitted]

SEQ ID NO: 7514 - protein, 418 aa, Homo sapiens
MRSLLLLSAFCLLEAALAAEVKKPAAAAAPGTAEKLSPKAATLAERSAGLAFSLYQAMAKDQAVENILVSPVVVASSLGLVSLGGKATTASQAKAVLSAEQLRDEEVHAGLGELLRSLSNSTARNVTWKLGSRLYGPSSVSFADDFVRSSKQHYNCEHSKINFRDKRSALQSINEWAAQTTDGKLPEVTKDVERTDGALLVNAMFFKPHWDEKFHHKMVDNRGFMVTRSYTVGVMMMHRTGLYNYYDDEKEKLQIVEMPLAHKLSSLIILMPHHVEPLERLEKLLTKEQLKIWMGKMQKKAVAISLPKGVVEVTHDLQKHLAGLGLTEAIDKNKADLSRMSGKKDLYLASVFHATAFELDTDGNPFDQDIYGREELRSPKLFYADHPFIFLVRDTQSGSLLFIGRLVRPKGDKMRDEL

SEQ ID NO: 7515 - protein, 987 aa, Homo sapiens
MELRVLLCWASLAAALEETLLNTKLETADLKWVTFPQVDGQWEELSGLDEEQHSVRTYEVCDVQRAPGQAHWLRTGWVPRRGAVHVYATLRFTMLECLSLPRAGRSCKETFTVFYYESDADTATALTPAWMENPYIKVDTVAAEHLTRKRPGAEATGKVNVKTLRLGPLSKAGFYLAFQDQGACMALLSLHLFYKKCAQLTVNLTRFPETVPRELVVPVAGSCVVDAVPAPGPSPSLYCREDGQWAEQPVTGCSCAPGFEAAEGNTKCRACAQGTFKPLSGEGSCQPCPANSHSNTIGSAVCQCRVGYFRARTDPRGAPCTTPPSAPRSVVSRLNGSSLHLEWSAPLESGGREDLTYALRCRECRPGGSCAPCGGDLTFDPGPRDLVEPWVVVRGLRPDFTYTFEVTALNGVSSLATGPVPFEPVNVTTDREVPPAVSDIRVTRSSPSSLSLAWAVPRAPSGAVLDYEVKYHEKGAEGPSSVRFLKTSENRAELRGLKRGASYLVQVRARSEAGYGPFGQEHHSQTQLDESEGWREQLALIAGTAVVGVVLVLVVIVVAVLCLRKQSNGREAEYSDKHGQYLIGHGTKVYIDPFTYEDPNEAVREFAKEIDVSYVKIEEVIGAGEFGEVCRGRLKAPGKKESCVAIKTLKGGYTERQRREFLSEASIMGQFEHPNIIRLEGVVTNSMPVMILTEFMENGALDSFLRLNDGQFTVIQLVGMLRGIASGMRYLAEMSYVHRDLAARNILVNSNLVCKVSDFGLSRFLEENSSDPTYTSSLGGKIPIRWTAPEAIAFRKFTSASDAWSYGIVMWEVMSFGERPYWDMSNQDVINAIEQDYRLPPPPDCPTSLHQLMLDCWQKDRNARPRFPQVVSALDKMIRNPASLKIVARENGGASHPLLDQRQPHYSAFGSVGEWLRAIKMGRYEESFAAAGFGSFELVSQISAEDLLRIGVTLAGHQKKILASVQHMKSQAKPGTPGGTGGPAPQY

SEQ ID NO: 7516 - protein, 349 aa, Homo sapiens
MSLMVVSMACVGLFLVQRAGPHMGNHRKPSLLAHPGPLVKSGERVILQCWSDIMFEHFFLHKEGISKDPSRLVGQIHDGVSKANFSIGPMMLALAGTYRCYGSVTHTPYQLSAPSDPLDIVVTGPYEKPSLSAQPGPKVQAGESVTLSCSSRSSYDMYHLSREGGAHERRLPAVRKVNRTFQADFPLGPATHGGTYRCFGSFRHSPYEWSDPSDPLLVSVTGNPSSSWPSPTEPSSKSGNPRHLHILIGTSVVIILFILLLFFLLHLWCSNKKNAAVMDQEPAGNRTANSEDSDEQDPEEVTYAQLDHCVFTQRKITRPSQRPKTPPTDTILYTELPNAKPRSKVVSCP

SEQ ID NO: 7517 - protein, 396 aa, Homo sapiens
MKTLLLLLLVLLELGEAQGSLHRVPLRRHPSLKKKLRARSQLSEFWKSHNLDMIQFTESCSMDQSAKEPLINYLDMEYFGTISIGSPPQNFTVIFDTGSSNLWVPSVYCTSPACKTHSRFQPSQSSTYSQPGQSFSIQYGTGSLSGIIGADQVSVEGLTVVGQQFGESVTEPGQTFVDAEFDGILGLGYPSLAVGGVTPVFDNMMAQNLVDLPMFSVYMSSNPEGGAGSELIFGGYDHSHFSGSLNWVPVTKQAYWQIALDNIQVGGTVMFCSEGCQAIVDTGTSLITGPSDKIKQLQNAIGAAPVDGEYAVECANLNVMPDVTFTINGVPYTLSPTAYTLLDFVDGMQFCSSGFQGLDIHPPAGPLWILGDVFIRQFYSVFDRGNNRVGLAPAVP

SEQ ID NO: 7518 - protein, 343 aa, Homo sapiens
MLATRLSRPLSRLPGKTLSACDRENGARRPLLLGSTSFIPIGRRTYASAAEPVGSKAVLVTGCDSGFGFSLAKHLHSKGFLVFAGCLMKDKGHDGVKELDSLNSDRLRTVQLNVCSSEEVEKVVEIVRSSLKDPEKGMWGLVNNAGISTFGEVEFTSLETYKQVAEVNLWGTVRMTKSFLPLIRRAKGRVVNISSMLGRMANPARSPYCITKFGVEAFSDCLRYEMYPLGVKVSVVEPGNFIAATSLYSPESIQAIAKKMWEELPEVVRKDYGKKYFDEKIAKMETYCSSGSTDTSPVIDAVTHALTATTPYTRYHPMDYYWWLRMQIMTHLPGAISDMIYIR

SEQ ID NO: 7519 - protein, 569 aa, Homo sapiens
MAAAAPVAADDDERRRRPGAALEDSRSQEGANGEAESGELSRLRAELAGALAEMETMKAVAEVSESTKAEAVAAVQRQCQEEVASLQAILKDSISSYEAQITALKQERQQQQQDCEEKERELGRLKQLLSRAYPLDSLEKQMEKAHEDSEKLREIVLPMEKEIEELKAKLLRAEELIQEIQRRPRHAPSLHGSTELLPLSRDPSPPLEPLEELSGDGGPAAEAFAHNCDDSASISSFSLGGGVGSSSSLPQSRQGLSPEQEETASLVSTGTLVPEGIYLPPPGYQLVPDTQWEQLQTEGRQLQKDLESVSRERDELQEGLRRSNEDCAKQMQVLLAQVQNSEQLLRTLQGTVSQAQERVQLQMAELVTTHKCLHHEVKRLNEENQGLRAEQLPSSAPQGSQQEQGEEESLPSSVPELQQLLCCTRQEARARLQAQEHGAERLRIEIVTLREALEEETVARASLEGQLRVQREETEVLEASLCSLRTEMERVQQEQSKAQLPDLLSEQRAKVLRLQAELETSEQVQRDFVRLSQALQVRLERIRQAETLEQVRSIMDEAPLTDVRDIKDT

SEQ ID NO: 7520 - protein, 536 aa, Homo sapiens
MGSNKSKPKDASQRRRSLEPAENVHGAGGGAFPASQTPSKPASADGHRGPSAAFAPAAAEPKLFGGFNSSDTVTSPQRAGPLAGGVTTFVALYDYESRTETDLSFKKGERLQIVNNTEGDWWLAHSLSTGQTGYIPSNYVAPSDSIQAEEWYFGKITRRESERLLLNAENPRGTFLVRESETTKGAYCLSVSDFDNAKGLNVKHYKIRKLDSGGFYITSRTQFNSLQQLVAYYSKHADGLCHRLTTVCPTSKPQTQGLAKDAWEIPRESLRLEVKLGQGCFGEVWMGTWNGTTRVAIKTLKPGTMSPEAFLQEAQVMKKLRHEKLVQLYAVVSEEPIYIVTEYMSKGSLLDFLKGETGKYLRLPQLVDMAAQIASGMAYVERMNYVHRDLRAANILVGENLVCKVADFGLARLIEDNEYTARQGAKFPIKWTAPEAALYGRFTIKSDVWSFGILLTELTTKGRVPYPGMVNREVLDQVERGYRMPCPPECPESLHDLMCQCWRKEPEERPTFEYLQAFLEDYFTSTEPQYQPGENL

SEQ ID NO: 7521 - protein, 112 aa, Homo sapiens
MGSRLSQPFESYITAPPGTAAAPAKPAPPATPGAPTSPAEHRLLKTCWSCRVLSGLGLMGAGGYVYWVARKPMKMGYPPSPWTITQMVIGLSIATWGIVVMADPKGKAYRVV

SEQ ID NO: 7522 - protein, 238 aa, Homo sapiens
MADPDPRYPRSSIEDDFNYGSSVASATVHIRMAFLRKVYSILSLQVLLTTVTSTVFLYFESVRTFVHESPALILLFALGSLGLIFALILNRHKYPLNLYLLFGFTLLEALTVAVVVTFYDVYIILQAFILTTTVFFGLTVYTLQSKKDFSKFGAGLFALLWILCLSGFLKFFFYSEIMELVLAAAGALLFCGFIIYDTHSLMHKLSPEEYVLAAISLYLDIINLFLHLLRFLEAVNKK

SEQ ID NO: 7523 - protein, 826 aa, Homo sapiens
MVAPVLETSHVFCCPNRVRGVLNWSSGPRGLLAFGTSCSVVLYDPLKRVVVTNLNGHTARVNCIQWICKQDGSPSTELVSGGSDNQVIHWEIEDNQLLKAVHLQGHEGPVYAVHAVYQRRTSDPALCTLIVSAAADSAVRLWSKKGPEVMCLQTLNFGNGFALALCLSFLPNTDVPILACGNDDCRIHIFAQQNDQFQKVLSLCGHEDWIRGVEWAAFGRDLFLASCSQDCLIRIWKLYIKSTSLETQDDDNIRLKENTFTIENESVKIAFAVTLETVLAGHENWVNAVHWQPVFYKDGVLQQPVRLLSASMDKTMILWAPDEESGVWLEQVRVGEVGGNTLGFYDCQFNEDGSMIIAHAFHGALHLWKQNTVNPREWTPEIVISGHFDGVQDLVWDPEGEFIITVGTDQTTRLFAPWKRKDQSQVTWHEIARPQIHGYDLKCLAMINRFQFVSGADEKVLRVFSAPRNFVENFCAITGQSLNHVLCNQDSDLPEGATVPALGLSNKAVFQGDIASQPSDEEELLTSTGFEYQQVAFQPSILTEPPTEDHLLQNTLWPEVQKLYGHGYEIFCVTCNSSKTLLASACKAAKKEHAAIILWNTTSWKQVQNLVFHSLTVTQMAFSPNEKFLLAVSRDRTWSLWKKQDTISPEFEPVFSLFAFTNKITSVHSRIIWSCDWSPDSKYFFTGSRDKKVVVWGECDSTDDCIEHNIGPCSSVLDVGGAVTAVSVCPVLHPSQRYVVAVGLECGKICLYTWKKTDQVPEINDWTHCVETSQSQSHTLAIRKLCWKNCSGKTEQKEAEGAEWLHFASCGEDHTVKIHRVNKCAL

SEQ ID NO: 7524 - protein, 286 aa, Homo sapiens
MSDSEKLNLDSIIGRLLEGDIHGQYYDLLRLFEYGGFPPESNYLFLGDYVDRGKQSLETICLLLAYKIKYPENFFLLRGNHECASINRIYGFYDECKRRYNIKLWKTFTDCFNCLPIAAIVDEKIFCCHGGLSPDLQSMEQIRRIMRPTDVPDQGLLCDLLWSDPDKDVQGWGENDRGVSFTFGAEVVAKFLHKHDLDLICRAHQVVEDGYEFFAKRQLVTLFSAPNYCGEFDNAGAMMSVDETLMCSFQILKPADKNKGKYGQFSGLNPGGRPITPPRNSAKAKK

SEQ ID NO: 7525 - protein, 2839 aa, Homo sapiens
MAAHRPVEWVQAVVSRFDEQLPIKTGQQNTHTKVSTEHNKECLINISKYKFSLVISGLTTILKNVNNMRIFGEAAEKNLYLSQLIILDTLEKCLAGQPKDTMRLDETMLVKQLLPEICHFLHTCREGNQHAAELRNSASGVLFSLSCNNFNAVFSRISTRLQELTVCSEDNVDVHDIELLQYINVDCAKLKRLLKETAFKFKALKKVAQLAVINSLEKAFWNWVENYPDEFTKLYQIPQTDMAECAEKLFDLVDGFAESTKRKAAVWPLQIILLILCPEIIQDISKDVVDENNMNKKLFLDSLRKALAGHGGSRQLTESAAIACVKLCKASTYINWEDNSVIFLLVQSMVVDLKNLLFNPSKPFSRGSQPADVDLMIDCLVSCFRISPHNNQHFKICLAQNSPSTFHYVLVNSLHRIITNSALDWWPKIDAVYCHSVELRNMFGETLHKAVQGCGAHPAIRMAPSLTFKEKVTSLKFKEKPTDLETRSYKYLLLSMVKLIHADPKLLLCNPRKQGPETQGSTAELITGLVQLVPQSHMPEIAQEAMEALLVLHQLDSIDLWNPDAPVETFWEISSQMLFYICKKLTSHQMLSSTEILKWLREILICRNKFLLKNKQADRSSCHFLLFYGVGCDIPSSGNTSQMSMDHEELLRTPGASLRKGKGNSSMDSAAGCSGTPPICRQAQTKLEVALYMFLWNPDTEAVLVAMSCFRHLCEEADIRCGVDEVSVHNLLPNYNTFMEFASVSNMMSTGRAALQKRVMALLRRIEHPTAGNTEAWEDTHAKWEQATKLILNYPKAKMEDGQAAESLHKTIVKRRMSHVSGGGSIDLSDTDSLQEWINMTGFLCALGGVCLQQRSNSGLATYSPPMGPVSERKGSMISVMSSEGNADTPVSKFMDRLLSLMVCNHEKVGLQIRTNVKDLVGLELSPALYPMLFNKLKNTISKFFDSQGQVLLTDTNTQFVEQTIAIMKNLLDNHTEGSSEHLGQASIETMMLNLVRYVRVLGNMVHAIQIKTKLCQLVEVMMARRDDLSFCQEMKFRNKMVEYLTDWVMGTSNQAADDDVKCLTRDLDQASMEAVVSLLAGLPLQPEEGDGVELMEAKSQLFLKYFTLFMNLLNDCSEVEDESAQTGGRKRGMSRRLASLRHCTVLAMSNLLNANVDSGLMHSIGLGYHKDLQTRATFMEVLTKILQQGTEFDTLAETVLADRFERLVELVTMMGDQGELPIAMALANVVPCSQWDELARVLVTLFDSRHLLYQLLWNMFSKEVELADSMQTLFRGNSLASKIMTFCFKVYGATYLQKLLDPLLRIVITSSDWQHVSFEVDPTRLEPSESLEENQRNLLQMTEKFFHAIISSSSEFPPQLRSVCHCLYQATCHSLLNKATVKEKKENKKSVVSQRFPQNSIGAVGSAMFLRFINPAIVSPYEAGILDKKPPPRIERGLKLMSKILQSIANHVLFTKEEHMRPFNDFVKSNFDAARRFFLDIASDCPTSDAVNHSLSFISDGNVLALHRLLWNNQEKIGQYLSSNRDHKAVGRRPFDKMATLLAYLGPPEHKPVADTHWSSLNLTSSKFEEFMTRHQVHEKEEFKALKTLSIFYQAGTSKAGNPIFYYVARRFKTGQINGDLLIYHVLLTLKPYYAKPYEIVVDLTHTGPSNRFKTDFLSKWFVVFPGFAYDNVSAVYIYNCNSWVREYTKYHERLLTGLKGSKRLVFIDCPGKLAEHIEHEQQKLPAATLALEEDLKVFHNALKLAHKDTKVSIKVGSTAVQVTSAERTKVLGQSVFLNDIYYASEIEEICLVDENQFTLTIANQGTPLTFMHQECEAIVQSIIHIRTRWELSQPDSIPQHTKIRPKDVPGTLLNIALLNLGSSDPSLRSAAYNLLCALTCTFNLKIEGQLLETSGLCIPANNTLFIVSISKTLAANEPHLTLEFLEECISGFSKSSIELKHLCLEYMTPWLSNLVRFCKHNDDAKRQRVTAILDKLITMTINEKQMYPSIQAKIWGSLGQITDLLDVVLDSFIKTSATGGLGSIKAEVMADTAVALASGNVKLVSSKVIGRMCKIIDKTCLSPTPTLEQHLMWDDIAILARYMLMLSFNNSLDVAAHLPYLFHVVTFLVATGPLSLRASTHGLVINIIHSLCTCSQLHFSEETKQVLRLSLTEFSLPKFYLLFGISKVKSAAVIAFRSSYRDRSFSPGSYERETFALTSLETVTEALLEIMEACMRDIPTCKWLDQWTELAQRFAFQYNPSLQPRALVVFGCISKRVSHGQIKQIIRILSKALESCLKGPDTYNSQVLIEATVIALTKLQPLLNKDSPLHKALFWVAVAVLQLDEVNLYSAGTALLEQNLHTLDSLRIFNDKSPEEVFMAIRNPLEWHCKQMDHFVGLNFNSNFNFALVGHLLKGYRHPSPAIVARTVRILHTLLTLVNKHRNCDKFEVNTQSVAYLAALLTVSEEVRSRCSLKHRKSLLLTDISMENVPMDTYPIHHGDPSYRTLKETQPWSSPKGSEGYLAATYPTVGQTSPRARKSMSLDMGQPSQANTKKLLGTRKSFDHLISDTKAPKRQEMESGITTPPKMRRVAETDYEMETQRISSSQQHPHLRKVSVSESNVLLDEEVLTDPKIQALLLTVLATLVKYTTDEFDQRILYEYLAEASVVFPKVFPVVHNLLDSKINTLLSLCQDPNLLNPIHGIVQSVVYHEESPPQYQTSYLQSFGFNGLWRFAGPFSKQTQIPDYAELIVKFLDALIDTYLPGIDEETSEESLLTPTSPYPPALQSQLSITANLNLSNSMTSLATSQHSPGIDKENVELSPTTGHCNSGRTRHGSASQVQKQRSAGSFKRNSIKKIV

SEQ ID NO: 7526 - protein, 284 aa, Homo sapiens
MDAIKKKMQMLKLDKENALDRAEQAEADKKAAEDRSKQLEDELVSLQKKLKGTEDELDKYSEALKDAQEKLELAEKKATDAEADVASLNRRIQLVEEELDRAQERLATALQKLEEAEKAADESERGMKVIESRAQKDEEKMEIQEIQLKEAKHIAEDADRKYEEVARKLVIIESDLERAEERAELSEGQVRQLEEQLRIMDQTLKALMAAEDKYSQKEDRYEEEIKVLSDKLKEAETRAEFAERSVTKLEKSIDDLEEKVAHAKEENLSMHQMLDQTLLELNNM

SEQ ID NO: 7527 - protein, 300 aa, Homo sapiens
MKFLLDILLLLPLLIVCSLESFVKLFIPKRRKSVTGEIVLITGAGHGIGRLTAYEFAKLKSKLVLWDINKHGLEETAAKCKGLGAKVHTFVVDCSNREDIYSSAKKVKAEIGDVSILVNNAGVVYTSDLFATQDPQIEKTFEVNVLAHFWTTKAFLPAMTKNNHGHIVTVASAAGHVSVPFLLAYCSSKFAAVGFHKTLTDELAALQITGVKTTCLCPNFVNTGFIKNPSTSLGPTLEPEEVVNRLMHGILTEQKMIFIPSSIAFLTTLERILPERFLAVLKRKISVKFDAVIGYKMKAQ

SEQ ID NO: 7528 - protein, 366 aa, Homo sapiens
MLPRLLLLICAPLCEPAELFLIASPSHPTEGSPVTLTCKMPFLQSSDAQFQFCFFRDTRALGPGWSSSPKLQIAAMWKEDTGSYWCEAQTMASKVLRSRRSQINVHRVPVADVSLETQPPGGQVMEGDRLVLICSVAMGTGDITFLWYKGAVGLNLQSKTQRSLTAEYEIPSVRESDAEQYYCVAENGYGPSPSGLVSITVRIPVSRPILMLRAPRAQAAVEDVLELHCEALRGSPPILYWFYHEDITLGSRSAPSGGGASFNLSLTEEHSGNYSCEANNGLGAQRSEAVTLNFTGRRSARDPLRSLPSPLPQEFTYLNSPTPGQLQPIYENEPREQSVAVHGRQQHSSEQKAQKPWGHIWRTRFP

SEQ ID NO: 7529 - protein, 591 aa, Homo sapiens
MFGKRKKRVEISAPSNFEHRVHTGFDQHEQKFTGLPRQWQSLIEESARRPKPLVDPACITSIQPGAPKTIVRGSKGAKDGALTLLLDEFENMSVTRSNSLRRDSPPPPARARQENGMPEEPATTARGGPGKAGSRGRFAGHSEAGGGSGDRRRAGPEKRPKSSREGSGGPQESSRDKRPLSGPDVGTPQPAGLASGAKLAAGRPFNTYPRADTDHPSRGAQGEPHDVAPNGPSAGGLAIPQSSSSSSRPPTRARGAPSPGVLGPHASEPQLAPPACTPAAPAVPGPPGPRSPQREPQRVSHEQFRAALQLVVDPGDPRSYLDNFIKIGEGSTGIVCIATVRSSGKLVAVKKMDLRKQQRRELLFNEVVIMRDYQHENVVEMYNSYLVGDELWVVMEFLEGGALTDIVTHTRMNEEQIAAVCLAVLQALSVLHAQGVIHRDIKSDSILLTHDGRVKLSDFGFCAQVSKEVPRRKSLVGTPYWMAPELISRLPYGPEVDIWSLGIMVIEMVDGEPPYFNEPPLKAMKMIRDNLPPRLKNLHKVSPSLKGFLDRLLVRDPAQRATAAELLKHPFLAKAGPPASIVPLMRQNRTR

SEQ ID NO: 7530 - protein, 502 aa, Homo sapiens
MAAPCEGQAFAVGVEKNWGAVVRSPEGTPQKIRQLIDEGIAPEEGGVDAKDTSATSQSVNGSPQAEQPSLESTSKEAFFSRVETFSSLKWAGKPFELSPLVCAKYGWVTVECDMLKCSSCQAFLCASLQPAFDFDRYKQRCAELKKALCTAHEKFCFWPDSPSPDRFGMLPLDEPAILVSEFLDRFQSLCHLDLQLPSLRPEDLKTMCLTEDKISLLLHLLEDELDHRTDERKTTIKLGSDIQVHVTACILSVCGWACSSSLESMQLSLITCSQCMRKVGLWGFQQIESSMTDLDASFGLTSSPIPGLEGRPERLPLVPESPRRMMTRSQDATFSPGSEQAEKSPGPIVSRTRSWDSSSPVDRPEPEAASPTTRTRPVTRSMGTGDTPGLEVPSSPLRKAKRARLCSSSSSDTSSRSFFDPTSQHRDWCPWVNITLGKESRENGGTEPDASAPAEPGWKAVLTILLAHKQSSQPAETDSMSLSEKSRKVFRIFRQWESLCSC

SEQ ID NO: 7531 - protein, 367 aa, Homo sapiens
MWSEGRYEYERIPRERAPPRSHPSDGYNRLVNIVPKKPPLLDRPGEGSYNRYYSHVDYRDYDEGRSFSHDRRSGPPHRGDESGYRWTRDDHSASRQPEYRDMRDGFRRKSFYSSHYARERSPYKRDNTFFRESPVGRKDSPHSRSGSSVSSRSYSPERSKSYSFHQSQHRKSVRPGASYKRQNEGNPERDKERPVQSLKTSRDTSPSSGSAVSSSKVLDKPSRLTEKELAEAASKWAAEKLEKSDESNLPEISEYEAGSTAPLFTDQPEEPESNTTHGIELFEDSQLTTRSKAIASKTKEIEQVYRQDCETFGMVVKMLIEKDPSLEKSIQFALRQNLHEIGERCVEELKHFIAEYDTSTQDFGEPF

SEQ ID NO: 7532 - protein, 822 aa, Homo sapiens
MKPALLPWALLLLATALGPGPGPTADAQESCSMRCGALDGPCSCHPTCSGLGTCCLDFRDFCLEILPYSGSMMGGKDFVVRHFKMSSPTDASVICRFKDSIQTLGHVDSSGQVHCVSPLLYESGRIPFTVSLDNGHSFPRAGTWLAVHPNKVSMMEKSELVNETRWQYYGTANTSGNLSLTWHVKSLPTQTITIELWGYEETGMPYSQEWTAKWSYLYPLATHIPNSGSFTFTPKPAPPSYQRWRVGALRIIDSKNYAGQKDVQALWTNDHALAWHLSDDFREDPVAWARTQCQAWEELEDQLPNFLEELPDCPCTLTQARADSGRFFTDYGCDMEQGSVCTYHPGAVHCVRSVQASLRYGSGQQCCYTADGTQLLTADSSGGSTPDRGHDWGAPPFRTPPRVPSMSHWLYDVLSFYYCCLWAPDCPRYMQRRPSNDCRNYRPPRLASAFGDPHFVTFDGTNFTFNGRGEYVLLEAALTDLRVQARAQPGTMSNGTETRGTGLTAVAVQEGNSDVVEVRLANRTGGLEVLLNQEVLSFTEQSWMDLKGMFLSVAAGDRVSIMLASGAGLEVSVQGPFLSVSVLLPEKFLTHTHGLLGTLNNDPTDDFTLHSGRVLPPGTSPQELFLFGANWTVHNASSLLTYDSWFLVHNFLYQPKHDPTFEPLFPSETTLNPSLAQEAAKLCGDDHFCNFDVAATGSLSTGTATRVAHQLHQRRMQSLQPVVSCGWLAPPPNGQKEGNRYLAGSTIYFHCDNGYSLAGAETSTCQADGTWSSPTPKCQPGRSYAVLLGIIFGGLAVVAAVALVYVLLRRRKGNTHVWGAQP

SEQ ID NO: 7533 - protein, 2048 aa, Homo sapiens
MLRVIVESASNIPKTKFGKPDPIVSVIFKDEKKKTKKVDNELNPVWNEILEFDLRGIPLDFSSSLGIIVKDFETIGQNKLIGTATVALKDLTGDQSRSLPYKLISLLNEKGQDTGATIDLVIGYDPPSAPHPNDLSGPSVPGMGGDGEEDEGDEDRLDNAVRGPGPKGPVGTVSEAQLARRLTKVKNSRRMLSNKPQDFQIRVRVIEGRQLSGNNIRPVVKVHVCGQTHRTRIKRGNNPFFDELFFYNVNMTPSELMDEIISIRVYNSHSLRADCLMGEFKIDVGFVYDEPGHAVMRKWLLLNDPEDTSSGSKGYMKVSMFVLGTGDEPPPERRDRDNDSDDVESNLLLPAGIALRWVTFLLKIYRAEDIPQMDDAFSQTVKEIFGGNADKKNLVDPFVEVSFAGKKVCTNIIEKNANPEWNQVVNLQIKFPSVCEKIKLTIYDWDRLTKNDVVGTTYLHLSKIAASGGEVEVNTGETEVGFVPTFGPCYLNLYGSPREYTGFPDPYDELNTGKGEGVAYRGRILVELATFLEKTPPDKKLEPISNDDLLVVEKYQRRRKYSLSAVFHSATMLQDVGEAIQFEVSIGNYGNKFDTTCKPLASTTQYSRAVFDGNYYYYLPWAHTKPVVTLTSYWEDISHRLDAVNTLLAMAERLQTNIEALKSGIQGKIPANQLAELWLKLIDEVIEDTRYTLPLTEGKANVTVLDTQIRKLRSRSLSQIHEAAVRMRSEATDVKSTLAEIEDWLDKLMQLTEEPQNSMPDIIIWMIRGEKRLAYARIPAHQVLYSTSGENASGKYCGKTQTIFLKYPQEKNNGPKVPVELRVNIWLGLSAVEKKFNSFAEGTFTVFAEMYENQALMFGKWGTSGLVGRHKFSDVTGKIKLKREFFLPPKGWEWEGEWIVDPERSLLTEADAGHTEFTDEVYQNESRYPGGDWKPAEDTYTDANGDKAASPSELTCPPGWEWEDDAWSYDINRAVDEKGWEYGITIPPDHKPKSWVAAEKMYHTHRRRRLVRKRKKDLTQTASSTARAMEELQDQEGWEYASLIGWKFHWKQRSSDTFRRRRWRRKMAPSETHGAAAIFKLEGALGADTTEDGDEKSLEKQKHSATTVFGANTPIVSCNFDRVYIYHLRCYVYQARNLLALDKDSFSDPYAHICFLHRSKTTEIIHSTLNPTWDQTIIFDEVEIYGEPQTVLQNPPKVIMELFDNDQVGKDEFLGRSIFSPVVKLNSEMDITPKLLWHPVMNGDKACGDVLVTAELILRGKDGSNLPILPPQRAPNLYMVPQGIRPVVQLTAIEILAWGLRNMKNFQMASITSPSLVVECGGERVESVVIKNLKKTPNFPSSVLFMKVFLPKEELYMPPLVIKVIDHRQFGRKPVVGQCTIERLDRFRCDPYAGKEDIVPQLKASLLSAPPCRDIVIEMEDTKPLLASKLTEKEEEIVDWWSKFYASSGEHEKCGQYIQKGYSKLKIYNCELENVAEFEGLTDFSDTFKLYRGKSDENEDPSVVGEFKGSFRIYPLPDDPSVPAPPRQFRELPDSVPQECTVRIYIVRGLELQPQDNNGLCDPYIKITLGKKVIEDRDHYIPNTLNPVFGRMYELSCYLPQEKDLKISVYDYDTFTRDEKVGETIIDLENRFLSRFGSHCGIPEEYCVSGVNTWRDQLRPTQLLQNVARFKGFPQPILSEDGSRIRYGGRDYSLDEFEANKILHQHLGAPEERLALHILRTQGLVPEHVETRTLHSTFQPNISQGKLQMWVDVFPKSLGPPGPPFNITPRKAKKYYLRVIIWNTKDVILDEKSITGEEMSDIYVKGWIPGNEENKQKTDVHYRSLDGEGNFNWRFVFPFDYLPAEQLCIVAKKEHFWSIDQTEFRIPPRLIIQIWDNDKFSLDDYLGFLELDLRHTIIPAKSPEKCRLDMIPDLKAMNPLKAKTASLFEQKSMKGWWPCYAEKDGARVMAGKVEMTLEILNEKEADERPAGKGRDEPNMNPKLDLPNRPETSFLWFTNPCKTMKFIVWRRFKWVIIGLLFLLILLLFVAVLLYSLPNYLSMKIVKPNV

SEQ ID NO: 7534 - protein, 383 aa, Homo sapiens
MDRTCEERPAEDGSDEEDPDSMEAPTRIRDTPEDIVLEAPASGLAFHPARDLLAAGDVDGDVFVFSYSCQEGETKELWSSGHHLKACRAVAFSEDGQKLITVSKDKAIHVLDVEQGQLERRVSKAHGAPINSLLLVDENVLATGDDTGGICLWDQRKEGPLMDMRQHEEYIADMALDPAKKLLLTASGDGCLGIFNIKRRRFELLSEPQSGDLTSVTLMKWGKKVACGSSEGTIYLFNWNGFGATSDRFALRAESIDCMVPVTESLLCTGSTDGVIRAVNILPNRVVGSVGQHTGEPVEELALSHCGRFLASSGHDQRLKFWDMAQLRAVVVDDYRRRKKKGGPLRALSSKTWSTDDFFAGLREEGEDSMAQEEKEETGDDSD

SEQ ID NO: 7535 - protein, 332 aa, Homo sapiens
MSEAGEEQPMETTGATENGHEAVPEGESPAGAGTGAAAGAGGATAAPPSGNQNGAEGDQINASKNEEDAGKMFVGGLSWDTSKKDLKDYFTKFGEVVDCTIKMDPNTGRSRGFGFILFKDAASVEKVLDQKEHRLDGRVIDPKKAMAMKKDPVKKIFVGGLNPEATEEKIREYFGEFGEIEAIELPMDPKLNKRRGFVFITFKEEEPVKKVLEKKFHTVSGSKCEIKVAQPKEVYQQQQYGSGGRGNRNRGNRGSGGGGGGGGQSQSWNQGYGNYWNQGYGYQQGYGPGYGGYDYSPYGYYGYGPGYDYSQGSTNYGKSQRRGGHQNNYKPY

SEQ ID NO: 7536 - protein, 3013 aa, Homo sapiens
MSNITIDPDVKPGEYVIKSLFAEFAVQAEKKIEVVMAEPLEKLLSRSLQRGEDLQFDQLISSMSSVAEHCLPSLLRTLFDWYRRQNGTEDESYEYRPRSSTKSKGDEQQRERDYLLERRDLAVDFIFCLVLVEVLKQIPVHPVPDPLVHEVLNLAFKHFKHKEGYSGTNTGNVHIIADLYAEVIGVLAQSKFQAVRKKFVTELKELRQKEQSPHVVQSVISLIMGMKFFRVKMYPVEDFEASFQFMQECAQYFLEVKDKDIKHALAGLFVEILIPVAAAVKNEVNVPCLKNFVEMLYQTTFELSSRKKHSLALYPLITCLLCVSQKQFFLNNWHIFLQNCLSHLKNKDPKMSRVALESLYRLLWVYVIRIKCESNTVTQSRLMSIVSALFPKGSRSVVPRDTPLNIFVKIIQFIAQERLDFAMKEIIFDLLSVGKSTKTFTINPERMNIGLRVFLVIADSLQQKDGEPPMPTTGVILPSGNTLRVKKIFLNKTLTDEEAKVIGMSVYYPQVRKALDSILRHLDKEVGRPMCMTSVQMSNKEPEDMITGERKPKIDLFRTCIAAIPRLIPDGMSRTDLIELLARLTIHMDEELRALAFNTLQALMLDFPDWREDVLSGFVYFIVREVTDVHPTLLDNAVKMLVQLINQWKQAAQMHNKNQDTQHGVANGASHPPPLERSPYSNVFHVVEGFALVILCSSRPATRRLAVSVLREIRALFALLEIPKGDDELAIDVMDRLSPSILESFIHLTGADQTTLLYCPSSIDLQTLAEWNSSPISHQFDVISPSHIWIFAHVTQGQDPWIISLSSFLKQENLPKHCSTAVSYAWMFAYTRLQLLSPQVDINSPINAKKVNTTTSSDSYIGLWRNYLILCCSAATSSSSTSAGSVRCSPPETLASTPDSGYSIDSKIIGIPSPSSLFKHIVPMMRSESMEITESLVLGLGRTNPGAFRELIEELHPIIKEALERRPENMKRRRRRDILRVQLVRIFELLADAGVISHSASGGLDNETHFLNNTLLEYVDLTRQLLEAENEKDSDTLKDIRCHFSALVANIIQNVPVHQRRSIFPQQSLRHSLFMLFSHWAGPFSIMFTPLDRYSDRNMQINRHQYCALKAMSAVLCCGPVADNVGLSSDGYLYKWLDNILDSLDKKVHQLGCEAVTLLLELNPDQSNLMYWAVDRCYTGSGRVAAGCFKAIANVFQNRDYQCDTVMLLNLILFKAADSSRSIYEVAMQLLQILEPKMFRYAHKLEVQRTDGVLSQLSPLPHLYSVSYYQLSEELARAYPELTLAIFSEISQRIQTAHPAGRQVMLHYLLPWMNNIELVDLKPLPTARRHDEDEDDSLKDRELMVTSRRWLRGEGWGSPQATAMVLNNLMYMTAKYGDELAWSEVENVWTTLADGWPKNLKIILHFLISICGVNSEPSLLPYVKKVIVYLGRDKTMQLLEELVSELQLTDPVSSGVTHMDNPPYYRITSSYKIPSVTSGTTSSSNTMVAPTDGNPDNKPIKENIEESYVHLDIYSGLNSHLNRQHHRLESRYSSSSGGSYEEEKSDSMPLYSNWRLKVMEHNQGEPLPFPPAGGCWSPLVDYVPETSSPGLPLHRCNIAVILLTDLIIDHSVKVEWGSYLHLLLHAIFIGFDHCHPEVYEHCKRLLLHLLIVMGPNSNIRTVASVLLRNKEFNEPRVLTVKQVAHLDYNFTAGINDFIPDYQPSPMTDSGLSSSSTSSSISLGNNSAAISHLHTTILNEVDISVEQDGKVKTLMEFITSRKRGPLWNHEDVSAKNPSIKSAEQLTTFLKHVVSVFKQSSSEGIHLEHHLSEVALQTALSCSSRHYAGRSFQIFRALKQPLTATTLSDVLSRLVETVGDPGEDAQGFVIELLLTLESAIDTLAETMKHYDLLSALSQTSYHDPIMGNKYAANRKSTGQLNLSTSPINSSSYLGYNSNARSNSLRLSLIGDRRGDRRRSNTLDIMDGRINHSSSLARTRSLSSLREKGMYDVQSTTEPTNLMATIFWIAASLLESDYEYEYLLALRLLNKLLIHLPLDKSESREKIENVQSKLKWTNFPGLQQLFLKGFTSASTQEMTVHLLSKLISVSKHTLVDPSQLSGFPLNILCLLPHLIQHFDSPTQFCKETASRIAKVCAEEKCPTLVNLAHMMSLYSTHTYSRDCSNWINVVCRYLHDSFSDTTFNLVTYLAELLEKGLSSMQQSLLQIIYSLLSHIDLSAAPAKQFNLEIIKIIGKYVQSPYWKEALNILKLVVSRSASLVVPSDIPKTYGGDTGSPEISFTKIFNNVSKELPGKTLDFHFDISETPIIGNKYGDQHSAAGRNGKPKVIAVTRSTSSTSSGSNSNALVPVSWKRPQLSQRRTREKLMNVLSLCGPESGLPKNPSVVFSSNEDLEVGDQQTSLISTTEDINQEEEVAVEDNSSEQQFGVFKDFDFLDVELEDAEGESMDNFNWGVRRRSLDSIDKGDTPSLQEYQCSSSTPSLNLTNQEDTDESSEEEAALTASQILSRTQMLNSDSATDETIPDHPDLLLQSEDSTGSITTEEVLQIRDETPTLEASLDNANSRLPEDTTSVLKEEHVTTFEDEGSYIIQEQQESLVCQGILDLEETEMPEPLAPESYPESVCEEDVTLALKELDERCEEEEADFSGLSSQDEEEQDGFPEVQTSPLPSPFLSAIIAAFQPVAYDDEEEAWRCHVNQMLSDTDGSSAVFTFHVFSRLFQTIQRKFGEITNEAVSFLGDSLQRIGTKFKSSLEVMMLCSECPTVFVDAETLMSCGLLETLKFGVLELQEHLDTYNVKREAAEQWLDDCKRTFGAKEDMYRINTDAQQMEILAELELCRRLYKLHFQLLLLFQAYCKLINQVNTIKNEAEVINMSEELAQLESILKEAESASENEEIDISKAAQTTIETAIHSLIETLKNKEFISAVAQVKAFRSLWPSDIFGSCEDDPVQTLLHIYFHHQTLGQTGSFAVIGSNLDMSEANYKLMELNLEIRESLRMVQSYQLLAQAKPMGNMVSTGF

SEQ ID NO: 7537 - protein, 839 aa, Homo sapiens
MGSWALLWPPLLFTGLLVRPPGTMAQAQYCSVNKDIFEVEENTNVTEPLVDIHVPEGQEVTLGALSTPFAFRIQGNQLFLNVTPDYEEKSLLEAQLLCQSGGTLVTQLRVFVSVLDVNDNAPEFPFKTKEIRVEEDTKVNSTVIPETQLQAEDRDKDDILFYTLQEMTAGASDYFSLVSVNRPALRLDRPLDFYERPNMTFWLLVRDTPGENVEPSHTATATLVLNVVPADLRPPWFLPCTFSDGYVCIQAQYHGAVPTGHILPSPLVLRPGPIYAEDGDRGINQPIIYSIFRGNVNGTFIIHPDSGNLTVARSVPSPMTFLLLVKGQQADLARYSVTQVTVEAVAAAGSPPRFPQRLYRGTVARGAGAGVVVKDAAAPSQPLRIQAQDPEFSDLNSAITYRITNHSHFRMEGEVVLTTTTLAQAGAFYAEVEAHNTVTSGTATTVIEIQVSEQEPPSTEAGGTTGPWTSTTSEVPRPPEPSQGPSTTSSGGGTGPHPPSGTTLRPPTSSTPGGPPGAENSTSHQPATPGGDTAQTPKPGTSQPMPPGVGTSTSHQPATPSGGTAQTPEPGTSQPMPPSMGTSTSHQPATPGGGTAQTPEAGTSQPMPPGMGTSTSHQPTTPGGGTAQTPEPGTSQPMPLSKSTPSSGGGPSEDKRFSVVDMAALGGVLGALLLLALLGLAVLVHKHYGPRLKCCCGKAPEPQPQGFDNQAFLPDHKANWAPVPSPTHDPKPAEAPMPAEPAPPGPASPGGAPEPPAAARAGGSPTAVRSILTKERRPEGGYKAVWFGEDIGTEADVVVLNAPTLDVDGASDSGSGDEGEGAGRGGGPYDAPGGDDSYI

SEQ ID NO: 7538 - protein, 1243 aa, Homo sapiens
MSEAPRFFVGPEDTEINPGNYRHFFHHADEDDEEEDDSPPERQIVVGICSMAKKSKSKPMKEILERISLFKYITVVVFEEEVILNEPVENWPLCDCLISFHSKGFPLDKAVAYAKLRNPFVINDLNMQYLIQDRREVYSILQAEGILLPRYAILNRDPNNPKECNLIEGEDHVEVNGEVFQKPFVEKPVSAEDHNVYIYYPTSAGGGSQRLFRKIGSRSSVYSPESNVRKTGSYIYEEFMPTDGTDVKVYTVGPDYAHAEARKSPALDGKVERDSEGKEVRYPVILNAREKLIAWKVCLAFKQTVCGFDLLRANGQSYVCDVNGFSFVKNSMKYYDDCAKILGNIVMRELAPQFHIPWSIPLEAEDIPIVPTTSGTMMELRCVIAVIRHGDRTPKQKMKMEVRHQKFFDLFEKCDGYKSGKLKLKKPKQLQEVLDIARQLLMELGQNNDSEIEENKPKLEQLKTVLEMYGHFSGINRKVQLTYLPHGCPKTSSEEEDSRREEPSLLLVLKWGGELTPAGRVQAEELGRAFRCMYPGGQGDYAGFPGCGLLRLHSTYRHDLKIYASDEGRVQMTAAAFAKGLLALEGELTPILVQMVKSANMNGLLDSDSDSLSSCQQRVKARLHEILQKDRDFTAEDYEKLTPSGSISLIKSMHLIKNPVKTCDKVYSLIQSLTSQIRHRMEDPKSSDIQLYHSETLELMLRRWSKLEKDFKTKNGRYDISKIPDIYDCIKYDVQHNGSLKLENTMELYRLSKALADIVIPQEYGITKAEKLEIAKGYCTPLVRKIRSDLQRTQDDDTVNKLHPVYSRGVLSPERHVRTRLYFTSESHVHSLLSILRYGALCNESKDEQWKRAMDYLNVVNELNYMTQIVIMLYEDPNKDLSSEERFHVELHFSPGAKGCEEDKNLPSGYGYRPASRENEGRRPFKIDNDDEPHTSKRDEVDRAVILFKPMVSEPIHIHRKSPLPRSRKTATNDEESPLSVSSPEGTGTWLHYTSGVGTGRRRRRSGEQITSSPVSPKSLAFTSSIFGSWQQVVSENANYLRTPRTLVEQKQNPTVGSHCAGLFSTSVLGGSSSAPNLQDYARTHRKKLTSSGCIDDATRGSAVKRFSISFARHPTNGFELYSMVPSICPLETLHNALSLKQVDEFLASIASPSSDVPRKTAEISSTALRSSPIMRKKVSLNTYTPAKILPTPPATLKSTKASSKPATSGPSSAVVPNTSSRKKNITSKTETHEHKKNTGKKK

SEQ ID NO: 7539 - protein, 855 aa, Homo sapiens
MVVMARLSRPERPDLVFEEEDLPYEEEIMRNQFSVKCWLRYIEFKQGAPKPRLNQLYERALKLLPCSYKLWYRYLKARRAQVKHRCVTDPAYEDVNNCHERAFVFMHKMPRLWLDYCQFLMDQGRVTHTRRTFDRALRALPITQHSRIWPLYLRFLRSHPLPETAVRGYRRFLKLSPESAEEYIEYLKSSDRLDEAAQRLATVVNDERFVSKAGKSNYQLWHELCDLISQNPDKVQSLNVDAIIRGGLTRFTDQLGKLWCSLADYYIRSGHFEKARDVYEEAIRTVMTVRDFTQVFDSYAQFEESMIAAKMETASELGREEEDDVDLELRLARFEQLISRRPLLLNSVLLRQNPHHVHEWHKRVALHQGRPREIINTYTEAVQTVDPFKATGKPHTLWVAFAKFYEDNGQLDDARVILEKATKVNFKQVDDLASVWCQCGELELRHENYDEALRLLRKATALPARRAEYFDGSEPVQNRVYKSLKVWSMLADLEESLGTFQSTKAVYDRILDLRIATPQIVINYAMFLEEHKYFEESFKAYERGISLFKWPNVSDIWSTYLTKFIARYGGRKLERARDLFEQALDGCPPKYAKTLYLLYAQLEEEWGLARHAMAVYERATRAVEPAQQYDMFNIYIKRAAEIYGVTHTRGIYQKAIEVLSDEHAREMCLRFADMECKLGEIDRARAIYSFCSQICDPRTTGAFWQTWKDFEVRHGNEDTIKEMLRIRRSVQATYNTQVNFMASQMLKVSGSATGTVSDLAPGQSGMDDMKLLEQRAEQLAAEAERDQPLRAQSKILFVRSDASREELAELAQQVNPEEIQLGEDEDEDEMDLEPNEVRLEQQSVPAAVFGSLKED

SEQ ID NO: 7540 - protein, 396 aa, Homo sapiens
MTNEEPLPKKVRLSETDFKVMARDELILRWKQYEAYVQALEGKYTDLNSNDVTGLRESEEKLKQQQQESARRENILVMRLATKEQEMQECTTQIQYLKQVQQPSVAQLRSTMVDPAINLFFLKMKGELEQTKDKLEQAQNELSAWKFTPDSQTGKKLMAKCRMLIQENQELGRQLSQGRIAQLEAELALQKKYSEELKSSQDELNDFIIQLDEEVEGMQSTILVLQQQLKETRQQLAQYQQQQSQASAPSTSRTTASEPVEQSEATSKDCSRLTNGPSNGSSSRQRTSGSGFHREGNTTEDDFPSSPGNGNKSSNSSEERTGRGGSGYVNQLSAGYESVDSPTGSENSLTHQSNDTDSSHDPQEEKAVSGKGNRTVGSRHVQNGLDSSVNVQGSVL

SEQ ID NO: 7541 - protein, 263 aa, Homo sapiens
MALVLILQLLTLWPLCHTDITPSVPPASYHPKPWLGAQPATVVTPGVNVTLRCRAPQPAWRFGLFKPGEIAPLLFRDVSSELAEFFLEEVTPAQGGSYRCCYRRPDWGPGVWSQPSDVLELLVTEELPRPSLVALPGPVVGPGANVSLRCAGRLRNMSFVLYREGVAAPLQYRHSAQPWADFTLLGARAPGTYSCYYHTPSAPYVLSQRSEVLVISWEDSGSSDYTRGNLVRLGLAGLVLISLGALVTFDWRSQNRAPAGIRP

SEQ ID NO: 7542 - protein, 360 aa, Homo sapiens
MVPAAGRRPPRVMRLLGWWQVLLWVLGLPVRGVEVAEESGRLWSEEQPAHPLQVGAVYLGEEELLHDPMGQDRAAEEANAVLGLDTQGDHMVMLSVIPGEAEDKVSSEPSGVTCGAGGAEDSRCNVRESLFSLDGAGAHFPDREEEYYTEPEVAESDAAPTEDSNNTESLKSPKVNCEERNITGLENFTLKILNMSQDLMDFLNPNGSDCTLVLFYTPWCRFSASLAPHFNSLPRAFPALHFLALDASQHSSLSTRFGTVAVPNILLFQGAKPMARFNHTDRTLETLKIFIFNQTGIEAKKNVVVTQADQIGPLPSTLIKSVDWLLVFSLFFLISFIMYATIRTESIRWLIPGQEQEHVE

SEQ ID NO: 7543 - protein, 461 aa, Homo sapiens
MGHLSAPLHRVRVPWQGLLLTASLLTFWNPPTTAQLTTESMPFNVAEGKEVLLLVHNLPQQLFGYSWYKGERVDGNRQIVGYAIGTQQATPGPANSGRETIYPNASLLIQNVTQNDTGFYTLQVIKSDLVNEEATGQFHVYPELPKPSISSNNSNPVEDKDAVAFTCEPETQDTTYLWWINNQSLPVSPRLQLSNGNRTLTLLSVTRNDTGPYECEIQNPVSANRSDPVTLNVTYGPDTPTISPSDTYYRPGANLSLSCYAASNPPAQYSWLINGTFQQSTQELFIPNITVNNSGSYTCHANNSVTGCNRTTVKTIIVTERQNLTMLPRLDSNSWAQAILPSVSQSAEITDNALPQENGLSPGAIAGIVIGVVALVALIAVALACFLHFGKTGRASDQRDLTEHKPSVSNHTQDHSNDPPNKMNEVTYSTLNFEAQQPTQPTSASPSLTATEIIYSEVKKQ

SEQ ID NO: 7544 - protein, 1232 aa, Homo sapiens
MDLEAAKNGTAWRPTSAEGDFELGISSKQKRKKTKTVKMIGVLTLFRYSDWQDKLFMSLGTIMAIAHGSGLPLMMIVFGEMTDKFVDTAGNFSFPVNFSLSLLNPGKILEEEMTRYAYYYSGLGAGVLVAAYIQVSFWTLAAGRQIRKIRQKFFHAILRQEIGWFDINDTTELNTRLTDDISKISEGIGDKVGMFFQAVATFFAGFIVGFIRGWKLTLVIMAISPILGLSAAVWAKILSAFSDKELAAYAKAGAVAEEALGAIRTVIAFGGQNKELERYQKHLENAKEIGIKKAISANISMGIAFLLIYASYALAFWYGSTLVISKEYTIGNAMTVFFSILIGAFSVGQAAPCIDAFANARGAAYVIFDIIDNNPKIDSFSERGHKPDSIKGNLEFNDVHFSYPSRANVKILKGLNLKVQSGQTVALVGSSGCGKSTTVQLIQRLYDPDEGTINIDGQDIRNFNVNYLREIIGVVSQEPVLFSTTIAENICYGRGNVTMDEIKKAVKEANAYEFIMKLPQKFDTLVGERGAQLSGGQKQRIAIARALVRNPKILLLDEATSALDTESEAEVQAALDKAREGRTTIVIAHRLSTVRNADVIAGFEDGVIVEQGSHSELMKKEGVYFKLVNMQTSGSQIQSEEFELNDEKAATRMAPNGWKSRLFRHSTQKNLKNSQMCQKSLDVETDGLEANVPPVSFLKVLKLNKTEWPYFVVGTVCAIANGGLQPAFSVIFSEIIAIFGPGDDAVKQQKCNIFSLIFLFLGIISFFTFFLQGFTFGKAGEILTRRLRSMAFKAMLRQDMSWFDDHKNSTGALSTRLATDAAQVQGATGTRLALIAQNIANLGTGIIISFIYGWQLTLLLLAVVPIIAVSGIVEMKLLAGNAKRDKKELEAAGKIATEAIENIRTVVSLTQERKFESMYVEKLYGPYRVFSAIVFGAVALGHASSFAPDYAKAKLSAAHLFMLFERQPLIDSYSEEGLKPDKFEGNITFNEVVFNYPTRANVPVLQGLSLEVKKGQTLALVGSSGCGKSTVVQLLERFYDPLAGTVLLDGQEAKKLNVQWLRAQLGIVSQEPILFDCSIAENIAYGDNSRVVSQDEIVSAAKAANIHPFIETLPHKYETRVGDKGTQLSGGQKQRIAIARALIRQPQILLLDEATSALDTESEKVVQEALDKAREGRTCIVIAHRLSTIQNADLIVVFQNGRVKEHGTHQQLLAQKGIYFSMVSVQAGTQNL

SEQ ID NO: 7545 - protein, 226 aa, Homo sapiens
MGPLPRTVELFYDVLSPYSWLGFEILCRYQNIWNINLQLRPSLITGIMKDSGNKPPGLLPRKGLYMANDLKLLRHHLQIPIHFPKDFLSVMLEKGSLSAMRFLTAVNLEHPEMLEKASRELWMRVWSRNEDITEPQSILAAAEKAGMSAEQAQGLLEKIATPKVKNQLKETTEAACRYGAFGLPITVAHVDGQTHMLFGSDRMELLAHLLGEKWMGPIPPAVNARL

SEQ ID NO: 7546 - protein, 946 aa, Homo sapiens
MKRLTCFFICFFLSEVSGFEIPINGLSEFVDYEDLVELAPGKFQLVAENRRYQRSLPGESEEMMEEVDQVTLYSYKVQSTITSRMATTMIQSKVVNNSPQPQNVVFDVQIPKGAFISNFSMTVDGKTFRSSIKEKTVGRALYAQARAKGKTAGLVRSSALDMENFRTEVNVLPGAKVQFELHYQEVKWRKLGSYEHRIYLQPGRLAKHLEVDVWVIEPQGLRFLHVPDTFEGHFDGVPVISKGQQKAHVSFKPTVAQQRICPNCRETAVDGELVVLYDVKREEKAGELEVFNGYFVHFFAPDNLDPIPKNILFVIDVSGSMWGVKMKQTVEAMKTILDDLRAEDHFSVIDFNQNIRTWRNDLISATKTQVADAKRYIEKIQPSGGTNINEALLRAIFILNEANNLGLLDPNSVSLIILVSDGDPTVGELKLSKIQKNVKENIQDNISLFSLGMGFDVDYDFLKRLSNENHGIAQRIYGNQDTSSQLKKFYNQVSTPLLRNVQFNYPHTSVTDVTQNNFHNYFGGSEIVVAGKFDPAKLDQIESVITATSANTQLVLETLAQMDDLQDFLSKDKHADPDFTRKLWAYLTINQLLAERSLAPTAAAKRRITRSILQMSLDHHIVTPLTSLVIENEAGDERMLADAPPQDPSCCSGALYYGSKVVPDSTPSWANPSPTPVISMLAQGSQVLESTPPPHVMRVENDPHFIIYLPKSQKNICFNIDSEPGKILNLVSDPESGIVVNGQLVGAKKPNNGKLSTYFGKLGFYFQSEDIKIEISTETITLSHGSSTFSLSWSDTAQVTNQRVQISVKKEKVVTITLDKEMSFSVLLHRVWKKHPVNVDFLGIYIPPTNKFSPKAHGLIGQFMQEPKIHIFNERPGKDPEKPEASMEVKGQKLIITRGLQKDYRTDLVFGTDVTCWFVHNSGKGFIDGHYKDYFVPQLYSFLKRP

SEQ ID NO: 7547 - protein, 976 aa, Homo sapiens
MELQAARACFALLWGCALAAAAAAQGKEVVLLDFAAAGGELGWLTHPYGKGWDLMQNIMNDMPIYMYSVCNVMSGDQDNWLRTNWVYRGEAERIFIELKFTVRDCNSFPGGASSCKETFNLYYAESDLDYGTNFQKRLFTKIDTIAPDEITVSSDFEARHVKLNVEERSVGPLTRKGFYLAFQDIGACVALLSVRVYYKKCPELLQGLAHFPETIAGSDAPSLATVAGTCVDHAVVPPGGEEPRMHCAVDGEWLVPIGQCLCQAGYEKVEDACQACSPGFFKFEASESPCLECPEHTLPSPEGATSCECEEGFFRAPQDPASMPCTRPPSAPHYLTAVGMGAKVELRWTPPQDSGGREDIVYSVTCEQCWPESGECGPCEASVRYSEPPHGLTRTSVTVSDLEPHMNYTFTVEARNGVSGLVTSRSFRTASVSINQTEPPKVRLEGRSTTSLSVSWSIPPPQQSRVWKYEVTYRKKGDSNSYNVRRTEGFSVTLDDLAPDTTYLVQVQALTQEGQGAGSKVHEFQTLSPEGSGNLAVIGGVAVGVVLLLVLAGVGFFIHRRRKNQRARQSPEDVYFSKSEQLKPLKTYVDPHTYEDPNQAVLKFTTEIHPSCVTRQKVIGAGEFGEVYKGMLKTSSGKKEVPVAIKTLKAGYTEKQRVDFLGEAGIMGQFSHHNIIRLEGVISKYKPMMIITEYMENGALDKFLREKDGEFSVLQLVGMLRGIAAGMKYLANMNYVHRDLAARNILVNSNLVCKVSDFGLSRVLEDDPEATYTTSGGKIPIRWTAPEAISYRKFTSASDVWSFGIVMWEVMTYGERPYWELSNHEVMKAINDGFRLPTPMDCPSAIYQLMMQCWQQERARRPKFADIVSILDKLIRAPDSLKTLADFDPRVSIRLPSTSGSEGVPFRTVSEWLESIKMQQYTEHFMAAGYTAIEKVVQMTNDDIKRIGVRLPGHQKRIAYSLLGLKDQVNTVGIPI

SEQ ID NO: 7548 - protein, 55 aa, Homo sapiens
MVKLSKEAKQRLQQLFKGSQFAIRWGFIPLVIYLGFKRGADPGMPEPTVLSLLWG

SEQ ID NO: 7549 - protein, 385 aa, Homo sapiens
MEVTASSRHYVDRLFDPDPQKVLQGVIDMKNAVIGNNKQKANLIVLGAVPRLLYLLQQETSSTELKTECAVVLGSLAMGTENNVKSLLDCHIIPALLQGLLSPDLKFIEACLRCLRTIFTSPVTPEELLYTDATVIPHLMALLSRSRYTQEYICQIFSHCCKGPDHQTILFNHGAVQNIAHLLTSLSYKVRMQALKCFSVLAFENPQVSMTLVNVLVDGELLPQIFVKMLQRDKPIEMQLTSAKCLTYMCRAGAIRTDDNCIVLKTLPCLVRMCSKERLLEERVEGAETLAYLIEPDVELQRIASITDHLIAMLADYFKYPSSVSAITDIKRLDHDLKHAHELRQAAFKLYASLGANDEDIRKKVSLGEGRPPVLTASRQGVTST

SEQ ID NO: 7550 - protein, 730 aa, Homo sapiens
MEELIVELRLFLELLDHEYLTSTVREKKAVITNILLRIQSSKGFDVKDHAQKQETANSLPAPPQMPLPEIPQPWLPPDSGPPPLPTSSLPEGYYEEAVPLSPGKAPEYITSNYDSDAMSSSYESYDEEEEDGKGKKTRHQWPSEEASMDLVKDAKICAFLLRKKRFGQWTKLLCVIKDTKLLCYKSSKDQQPQMELPLQGCNITYIPKDSKKKKHELKITQQGTDPLVLAVQSKEQAEQWLKVIKEAYSGCSGPVDSECPPPPSSPVHKAELEKKLSSERPSSDGEGVVENGITTCNGKEQVKRKKSSKSEAKGTVSKVTGKKITKIISLGKKKPSTDEQTSSAEEDVPTCGYLNVLSNSRWRERWCRVKDNKLIFHKDRTDLKTHIVSIPLRGCEVIPGLDSKHPLTFRLLRNGQEVAVLEASSSEDMGRWIGILLAETGSSTDPEALHYDYIDVEMSASVIQTAKQTFCFMNRRVISANPYLGGTSNGYAHPSGTALHYDDVPCINGSLKGKKPPVASNGVTGKGKTLSSQPKKADPAAVVKRTGSNAAQYKYGKNRVEADAKRLQTKEEELLKRKEALRNRLAQLRKERKDLRAAIEVNAGRKPQAILEEKLKQLEEECRQKEAERVSLELELTEVKESLKKALAGGVTLGLAIEPKSGTSSPQSPVFRHRTLENSPISSCDTSDTEGPVPVNSAAVLKKSQAAPGSSPCRGHVLRKAKEWELKNGT

SEQ ID NO: 7551 - protein, 1127 aa, Homo sapiens
MAENKGGGEAESGGGGSGSAPVTAGAAGPAAQEAEPPLTAVLVEEEEEEGGRAGAEGGAAGPDDGGVAAASSGSAQAASSPAASVGTGVAGGAVSTPAPAPASAPAPGPSAGPPPGPPASLLDTCAVCQQSLQSRREAEPKLLPCLHSFCLRCLPEPERQLSVPIPGGSNGDIQQVGVIRCPVCRQECRQIDLVDNYFVKDTSEAPSSSDEKSEQVCTSCEDNASAVGFCVECGEWLCKTCIEAHQRVKFTKDHLIRKKEDVSESVGASGQRPVFCPVHKQEQLKLFCETCDRLTCRDCQLLEHKEHRYQFLEEAFQNQKGAIENLLAKLLEKKNYVHFAATQVQNRIKEVNETNKRVEQEIKVAIFTLINEINKKGKSLLQQLENVTKERQMKLLQQQNDITGLSRQVKHVMNFTNWAIASGSSTALLYSKRLITFQLRHILKARCDPVPAANGAIRFHCDPTFWAKNVVNLGNLVIESKPAPGYTPNVVVGQVPPGTNHISKTPGQINLAQLRLQHMQQQVYAQKHQQLQQMRMQQPPAPVPTTTTTTQQHPRQAAPQMLQQQPPRLISVQTMQRGNMNCGAFQAHQMRLAQNAARIPGIPRHSGPQYSMMQPHLQRQHSNPGHAGPFPVVSVHNTTINPTSPTTATMANANRGPTSPSVTAIELIPSVTNPENLPSLPDIPPIQLEDAGSSSLDNLLSRYISGSHLPPQPTSTMNPSPGPSALSPGSSGLSNSHTPVRPPSTSSTGSRGSCGSSGRTAEKTSLSFKSDQVKVKQEPGTEDEICSFSGGVKQEKTEDGRRSACMLSSPESSLTPPLSTNLHLESELDALASLENHVKIEPADMNESCKQSGLSSLVNGKSPIRSLMHRSARIGGDGNNKDDDPNEDWCAVCQNGGDLLCCEKCPKVFHLTCHVPTLLSFPSGDWICTFCRDIGKPEVEYDCDNLQHSKKGKTAQGLSPVDQRKCERLLLYLYCHELSIEFQEPVPASIPNYYKIIKKPMDLSTVKKKLQKKHSQHYQIPDDFVADVRLIFKNCERFNEMMKVVQVYADTQEINLKADSEVAQAGKAVALYFEDKLTEIYSDRTFAPLPEFEQEEDDGEVTEDSDEDFIQPRRKRLKSDERPVHIK

SEQ ID NO: 7552 - protein, 538 aa, Homo sapiens
MEGGRRARVVIESKRNFFLGAFPTPFPAEHVELGRLGDSETAMVPGKGGADYILLPFKKMDFSRNLYDIGEQLDSEDLASLKFLSLDYIPQRKQEPIKDALMLFQRLQEKRMLEESNLSFLKELLFRINRLDLLITYLNTRKEEMERELQTPGRAQISAYRVMLYQISEEVSRSELRSFKFLLQEEISKCKLDDDMNLLDIFIEMEKRVILGEGKLDILKRVCAQINKSLLKIINDYEEFSKERSSSLEGSPDEFSNGEELCGVMTISDSPREQDSESQTLDKVYQMKSKPRGYCLIINNHNFAKAREKVPKLHSIRDRNGTHLDAGALTTTFEELHFEIKPHDDCTVEQIYEILKIYQLMDHSNMDCFICCILSHGDKGIIYGTDGQEAPIYELTSQFTGLKCPSLAGKPKVFFIQACQGDNYQKGIPVETDSEEQPYLEMDLSSPQTRYIPDEADFLLGMATVNNCVSYRNPAEGTWYIQSLCQSLRERCPRGDDILTILTEVNYEVSNKDDKKNMGKQMPQPTFTLRKKLVFPSD

SEQ ID NO: 7553 - protein, 821 aa, Homo sapiens
MVSWGRFICLVVVTMATLSLARPSFSLVEDTTLEPEEPPTKYQISQPEVYVAAPGESLEVRCLLKDAAVISWTKDGVHLGPNNRTVLIGEYLQIKGATPRDSGLYACTASRTVDSETWYFMVNVTDAISSGDDEDDTDGAEDFVSENSNNKRAPYWTNTEKMEKRLHAVPAANTVKFRCPAGGNPMPTMRWLKNGKEFKQEHRIGGYKVRNQHWSLIMESVVPSDKGNYTCVVENEYGSINHTYHLDVVERSPHRPILQAGLPANASTVVGGDVEFVCKVYSDAQPHIQWIKHVEKNGSKYGPDGLPYLKVLKAAGVNTTDKEIEVLYIRNVTFEDAGEYTCLAGNSIGISFHSAWLTVLPAPGREKEITASPDYLEIAIYCIGVFLIACMVVTVILCRMKNTTKKPDFSSQPAVHKLTKRIPLRRQVTVSAESSSSMNSNTPLVRITTRLSSTADTPMLAGVSEYELPEDPKWEFPRDKLTLGKPLGEGCFGQVVMAEAVGIDKDKPKEAVTVAVKMLKDDATEKDLSDLVSEMEMMKMIGKHKNIINLLGACTQDGPLYVIVEYASKGNLREYLRARRPPGMEYSYDINRVPEEQMTFKDLVSCTYQLARGMEYLASQKCIHRDLAARNVLVTENNVMKIADFGLARDINNIDYYKKTTNGRLPVKWMAPEALFDRVYTHQSDVWSFGVLMWEIFTLGGSPYPGIPVEELFKLLKEGHRMDKPANCTNELYMMMRDCWHAVPSQRPTFKQLVEDLDRILTLTTNEEYLDLSQPLEQYSPSYPDTRSSCSSGDDSVFSPDPMPYEPCLPQYPHINGSVKT

SEQ ID NO: 7554 - protein, 2263 aa, Homo sapiens
MMLLILFLVIICSHISVNQDSGPEYADVVFLVDSSDRLGSKSFPFVKMFITKMISSLPIEADKYRVALAQYSDKLHSEFHLSTFKGRSPMLNHLRKNFGFIGGSLQIGKALQEAHRTYFSAPANGRDKKQFPPILVVLASSESEDNVEEASKALRKDGVKIISVGVQKASEENLKAMATSQFHFNLRTVRDLSMFSQNMTHIIKDVIKYKEGAVDDIFVEACQGPSMADVVFLLDMSINGSEENFDYLKGFLEESVSALDIKENCMRVGLVAYSNETKVINSLSMGINKSEVLQHIQNLSPRTGKAYTGAAIKKLRKEVFSARNGSRKNQGVPQIAVLVTHRDSEDNVTKAAVNLRREGVTIFTLGIEGASDTQLEKIASHPAEQYVSKLKTFADLAAHNQTFLKKLRNQITHTVSVFSERTETLKSGCVDTEEADIYLLIDGSGSTQATDFHEMKTFLSEVVGMFNIAPHKVRVGAVQYADSWDLEFEINKYSNKQDLGKAIENIRQMGGNTNTGAALNFTLSLLQKAKKQRGNKVPCHLVVLTNGMSKDSILEPANRLREEHIRVYAIGIKEANQTQLREIAGEEKRVYYVHDFDALKDIRNQVVQEICTEEACKEMKADIMFLVDSSGSIGPENFSKMKTFMKNLVSKSQIGPDRVQIGVVQFSDINKEEFQLNRFMSQSDISNAIDQMAHIGQTTLTGSALSFVSQYFSPTKGARPNIRKFLILITDGEAQDIVKEPAVVLRQEGVIIYSVGVFGSNVTQLEEISGRPEMVFYVENFDILQRIEDDLVFGICSPREECKRIEVLDVVFVIDSSGSIDYDEYNIMKDFMIGLVKKADVGKNQVRFGALKYADDPEVLFYLDDFGTKLEVISVLQNDQAMGGSTYTAEALGFSDHMFTEARGSRLNKGVPQVLIVITDGESHDADKLNATAKALRDKGILVLAVGIDGANPVELLAMAGSSDKYFFVETFGGLKGIFSDVTASVCNSSKVDCEIDKVDLVFLMDGSTSIQPNDFKKMKEFLASVVQDFDVSLNRVRIGAAQFSDTYHPEFPLGTFIGEKEISFQIENIKQIFGNTHIGAALREVEHYFRPDMGSRINTGTPQVLLVLTDGQSQDEVAQAAEALRHRGIDIYSVGIGDVDDQQLIQITGTAEKKLTVHNFDELKKVNKRIVRNICTTAGESNCFVDVVVGFDVSTQEKGQTLLEGQPWMETYLQDILRAISSLNGVSCEVGTETQVSVAFQVTNAMEKYSPKFEIYSENILNSLKDITVKGPSLLNANLLDSLWDTFQNKSAARGKVVLLFSDGLDDDVEKLEQKSDELRKEGLNALITVALDGPADSSDLADLPYIEFGKGFEYRTQLSIGMRELGSRLSKQLVNVAERTCCCLFCKCIGGDGTMGDPGPPGKRGPPGFKGSEGYLGEEGIAGERGAPGPVGEQGTKGCYGTKGPKGNRGLNGQEGEVGENGIDGLNGEQGDNGLPGRKGEKGDEGSQGSPGKRGTPGDRGAKGLRGDPGAPGVDSSIEGPTGLKGERGRQGRRGWPGPPGTPGSRRKTAAHGRRGHTGPQGTAGIPGPDGLEGSLGLKGPQGPRGEAGVKGEKGGVGSKGPQGPPGPGGEAGNQGRLGSQGNKGEPGDLGEKGAVGFPGPRGLQGNDGSPGYGSVGRKGAKGQEGFPGESGPKGEIGDPGGPGETGLKGARGKMISAGLPGEMGSPGEPGPPGRKGVKGAKGLASFSTCELIQYVRDRSPGRHGKPECPVHPTELVFALDHSRDVTEQEFERMKEMMAFLVRDIKVRENSCPVGAHIAILSYNSHARHLVRFSDAYKKSQLLREIETIPYERSSASREIGRAMRFISRNVFKRTLPGAHTRKIATFFSSGQSADAHSITTAAMEFGALEIIPVVITFSNVPSVRRAFAIDDTGTFQVIVVPSGADYIPALERLQRCTFCYDVCKPDASCDQARPPPVQSYMDAAFLLDASRNMGSAEFEDIRAFLGALLDHFEITPEPETSVTGDRVALLSHAPPDFLPNTQKSPVRAEFNLTTYRSKRLMKRHVHESVKQLNGDAFIGHALQWTLDNVFLSTPNLRRNKVIFVISAGETSHLDGEILKKESLRAKCQGYALFVFSLGPIWDDKELEDLASHPLDHHLVQLGRIHKPDHSYGVKFVKSFINSIRRAINKYPPINLKIKCNRLNSIDPKQPPRPFRSFVPGPLKATLKEDVLQKAKFFQDKKYLSRVARSGRDDAIQNFMRSTSHTFKNGRMIESAPKQHD

SEQ ID NO: 7555 - protein, 273 aa, Homo sapiens
MLKPALEPRGGFSFENCQRNASLERVLPGLKVPHARKTGTTIAGLVFQDGVILGADTRATNDSVVADKSCEKIHFIAPKIYCCGAGVAADAEMTTRMVASKMELHALSTGREPRVATVTRILRQTLFRYQGHVGASLIVGGVDLTGPQLYGVHPHGSYSRLPFTALGSGQDAALAVLEDRFQPNMTLEAAQGLLVEAVTAGILGDLGSGGNVDACVITKTGAKLLRTLSSPTEPVKRSGRYHFVPGTTAVLTQTVKPLTLELVEETVQAMEVE

SEQ ID NO: 7556 - protein, 113 aa, Homo sapiens
MLVLFLLGTVFLLCPYWGELHDPIKATEIMCYECKKYHLGLCYGVMTSCSLKHKQSCAVENFYILTRKGQSMYHYSKLSCMTSCEDINFLGFTKRVELICCDHSNYCNLPEGV

SEQ ID NO: 7557 - protein, 798 aa, Homo sapiens
MSFDPNLLHNNGHNGYPNGTSAALRETGVIEKLLTSYGFIQCSERQARLFFHCSQYNGNLQDLKVGDDVEFEVSSDRRTGKPIAVKLVKIKQEILPEERMNGQVVCAVPHNLESKSPAAPGQSPTGSVCYERNGEVFYLTYTPEDVEGNVQLETGDKINFVIDNNKHTGAVSARNIMLLKKKQARCQGVVCAMKEAFGFIERGDVVKEIFFHYSEFKGDLETLQPGDDVEFTIKDRNGKEVATDVRLLPQGTVIFEDISIEHFEGTVTKVIPKVPSKNQNDPLPGRIKVDFVIPKELPFGDKDTKSKVTLLEGDHVRFNISTDRRDKLERATNIEVLSNTFQFTNEAREMGVIAAMRDGFGFIKCVDRDVRMFFHFSEILDGNQLHIADEVEFTVVPDMLSAQRNHAIRIKKLPKGTVSFHSHSDHRFLGTVEKEATFSNPKTTSPNKGKEKEAEDGIIAYDDCGVKLTIAFQAKDVEGSTSPQIGDKVEFSISDKQRPGQQVATCVRLLGRNSNSKRLLGYVATLKDNFGFIETANHDKEIFFHYSEFSGDVDSLELGDMVEYSLSKGKGNKVSAEKVNKTHSVNGITEEADPTIYSGKVIRPLRSVDPTQTEYQGMIEIVEEGDMKGEVYPFGIVGMANKGDCLQKGESVKFQLCVLGQNAQTMAYNITPLRRATVECVKDQFGFINYEVGDSKKLFFHVKEVQDGIELQAGDEVEFSVILNQRTGKCSACNVWRVCEGPKAVAAPRPDRLVNRLKNITLDDASAPRLMVLRQPRGPDNSMGFGAERKIRQAGVID

SEQ ID NO: 7558 - protein, 2578 aa, Homo sapiens
MPVTEKDLAEDAPWKKIQQNTFTRWCNEHLKCVNKRIGNLQTDLSDGLRLIALLEVLSQKRMYRKYHQRPTFRQMQLENVSVALEFLDRESIKLVSIDSKAIVDGNLKLILGLVWTLILHYSISMPVWEDEGDDDAKKQTPKQRLLGWIQNKIPYLPITNFNQNWQDGKALGALVDSCAPGLCPDWESWDPQKPVDNAREAMQQADDWLGVPQVITPEEIIHPDVDEHSVMTYLSQFPKAKLKPGAPLKPKLNPKKARAYGRGIEPTGNMVKQPAKFTVDTISAGQGDVMVFVEDPEGNKEEAQVTPDSDKNKTYSVEYLPKVTGLHKVTVLFAGQHISKSPFEVSVDKAQGDASKVTAKGPGLEAVGNIANKPTYFDIYTAGAGVGDIGVEVEDPQGKNTVELLVEDKGNQVYRCVYKPMQPGPHVVKIFFAGDTIPKSPFVVQVGEACNPNACRASGRGLQPKGVRIRETTDFKVDTKAAGSGELGVTMKGPKGLEELVKQKDFLDGVYAFEYYPSTPGRYSIAITWGGHHIPKSPFEVQVGPEAGMQKVRAWGPGLHGGIVGRSADFVVESIGSEVGSLGFAIEGPSQAKIEYNDQNDGSCDVKYWPKEPGEYAVHIMCDDEDIKDSPYMAFIHPATGGYNPDLVRAYGPGLEKSGCIVNNLAEFTVDPKDAGKAPLKIFAQDGEGQRIDIQMKNRMDGTYACSYTPVKAIKHTIAVVWGGVNIPHSPYRVNIGQGSHPQKVKVFGPGVERSGLKANEPTHFTVDCTEAGEGDVSVGIKCDARVLSEDEEDVDFDIIHNANDTFTVKYVPPAAGRYTIKVLFASQEIPASPFRVKVDPSHDASKVKAEGPGLSKAGVENGKPTHFTVYTKGAGKAPLNVQFNSPLPGDAVKDLDIIDNYDYSHTVKYTPTQQGNMQVLVTYGGDPIPKSPFTVGVAAPLDLSKIKLNGLENRVEVGKDQEFTVDTRGAGGQGKLDVTILSPSRKVVPCLVTPVTGRENSTAKFIPREEGLYAVDVTYDGHPVPGSPYTVEASLPPDPSKVKAHGPGLEGGLVGKPAEFTIDTKGAGTGGLGLTVEGPCEAKIECSDNGDGTCSVSYLPTKPGEYFVNILFEEVHIPGSPFKADIEMPFDPSKVVASGPGLEHGKVGEAGLLSVDCSEAGPGALGLEAVSDSGTKAEVSIQNNKDGTYAVTYVPLTAGMYTLTMKYGGELVPHFPARVKVEPAVDTSRIKVFGPGIEGKDVFREATTDFTVDSRPLTQVGGDHIKAHIANPSGASTECFVTDNADGTYQVEYTPFEKGLHVVEVTYDDVPIPNSPFKVAVTEGCQPSRVQAQGPGLKEAFTNKPNVFTVVTRGAGIGGLGITVEGPSESKINCRDNKDGSCSAEYIPFAPGDYDVNITYGGAHIPGSPFRVPVKDVVDPSKVKIAGPGLGSGVRARVLQSFTVDSSKAGLAPLEVRVLGPRGLVEPVNVVDNGDGTHTVTYTPSQEGPYMVSVKYADEEIPRSPFKVKVLPTYDASKVTASGPGLSSYGVPASLPVDFAIDARDAGEGLLAVQITDQEGKPKRAIVHDNKDGTYAVTYIPDKTGRYMIGVTYGGDDIPLSPYRIRATQTGDASKCLATGPGIASTVKTGEEVGFVVDAKTAGKGKVTCTVLTPDGTEAEADVIENEDGTYDIFYTAAKPGTYVIYVRFGGVDIPNSPFTVMVTEEAYVPVSDMNGLGFKPFDLVIPFAVRKGEITGEVHMPSGKTATPEIVDNKDGTVTVRYAPTEVGLHEMHIKYMGSHIPESPLQFYVNYPNSGSVSAYGPGLVYGVANKTATFTIVTEDAGEGGLDLAIEGPSKAEISCIDNKDGTCTVTYLPTLPGDYSILVKYNDKHIPGSPFTAKITDDSRRCSQVKLGSAADFLLDISETDLSSLTASIKAPSGRDEPCLLKRLPNNHIGISFIPREVGEHLVSIKKNGNHVANSPVSIMVVQSEIGDARRAKVYGRGLSEGRTFEMSDFIVDTRDAGYGGISLAVEGPSKVDIQTEDLEDGTCKVSYFPTVPGVYIVSTKFADEHVPGSPFTVKISGEGRVKESITRTSRAPSVATVGSICDLNLKIPEINSSDMSAHVTSPSGRVTEAEIVPMGKNSHCVRFVPQEMGVHTVSVKYRGQHVTGSPFQFTVGPLGEGGAHKVRAGGPGLERGEAGVPAEFSIWTREAGAGGLSIAVEGPSKAEITFDDHKNGSCGVSYIAQEPGNYEVSIKFNDEHIPESPYLVPVIAPSDDARRLTVMSLQESGLKVNQPASFAIRLNGAKGKIDAKVHSPSGAVEECHVSELEPDKYAVRFIPHENGVHTIDVKFNGSHVVGSPFKVRVGEPGQAGNPALVSAYGTGLEGGTTGIQSEFFINTTRAGPGTLSVTIEGPSKVKMDCQETPEGYKVMYTPMAPGNYLISVKYGGPNHIVGSPFKAKVTGQRLVSPGSANETSSILVESVTRSSTETCYSAIPKASSDASKVTSKGAGLSKAFVGQKSSFLVDCSKAGSNMLLIGVHGPTTPCEEVSMKHVGNQQYNVTYVVKERGDYVLAVKWGEEHIPGSPFHVTVP

SEQ ID NO: 7559 - protein, 129 aa, Homo sapiens
MRPLKPGAPLPALFLLALALSPHGAHGRPRGRRGARVTDKEPKPLLFLPAAGAGRTPSGSRSAEIFPRDSNLKDKFIKHFTGPVTFSPECSKHFHRLYYNTRECSTPAYYKRCARLLTRLAVSPLCSQT

SEQ ID NO: 7560 - protein, 4022 aa, Homo sapiens
MLESYVTPILMSYVNRYIKNLKPSDLQLSLWGGDVVLSKLELKLDVLEQELKLPFTFLSGHIHELRIHVPWTKLGSEPVVITINTMECILKLKDGIQDDHESCGSNSTNRSTAESTKSSIKPRRMQQAAPTDPDLPPGYVQSLIRRVVNNVNIVINNLILKYVEDDIVLSVNITSAECYTVGELWDRAFMDISATDLVLRKVINFSDCTVCLDKRNASGKIEFYQDPLLYKCSFRTRLHFTYENLNSKMPSVIKIHTLVESLKLSITDQQLPMFIRIMQLGIALYYGEIGNFKEGEIEDLTCHNKDMLGNITGSEDETRIDMQYPAQHKGQELYSQQDEEQPQGWVSWAWSFVPAIVSYDDGEEDFVGNDPASTMHQQKAQTLKDPIVSIGFYCTKATVTFKLTEMQVESSYYSPQKVKSKEVLCWEQEGTTVEALMMGEPFFDCQIGFVGCRAMCLKGIMGVKDFEENMNRSETEACFFICGDNLSTKGFTYLTNSLFDYRSPENNGTRAEFILDSTHHKETYTEIAGMQRFGAFYMDYLYTMENTSGKGSTNQQDFSSGKSEDLGTVQEKSTKSLVIGPLDFRLDSSAVHRILKMIVCALEHEYEPYSRLKSDIKDENETILNPEEVALLEEYIPTRHTSVTLLKCTCTISMAEFNLLDHLLPVIMGEKNSSNFMNTTNFQSLRPLPSIRILVDKINLEHSVPMYAEQLVHVVSSLTQPSDNLLHYCYVHCYLKIFGFQAGLTSLDCSGSYCLPVPVIPSFSTALYGKLLKLPTCWTKRSQIAITEGIFELPNLTIQATRAQTLLLQAIYQSWSHLGNVSSSAVIEALINEIFLSIGVKSKNPLPTLEGSIQNVELKYCSTSLVKCASGTMGSIKICAKAPVDSGKEKLIPLLQGPSDTKDLHSTKWLNESRKPESLLAPDLMAFTIQVPQYIDYCHNSGAVLLCSIQGLAVNIDPILYTWLIYQPQKRTSRHMQQQPVVAVPLVMPVCRRKEDEVSIGSAPLAKQQSYQASEYASSPVKTKTVTESRPLSVPVKAMLNISESCRSPEERMKEFIGIVWNAVKHLTLQLEVQSCCVFIPNDSLPSPSTIVSGDIPGTVRSWYHGQTSMPGTLVLCLPQIKIISAGHKYMEPLQEIPFVIPRPILEEGDAFPWTISLHNFSIYTLLGKQVTLCLVEPMGCTSTLAVTSQKLLATGPDTRHSFVVCLHVDLESLEIKCSNPQVQLFYELTDIMNKVWNKIQKRGNLNLSPTSPETMAGPVPTSPVRSSIGTAPPDTSTCSPSADIGTTTEGDSIQAGEESPFSDSVTLEQTTSNIGGTSGRVSLWMQWVLPKITIKLFAPDPENKGTEVCMVSELEDLSASIDVQDVYTKVKCKIESFNIDHYRSSLGEECWSLGQCGGVFLSCTDKLNRRTLLVRPISKQDPFSNCSGFFPSTTTKLLDGTHQQHGFLSLTYTKAVTKNVRHKLTSRNERRSFHKLSEGLMDGSPHFLHEILLSAQAFDIVLYFPLLNAIASIFQAKLPKTQKEKRKSPGQPMRTHTLTSRNLPLIYVNTSVIRIFIPKTEEMQPTVEANQAAKEDTVVLKIGSVAMAPQADNPLGRSVLRKDIYQRALNLGILRDPGSEIEDRQYQIDLQSINIGTAQWHQLKPEKESVSGGVVTETERNSQNPALEWNMASSIRRHQERRAILTPVLTDFSVRITGAPAVIFTKVVSPENLHTEEILVCGHSLEVNITTNLDFFLSVAQVQLLHQLIVANMTGLEPSNKAAEISKQEQKKVDIFDGGMAETSSRYSGAQDSGIGSDSVKIRIVQIEQHSGASQHRIARPSRQSSIVKNLNFIPFDIFITASRISLMTYSCMALSKSKSQEQKNNEKTDKSSLNLPEVDSDVAKPNQACISTVTAEDLLRSSISFPSGKKIGVLSLESLHASTRSSARQALGITIVRQPGRRGTGDLQLEPFLYFIVSQPSLLLSCHHRKQRVEVSIFDAVLKGVASDYKCIDPGKTLPEALDYCTVWLQTVPGEIDSKSGIPPSFITLQIKDFLNGPADVNLDISKPLKANLSFTKLDQINLFLKKIKNAHSLAHSEETSAMSNTMVNKDDLPVSKYYRGKLSKPKIHGDGVQKISAQENMWRAVSCFQKISVQTTQIVISMETVPHTSKPCLLASLSNLNGSLSVKATQKVPGIILGSSFLLSINDFLLKTSLKERSRILIGPCCATANLEAKWCKHSGNPGPEQSIPKISIDLRGGLLQVFWGQEHLNCLVLLHELLNGYLNEEGNFEVQVSEPVPQMSSPVEKNQTFKSEQSSDDLRTGLFQYVQDAESLKLPGVYEVLFYNETEDCPGMMLWRYPEPRVLTLVRITPVPFNTTEDPDISTADLGDVLQVPCSLEYWDELQKVFVAFREFNLSESKVCELQLPDINLVNDQKKLVSSDLWRIVLNSSQNGADDQSSASESGSQSTCDPLVTPTALAACTRVDSCFTPWFVPSLCVSFQFAHLEFHLCHHLDQLGTAAPQYLQPFVSDRNMPSELEYMIVSFREPHMYLRQWNNGSVCQEIQFLAQADCKLLECRNVTMQSVVKPFSIFGQMAVSSDVVEKLLDCTVIVDSVFVNLGQHVVHSLNTAIQAWQQNKCPEVEELVFSHFVICNDTQETLRFGQVDTDENILLASLHSHQYSWRSHKSPQLLHICIEGWGNWRWSEPFSVDHAGTFIRTIQYRGRTASLIIKVQQLNGVQKQIIICGRQIICSYLSQSIELKVVQHYIGQDGQAVVREHFDCLTAKQKLPSYILENNELTELCVKAKGDEDWSRDVCLESKAPEYSIVIQVPSSNSSIIYVWCTVLTLEPNSQVQQRMIVFSPLFIMRSHLPDPIIIHLEKRSLGLSETQIIPGKGQEKPLQNIEPDLVHHLTFQAREEYDPSDCAVPISTSLIKQIATKVHPGGTVNQILDEFYGPEKSLQPIWPYNKKDSDRNEQLSQWDSPMRVKLSIWKPYVRTLLIELLPWALLINESKWDLWLFEGEKIVLQVPAGKIIIPPNFQEAFQIGIYWANTNTVHKSVAIKLVHNLTSPKWKDGGNGEVVTLDEEAFVDTEIRLGAFPGHQKLCQFCISSMVQQGIQIIQIEDKTTIINNTPYQIFYKPQLSVCNPHSGKEYFRVPDSATFSICPGGEQPAMKSSSLPCWDLMPDISQSVLDASLLQKQIMLGFSPAPGADSSQCWSLPAIVRPEFPRQSVAVPLGNFRENGFCTRAIVLTYQEHLGVTYLTLSEDPSPRVIIHNRCPVKMLIKENIKDIPKFEVYCKKIPSECSIHHELYHQISSYPDCKTKDLLPSLLLRVEPLDEVTTEWSDAIDINSQGTQVVFLTGFGYVYVDVVHQCGTVFITVAPEGKAGPILTNTNRAPEKIVTFKMFITQLSLAVFDDLTHHKASAELLRLTLDNIFLCVAPGAGPLPGEEPVAALFELYCVEICCGDLQLDNQLYNKSNFHFAVLVCQGEKAEPIQCSKMQSLLISNKELEEYKEKCFIKLCITLNEGKSILCDINEFSFELKPARLYVEDTFVYYIKTLFDTYLPNSRLAGHSTHLSGGKQVLPMQVTQHARALVNPVKLRKLVIQPVNLLVSIHASLKLYIASDHTPLSFSVFERGPIFTTARQLVHALAMHYAAGALFRAGWVVGSLDILGSPASLVRSIGNGVADFFRLPYEGLTRGPGAFVSGVSRGTTSFVKHISKGTLTSITNLATSLARNMDRLSLDEEHYNRQEEWRRQLPESLGEGLRQGLSRLGISLLGAIAGIVDQPMQNFQKTSEAQASAGHKAKGVISGVGKGIMGVFTKPIGGAAELVSQTGYGILHGAGLSQLPKQRHQPSDLHADQAPNSHVKYVWKMLQSLGRPEVHMALDVVLVRGSGQEHEGCLLLTSEVLFVVSVSEDTQQQAFPVTEIDCAQDSKQNNLLTVQLKQPRVACDVEVDGVRERLSEQQYNRLVDYITKTSCHLAPSCSSMQIPCPVVAAEPPPSTVKTYHYLVDPHFAQVFLSKFTMVKNKALRKGFP

SEQ ID NO: 7561 - protein, 1782 aa, Homo sapiens
MTSLKRSQTERPLATDRASVVGTDGTPKVHTDDFYMRRFRSQNGSLGSSVMAPVGPPRSEGSHHITSTPGVPKMGVRARIADWPPRKENIKESSRSSQEIETSSCLDSLSSKSSPVSQGSSVSLNSNDSAMLKSIQNTLKNKTRPSENMDSRFLMPEAYPSSPRKALRRIRQRSNSDITISELDVDSFDECISPTYKTGPSLHREYGSTSSIDKQGTSGESFFDLLKGYKDDKSDRGPTPTKLSDFLITGGGKGSGFSLDVIDGPISQRENLRLFKEREKPLKRRSKSETGDSSIFRKLRNAKGEELGKSSDLEDNRSEDSVRPWTCPKCFAHYDVQSILFDLNEAIMNRHNVIKRRNTTTGASAAAVASLVSGPLSHSASFSSPMGSTEDLNSKGSLSMDQGDDKSNELVMSCPYFRNEIGGEGERKISLSKSNSGSFSGCESASFESTLSSHCTNAGVAVLEVPKENLVLHLDRVKRYIVEHVDLGAYYYRKFFYQKEHWNYFGADENLGPVAVSIRREKPDEMKENGSPYNYRIIFRTSELMTLRGSVLEDAIPSTAKHSTARGLPLKEVLEHVVPELNVQCLRLAFNTPKVTEQLMKLDEQGLNYQQKVGIMYCKAGQSTEEEMYNNESAGPAFEEFLQLLGERVRLKGFEKYRAQLDTKTDSTGTHSLYTTYKDYEIMFHVSTMLPYTPNNKQQLLRKRHIGNDIVTIVFQEPGAQPFSPKNIRSHFQHVFVIVRVHNPCSDSVCYSVAVTRSRDVPSFGPPIPKGVTFPKSNVFRDFLLAKVINAENAAHKSEKFRAMATRTRQEYLKDLAEKNVTNTPIDPSGKFPFISLASKKKEKSKPYPGAELSSMGAIVWAVRAEDYNKAMELDCLLGISNEFIVLIEQETKSVVFNCSCRDVIGWTSTDTSLKIFYERGECVSVGSFINIEEIKEIVKRLQFVSKGCESVEMTLRRNGLGQLGFHVNYEGIVADVEPYGYAWQAGLRQGSRLVEICKVAVATLSHEQMIDLLRTSVTVKVVIIPPHDDCTPRRSCSETYRMPVMEYKMNEGVSYEFKFPFRNNNKWQRNASKGPHSPQVPSQVQSPMTSRLNAGKGDGKMPPPERAANIPRSISSDGRPLERRLSPGSDIYVTVSSMALARSQCRNSPSNLSSSSDTGSVGGTYRQKSMPEGFGVSRRSPASIDRQNTQSDIGGSGKSTPSWQRSEDSIADQMEPTCHLPAVSKVLPAFRESPSGRLMRQDPVVHLSPNKQGHSDSHYSSHSSSNTLSSNASSAHSDEKWYDGDRTESELNSYNYLQGTSADSGIDTTSYGPSHGSTASLGAATSSPRSGPGKEKVAPLWHSSSEVISMADRTLETESHGLDRKTESSLSLDIHSKSQAGSTPLTRENSTFSINDAASHTSTMSSRHSASPVVFTSARSSPKEELHPAAPSQLAPSFSSSSSSSSGPRSFYPRQGATSKYLIGWKKPEGTINSVGFMDTRKRHQSDGNEIAHTRLRASTRDLRASPKPTSKSTIEEDLKKLIDLESPTPESQKSFKFHALSSPQSPFPSTPTSRRALHRTLSDESIYNSQREHFFTSRASLLDQALPNDVLFSSTYPSLPKSLPLRRPSYTLGMKSLHGEFSASDSSLTDIQETRRQPMPDPGLMPLPDTAADLDWSNLVDAAKAYEVQRASFFAASDENHRPLSAASNSDQLEDQALAQMKPYSSKDSSPTLASKVDQLEGMLKMLREDLKKEKEDKAHLQAEVQHLREDNLRLQEESQNASDKLKKFTEWVFNTIDMS

SEQ ID NO: 7562 - protein, 403 aa, Homo sapiens
MGATEPGGDTSSDEFHPFIEALLPHVRAFSYTWFNLQARKRKYFKKHEKRMSKDEERAVKDELLGEKPEIKQKWASRLLAKLRKDIRPEFREDFVLTITGKKPPCCVLSNPDQKGKIRRIDCLRQADKVWRLDLVMVILFKGIPLESTDGERLYKSPQCSNPGLCVQPHHIGVTIKELDLYLAYFVHTPESGQSDSSNQQGDADIKPLPNGHLSFQDCFVTSGVWNVTELVRVSQTPVATASGPNFSLADLESPSYYNINQVTLGRRSITSPPSTSTTKRPKSIDDSEMESPVDDVFYPGTGRSPAAGSSQSSGWPNDVDAGSPRATASALHFPSTSIIQQSSPYFTHPTIRYHHHHGQDSLKEFVQFVCSDGSGQATGQHSQRQAPPLPTGLSASDPGTATF

SEQ ID NO: 7563 - protein, 318 aa, Homo sapiens
METLCLRASFWLALVGCVISDNPERYSTNLSNHVDDFTTFRGTELSFLVTTHQPTNLVLPSNGSMHNYCPQQTKITSAFKYINTVISCTIFIVGMVGNATLLRIIYQNKCMRNGPNALIASLALGDLIYVVIDLPINVFKFYQDVKDWWLFGFYFCMPLVCTAIFYTLMTCEMLNRRNGSLRIALSEHLKQRREVAKTVFCLVVIFALCWFPLHLSRILKKTVYNEMDKNRCELLSFLLLMDYIGINLATMNSCINPIALYFVSKKFKNCFQSCLCCCCYQSKSLMTSVPMNGTSIQWKNHDQNNHNTDRSSHKDSMN

SEQ ID NO: 7564 - protein, 203 aa, Homo sapiens
MPKAPKGKSAGREKKVIHPYSRKAAQITREAHKQEKKEKLKNEKALRLNLVGEKLQWFQNHLDPQKKRYSKKDACELIERYLNRFSSELEQIELHNSIRDRQGRRHCSRETVIKQTMERERQQFEGYGLEIPDILNASNLKTFREWDFDLKKLPNIKMRKICANDAIPKTCKRKTIITVDQDLGELELNDESSDSDEEMTAVA

SEQ ID NO: 7565 - protein, 588 aa, Homo sapiens
MSAGEVERLVSELSGGTGGDEEEEWLYGDENEVERPEEENASANPPSGIEDETAENGVPKPKVTETEDDSDSDSDDDEDDVHVTIGDIKTGAPQYGSYGTAPVNLNIKTGGRVYGTTGTKVKGVDLDAPGSINGVPLLEVDLDSFEDKPWRKPGADLSDYFNYGFNEDTWKAYCEKQKRIRMGLEVIPVTSTTNKITAEDCTMEVTPGAEIQDGRFNLFKVQQGRTGNSEKETALPSTKAEFTSPPSLFKTGLPPSRNSTSSQSQTSTASRKANSSVGKWQDRYGRAESPDLRRLPGAIDVIGQTITISRVEGRRRANENSNIQVLSERSATEVDNNFSKPPPFFPPGAPPTHLPPPPFLPPPPTVSTAPPLIPPPGIPITVPPPGFPPPPGAPPPSLIPTIESGHSSGYDSRSARAFPYGNVAFPHLPGSAPSWPSLVDTSKQWDYYARREKDRDRERDRDRERDRDRDRERERTRERERERDHSPTPSVFNSDEERYRYREYAERGYERHRASREKEERHRERRHREKEETRHKSSRSNSRRRHESEEGDSHRRHKHKKSKRSKEGKEAGSEPAPEQESTEATPAE

SEQ ID NO: 7566 - protein, 981 aa, Homo sapiens
MASPTSTNPAHAHFESFLQAQLCQDVLSSFQELCGALGLEPGGGLPQYHKIKDQLNYWSAKSLWTKLDKRAGQPVYQQGRACTSTKCLVVGAGPCGLRVAVELALLGARVVLVEKRTKFSRHNVLHLWPFTIHDLRALGAKKFYGRFCTGTLDHISIRQLQLLLLKVALLLGVEIHWGVTFTGLQPPPRKGSGWRAQLQPNPPAQLANYEFDVLISAAGGKFVPEGFKVREMRGKLAIGITANFVNGRTVEETQVPEISGVARIYNQSFFQSLLKATGIDLENIVYYKDDTHYFVMTAKKQCLLRLGVLRQPFWPLGTGVARGFLAAFDAAWMVKRWAEGAESLEVLAERESLYQLLSQTSPENMHRNVAQYGLDPATRYPNLNLRAVTPNQVRDLYDVLAKEPVQRNNDKTDTGMPATGSAGTQEELLRWCQEQTAGYPGVHVSDLSSSWADGLALCALVYRLQPGLLEPSELQGLGALEATAWALKVAENELGITPVVSAQAVVAGSDPLGLIAYLSHFHSAFKSMAHSPGPVSQASPGTSSAVLFLSKLQRTLQRSRAKENAEDAGGKKLRLEMEAETPSTEVPPDPEPGVPLTPPSQHQEAGAGDLCALCGEHLYVLERLCVNGHFFHRSCFRCHTCEATLWPGGYEQHPGDGHFYCLQHLPQTDHKAEGSDRGPESPELPTPSENSMPPGLSTPTASQEGAGPVPDPSQPTRRQIRLSSPERQRLSSLNLTPDPEMEPPPKPPRSCSALARHALESSFVGWGLPVQSPQALVAMEKEEKESPFSSEEEEEDVPLDSDVEQALQTFAKTSGTMNNYPTWRRTLLRRAKEEEMKRFCKAQTIQRRLNEIEAALRELEAEGVKLELALRRQSSSPEQQKKLWVGQLLQLVDKKNSLVAEEAELMITVQELNLEEKQWQLDQELRGYMNREENLKTAADRQAEDQVLRKLVDLVNQRDALIRFQEERRLSELALGTGAQG

SEQ ID NO: 7567 - protein, 83 aa, Homo sapiens
MRLSVCLLMVSLALCCYQAHALVCPAVASEITVFLFLSDAAVNLQVAKLNPPPEALAAKLEVKHCTDQISFKKRLSLKKSWWK

SEQ ID NO: 7568 - protein, 486 aa, Homo sapiens
MNGTLDHPDQPDLDAIKMFVGQVPRTWSEKDLRELFEQYGAVYEINVLRDRSQNPPQSKGCCFVTFYTRKAALEAQNALHNMKVLPGMHHPIQMKPADSEKNNAVEDRKLFIGMISKKCTENDIRVMFSSFGQIEECRILRGPDGLSRGCAFVTFTTRAMAQTAIKAMHQAQTMEGCSSPMVVKFADTQKDKEQKRMAQQLQQQMQQISAASVWGNLAGLNTLGPQYLALYLQLLQQTASSGNLNTLSSLHPMGGLNAMQLQNLAALAAAASAAQNTPSGTNALTTSSSPLSVLTSSGSSPSSSSSNSVNPIASLGALQTLAGATAGLNVGSLAGMAALNGGLGSSGLSNGTGSTMEALTQAYSGIQQYAAAALPTLYNQNLLTQQSIGAAGSQKEGPEGANLFIYHLPQEFGDQDLLQMFMPFGNVVSAKVFIDKQTNLSKCFGFVSYDNPVSAQAAIQSMNGFQIGMKRLKVQLKRSKNDSKPY

SEQ ID NO: 7569 - protein, 381 aa, Homo sapiens
MESGSTAASEEARSLRECELYVQKHNIQALLKDSIVQLCTARPERPMAFLREYFERLEKEEAKQIQNLQKAGTRTDSREDEISPPPPNPVVKGRRRRGAISAEVYTEEDAASYVRKVIPKDYKTMAALAKAIEKNVLFSHLDDNERSDIFDAMFSVSFIAGETVIQQGDEGDNFYVIDQGETDVYVNNEWATSVGEGGSFGELALIYGTPRAATVKAKTNVKLWGIDRDSYRRILMGSTLRKRKMYEEFLSKVSILESLDKWERLTVADALEPVQFEDGQKIVVQGEPGDEFFIILEGSAAVLQRRSENEEFVEVGRLGPSDYFGEIALLMNRPRAATVVARGPLKCVKLDRPRFERVLGPCSDILKRNIQQYNSFVSLSV

SEQ ID NO: 7570 - protein, 742 aa, Homo sapiens
MGGRVFLAFCVWLTLPGAETQDSRGCARWCPQNSSCVNATACRCNPGFSSFSEIITTPTETCDDINECATPSKVSCGKFSDCWNTEGSYDCVCSPGYEPVSGAKTFKNESENTCQDVDECSSGQHQCDSSTVCFNTVGSYSCRCRPGWKPRHGIPNNQKDTVCEDMTFSTWTPPPGVHSQTLSRFFDKVQDLGRDSKTSSAEVTIQNVIKLVDELMEAPGDVEALAPPVRHLIATQLLSNLEDIMRILAKSLPKGPFTYISPSNTELTLMIQERGDKNVTMGQSSARMKLNWAVAAGAEDPGPAVAGILSIQNMTTLLANASLNLHSKKQAELEEIYESSIRGVQLRRLSAVNSIFLSHNNTKELNSPILFAFSHLESSDGEAGRDPPAKDVMPGPRQELLCAFWKSDSDRGGHWATEGCQVLGSKNGSTTCQCSHLSSFAILMAHYDVEDWKLTLITRVGLALSLFCLLLCILTFLLVRPIQGSRTTIHLHLCICLFVGSTIFLAGIENEGGQVGLRCRLVAGLLHYCFLAAFCWMSLEGLELYFLVVRVFQGQGLSTRWLCLIGYGVPLLIVGVSAAIYSKGYGRPRYCWLDFEQGFLWSFLGPVTFIILCNAVIFVTTVWKLTQKFSEINPDMKKLKKARALTITAIAQLFLLGCTWVFGLFIFDDRSLVLTYVFTILNCLQGAFLYLLHCLLNKKVREEYRKWACLVAGGSKYSEFTSTTSGTGHNQTRALRASESGI

SEQ ID NO: 7571 - protein, 2603 aa, Homo sapiens
MEKATVPVAAATAAEGEGSPPAVAAVAGPPAAAEVGGGVGGSSRARSASSPRGMVRVCDLLLKKKPPQQQHHKAKRNRTCRPPSSSESSSDSDNSGGGGGGGGGGGGGGGTSSNNSEEEEDDDDEEEEVSEVESFILDQDDLENPMLETASKLLLSGTADGADLRTVDPETQARLEALLEAAGIGKLSTADGKAFADPEVLRRLTSSVSCALDEAAAALTRMRAESTANAGQSDNRSLAEACSEGDVNAVRKLLIEGRSVNEHTEEGESLLCLACSAGYYELAQVLLAMHANVEDRGIKGDITPLMAAANGGHVKIVKLLLAHKADVNAQSSTGNTALTYACAGGYVDVVKVLLESGASIEDHNENGHTPLMEAGSAGHVEVARLLLENGAGINTHSNEFKESALTLACYKGHLEMVRFLLEAGADQEHKTDEMHTALMEACMDGHVEVARLLLDSGAQVNMPADSFESPLTLAACGGHVELAALLIERGASLEEVNDEGYTPLMEAAREGHEEMVALLLGQGANINAQTEETQETALTLACCGGFLEVADFLIKAGADIELGCSTPLMEAAQEGHLELVKYLLAAGANVHATTATGDTALTYACENGHTDVADVLLQAGADLEHESEGGRTPLMKAARAGHVCTVQFLISKGANVNRTTANNDHTVLSLACAGGHLAVVELLLAHGADPTHRLKDGSTMLIEAAKGGHTSVVCYLLDYPNNLLSAPPPDVTQLTPPSHDLNRAPRVPVQALPMVVPPQEPDKPPANVATTLPIRNKAASKQKSSSHLPANSQDVQGYITNQSPESIVEEAQGKLTELEQRIKEAIEKNAQLQSLELAHADQLTKEKIEELNKTREEQIQKKQKILEELQKVERELQLKTQQQLKKQYLEVKAQRIQLQQQQQQSCQHLGLLTPVGVGEQLSEGDYARLQQVDPVLLKDEPQQTAAQMGFAPIQPLAMPQALPLAAGPLPPGSIANLTELQGVIVGQPVLGQAQLAGLGQGILTETQQGLMVASPAQTLNDTLDDIMAAVSGRASAMSNTPTHSIAASISQPQTPTPSPIISPSAMLPIYPAIDIDAQTESNHDTALTLACAGGHEELVQTLLERGASIEHRDKKGFTPLILAATAGHVGVVEILLDNGADIEAQSERTKDTPLSLACSGGRQEVVELLLARGANKEHRNVSDYTPLSLAASGGYVNIIKILLNAGAEINSRTGSKLGISPLMLAAMNGHTAAVKLLLDMGSDINAQIETNRNTALTLACFQGRTEVVSLLLDRKANVEHRAKTGLTPLMEAASGGYAEVGRVLLDKGADVNAPPVPSSRDTALTIAADKGHYKFCELLIGRGAHIDVRNKKGNTPLWLAANGGHLDVVQLLVQAGADVDAADNRKITPLMAAFRKGHVKVVRYLVKEVNQFPSDSECMRYIATITDKEMLKKCHLCMESIVQAKDRQAAEANKNASILLEELDLEKLREESRRLALAAKREKRKEKRRKKKEEQRRKLEEIEAKNKENFELQAAQEKEKLKVEDEPEVLTEPPSATTTTTIGISATWTTLAGSHGKRNNTITTTSSKRKNRKNKITPENVQIIFDDPLPISYSQPEKVNGESKSSSTSESGDSDNMRISSCSDESSNSNSSRKSDNHSPAVVTTTVSSKKQPSVLVTFPKEERKSVSGKASIKLSETISEGTSNSLSTCTKSGPSPLSSPNGKLTVASPKRGQKREEGWKEVVRRSKKVSVPSTVISRVIGRGGCNINAIREFTGAHIDIDKQKDKTGDRIITIRGGTESTRQATQLINALIKDPDKEIDELIPKNRLKSSSANSKIGSSAPTTTAANTSLMGIKMTTVALSSTSQTATALTVPAISSASTHKTIKNPVNNVRPGFPVSLPLAYPPPQFAHALLAAQTFQQIRPPRLPMTHFGGTFPPAQSTWGPFPVRPLSPARATNSPKPHMVPRHSNQNSSGSQVNSAGSLTSSPTTTTSSSASTVPGTSTNGSPSSPSVRRQLFVTVVKTSNATTTTVTTTASNNNTAPTNATYPMPTAKEHYPVSSPSSPSPPAQPGGVSRNSPLDCGSASPNKVASSSEQEAGSPPVVETTNTRPPNSSSSSGSSSAHSNQQQPPGSVSQEPRPPLQQSQVPPPEVRMTVPPLATSSAPVAVPSTAPVTYPMPQTPMGCPQPTPKMETPAIRPPPHGTTAPHKNSASVQNSSVAVLSVNHIKRPHSVPSSVQLPSTLSTQSACQNSVHPANKPIAPNFSAPLPFGPFSTLFENSPTSAHAFWGGSVVSSQSTPESMLSGKSSYLPNSDPLHQSDTSKAPGFRPPLQRPAPSPSGIVNMDSPYGSVTPSSTHLGNFASNISGGQMYGPGAPLGGAPAAANFNRQHFSPLSLLTPCSSASNDSSAQSVSSGVRAPSPAPSSVPLGSEKPSNVSQDRKVPVPIGTERSARIRQTGTSAPSVIGSNLSTSVGHSGIWSFEGIGGNQDKVDWCNPGMGNPMIHRPMSDPGVFSQHQAMERDSTGIVTPSGTFHQHVPAGYMDFPKVGGMPFSVYGNAMIPPVAPIPDGAGGPIFNGPHAADPSWNSLIKMVSSSTENNGPQTVWTGPWAPHMNSVHMNQLG

SEQ ID NO: 7572 - protein, 201 aa, Homo sapiens
MITETAAEPTVPAVPAAEEATEARGREEPAWPWKDAPIRTLVQRIHQLQAERAQGFRRLEEWLAPVQGLRAWGRGLRVPTCRRGHRQYLRSGPDYDFARYRSTVHGVTQAFAAASREVLAVEAELGGPRRQPLLAGHVRSLQELEQTRLGTVALLQLMETPELAGQEDAVRMQQLKMKVIKTMEAISEVLQDLRFDAESAE

SEQ ID NO: 7573 - protein, 334 aa, Homo sapiens
MATEEKKPETEAARAQPTPSSSATQSKPTPVKPNYALKFTLAGHTKAVSSVKFSPNGEWLASSSADKLIKIWGAYDGKFEKTISGHKLGISDVAWSSDSNLLVSASDDKTLKIWDVSSGKCLKTLKGHSNYVFCCNFNPQSNLIVSGSFDESVRIWDVKTGKCLKTLPAHSDPVSAVHFNRDGSLIVSSSYDGLCRIWDTASGQCLKTLIDDDNPPVSFVKFSPNGKYILAATLDNTLKLWDYSKGKCLKTYTGHKNEKYCIFANFSVTGGKWIVSGSEDNLVYIWNLQTKEIVQKLQGHTDVVISTACHPTENIIASAALENDKTIKLWKSDC

SEQ ID NO: 7574 - protein, 533 aa, Homo sapiens
MATSLHEGPTNQLDLLIRAVEASVHSSNAHCTDKTIEAAEALLHMESPTCLRDSRSPVEVFVPPCVSTPEFIHAAMRPDVITETVVEVSTEESEPMDTSPIPTSPDSHEPMKKKKVGRKPKTQQSPISNGSPELGIKKKPREGKGNTTYLWEFLLDLLQDKNTCPRYIKWTQREKGIFKLVDSKAVSKLWGKHKNKPDMNYETMGRALRYYYQRGILAKVEGQRLVYQFKDMPKNIVVIDDDKSETCNEDLAGTTDEKSLERVSLSAESLLKAASSVRSGKNSSPINCSRAEKGVARVVNITSPGHDASSRSPTTTASVSATAAPRTVRVAMQVPVVMTSLGQKISTVAVQSVNAGAPLITSTSPTTATSPKVVIQTIPTVMPASTENGDKITMQPAKIITIPATQLAQCQLQTKSNLTGSGSINIVGTPLAVRALTPVSIAHGTPVMRLSMPTQQASGQTPPRVISAVIKGPEVKSEAVAKKQEHDVKTLQLVEEKPADGNKTVTHVVVVSAPSAIALPVTMKTEGLVTCEK

SEQ ID NO: 7575 - protein, 194 aa, Homo sapiens
MPFITYLSGLLTAQMLSDDQLISGVEIRCEEKGRCPSTCHLCRRPGKEQLSPTPVLLEINRVVPLYTLIQDNGTKEAFKSALMSSYWCSGKGDVIDDWCRCDLSAFDANGLPNCSPLLQPVLRLSPTVEPSSTVVSLEWVDVQPAIGTKVSDYILQHKKVDEYTDTDLYTVYCWITFIDLRILNQPCIPGMKPT

SEQ ID NO: 7576 - protein, 793 aa, Homo sapiens
MLRGGRRGQLGWHSWAAGPGSLLAWLILASAGAAPCPDACCPHGSSGLRCTRDGALDSLHHLPGAENLTELYIENQQHLQHLELRDLRGLGELRNLTIVKSGLRFVAPDAFHFTPRLSRLNLSFNALESLSWKTVQGLSLQELVLSGNPLHCSCALRWLQRWEEEGLGGVPEQKLQCHGQGPLAHMPNASCGVPTLKVQVPNASVDVGDDVLLRCQVEGRGLEQAGWILTELEQSATVMKSGGLPSLGLTLANVTSDLNRKNVTCWAENDVGRAEVSVQVNVSFPASVQLHTAVEMHHWCIPFSVDGQPAPSLRWLFNGSVLNETSFIFTEFLEPAANETVRHGCLRLNQPTHVNNGNYTLLAANPFGQASASIMAAFMDNPFEFNPEDPIPDTNSTSGDPVEKKDETPFGVSVAVGLAVFACLFLSTLLLVLNKCGRRNKFGINRPAVLAPEDGLAMSLHFMTLGGSSLSPTEGKGSGLQGHIIENPQYFSDASPSGVHHIKRRDIVLKWELGEGAFGKVFLAECHNLLPEQDKMLVAVKALKEASESARQDFQREAELLTMLQHQHIVRFFGVCTEGRPLLMVFEYMRHGDLNRFLRSHGPDAKLLAGGEDVAPGPLGLGQLLAVASQVAAGMVYLAGLHFVHRDLATRNCLVGQGLVVKIGDFGMSRDIYSTDYYRVGGRTMLPIRWMPPESILYRKFTTESDVWSFGVVLWEIFTYGKQPWYQLSNTEAIDCITQGRELERPRACPPEVYAIMRGCWQREPQQRHSIKDVHARLQALAQAPPVYLDVLG

SEQ ID NO: 7577 - protein, 160 aa, Homo sapiens
MSDNDDIEVESDEEQPRFQSAADKRAHHNALERKRRDHIKDSFHSLRDSVPSLQGEKASRAQILDKATEYIQYMRRKNHTHQQDIDDLKRQNALLEQQVRALEKARSSAQLQTNYPSSDNSLYTNAKGSTISAFDGGSDSSSESEPEEPQSRKKLRMEAS

SEQ ID NO: 7578 - protein, 73 aa, Homo sapiens
MIEVVCNDRLGKKVRVKCNTDDTIGDLKKLIAAQTGTRWNKIVLKKWYTIFKDHVSLGDYEIHDGMNLELYYQ

SEQ ID NO: 7579 - protein, 558 aa, Homo sapiens
MAELNTHVNVKEKIYAVRSVVPNKSNNEIVLVLQQFDFNVDKAVQAFVDGSAIQVLKEWNMTGKKKNNKRKRSKSKQHQGNKDAKDKVERPEAGPLQPQPPQIQNGPMNGCEKDSSSTDSANEKPALIPREKKISILEEPSKALRGVTEGNRLLQQKLSLDGNPKPIHGTTERSDGLQWSAEQPCNPSKPKAKTSPVKSNTPAAHLEIKPDELAKKRGPNIEKSVKDLQRCTVSLTRYRVMIKEEVDSSVKKIKAAFAELHNCIIDKEVSLMAEMDKVKEEAMEILTARQKKAEELKRLTDLASQMAEMQLAELRAEIKHFVSERKYDEELGKAARFSCDIEQLKAQIMLCGEITHPKNNYSSRTPCSSLLPLLNAHAATSGKQSNFSRKSSTHNKPSEGKAANPKMVSSLPSTADPSHQTMPANKQNGSSNQRRRFNPQYHNNRLNGPAKSQGSGNEAEPLGKGNSRHEHRRQPHNGFRPKNKGGAKNQEASLGMKTPEAPAHSEKPRRRQHAADTSEARPFRGSVGRVSQCNLCPTRIEVSTDAAVLSVPAVTLVA

SEQ ID NO: 7580 - protein, 51 aa, Homo sapiens
MAVAAVKWVMSKRTILKHLFPVQNSGVHVQVCYVDVLHILRFGLQLNPSPK

SEQ ID NO: 7581 - protein, 616 aa, Homo sapiens
MGRIGISCLFPASWHFSISPVGCPRILNTNLRQIMVISVLAAAVSLLYFSVVIIRNKYGRLTRDKKFQRYLARVTDIEATDTNNPNVNYGIVVDCGSSGSRVFVYCWPRHNGNPHDLLDIRQMRDKNRKPVVMKIKPGISEFATSPEKVSDYISPLLNFAAEHVPRAKHKETPLYILCTAGMRILPESQQKAILEDLLTDIPVHFDFLFSDSHAEVISGKQEGVYAWIGINFVLGRFEHIEDDDEAVVEVNIPGSESSEAIVRKRTAGILDMGGVSTQIAYEVPKTVSFASSQQEEVAKNLLAEFNLGCDVHQTEHVYRVYVATFLGFGGNAARQRYEDRIFANTIQKNRLLGKQTGLTPDMPYLDPCLPLDIKDEIQQNGQTIYLRGTGDFDLCRETIQPFMNKTNETQTSLNGVYQPPIHFQNSEFYGFSEFYYCTEDVLRMGGDYNAAKFTKAAKDYCATKWSILRERFDRGLYASHADLHRLKYQCFKSAWMFEVFHRGFSFPVNYKSLKTALQVYDKEVQWTLGAILYRTRFLPLRDIQQEAFRASHTHWRGVSFVYNHYLFSGCFLVVLLAILLYLLRLRRIHRRTPRSSSAAALWMEEGLPAQNAPGTL

SEQ ID NO: 7582 - protein, 1942 aa, Homo sapiens
MEDRRAEKSCEQACESLKRQDYEMALKHCTEALLSLGQYSMADFTGPCPLEIERIKIESLLYRIASFLQLKNYVQADEDCRHVLGEGLAKGEDAFRAVLCCMQLKGKLQPVSTILAKSLTGESLNGMVTKDLTRLKTLLSETETATSNALSGYHVEDLDEGSCNGWHFRPPPRGITSSEEYTLCKRFLEQGICRYGAQCTSAHSQEELAEWQKRYASRLIKLKQQNENKQLSGSYMETLIEKWMNSLSPEKVLSECIEGVKVEHNPDLSVTVSTKKSHQTWTFALTCKPARMLYRVALLYDAHRPHFSIIAISAGDSTTQVSQEVPENCQEWIGGKMAQNGLDHYVYKVGIAFNTEIFGTFRQTIVFDFGLEPVLMQRVMIDAASTEDLEYLMHAKQQLVTTAKRWDSSSKTIIDFEPNETTDLEKSLLIRYQIPLSADQLFTQSVLDKSLTKSNYQSRLHDLLYIEEIAQYKEISKFNLKVQLQILASFMLTGVSGGAKYAQNGQLFGRFKLTETLSEDTLAGRLVMTKVNAVYLLPVPKQKLVQTQGTKEKVYEATIEEKTKEYIFLRLSRECCEELNLRPDCDTQVELQFQLNRLPLCEMHYALDRIKDNGVLFPDISMTPTIPWSPNRQWDEQLDPRLNAKQKEAVLAITTPLAIQLPPVLIIGPYGTGKTFTLAQAVKHILQQQETRILICTHSNSAADLYIKDYLHPYVEAGNPQARPLRVYFRNRWVKTVHPVVHQYCLISSAHSTFQMPQKEDILKHRVVVVTLNTSQYLCQLDLEPGFFTHILLDEAAQAMECETIMPLALATQNTRIVLAGDHMQLSPFVYSEFARERNLHVSLLDRLYEHYPAEFPCRILLCENYRSHEAIINYTSELFYEGKLMASGKQPAHKDFYPLTFFTARGEDVQEKNSTAFYNNAEVFEVVERVEELRRKWPVAWGKLDDGSIGVVTPYADQVFRIRAELRKKRLSDVNVERVLNVQGKQFRVLFLSTVRTRHTCKHKQTPIKKKEQLLEDSTEDLDYGFLSNYKLLNTAITRAQSLVAVVGDPIALCSIGRCRKFWERFIALCHENSSLHGITFEQIKAQLEALELKKTYVLNPLAPEFIPRALRLQHSGSTNKQQQSPPKGKSLHHTQNDHFQNDGIVQPNPSVLIGNPIRAYTPPPPLGPHPNLGKSPSPVQRIDPHTGTSILYVPAVYGGNVVMSVPLPVPWTGYQGRFAVDPRIITHQAAMAYNMNLLQTHGRGSPIPYGLGHHPPVTIGQPQNQHQEKDQHEQNRNGKSDTNNSGPEINKIRTPEKKPTEPKQVDLESNPQNRSPESRPSVVYPSTKFPRKDNLNPRHINLPLPAPHAQYAIPNRHFHPLPQLPRPPFPIPQQHTLLNQQQNNLPEQPNQIPPQPNQVVQQQSQLNQQPQQPPPQLSPAYQAGPNNAFFNSAVAHRPQSPPAEAVIPEQQPPPMLQEGHSPLRAIAQPGPILPSHLNSFIDENPSGLPIGEALDRIHGSVALETLRQQQARFQQWSEHHAFLSQGSAPYPHHHHPHLQHLPQPPLGLHQPPVRADWKLTSSAEDEVETTYSRFQDLIRELSHRDQSETRELAEMPPPQSRLLQYRQVQSRSPPAVPSPPSSTDHSSHFSNFNDNSRDIEVASNPAFPQRLPPQIFNSPFSLPSEHLAPPPLKYLAPDGAWTFANLQQNHLMGPGFPYGLPPLPHRPPQNPFVQIQNHQHAIGQEPFHPLSSRTVSSSSLPSLEEYEPRGPGRPLYQRRISSSSVQPCSEEVSTPQDSLAQCKELQDHSNQSSFNFSSPESWVNTTSSTPYQNIPCNGSSRTAQPRELIAPPKTVKPPEDQLKSENLEVSSSFNYSVLQHLGQFPPLMPNKQIAESANSSSPQSSAGGKPAMSYASALRAPPKPRPPPEQAKKSSDPLSLFQELSLGSSSGSNGFYSYFK

SEQ ID NO: 7583 - protein, 933 aa, Homo sapiens
MDDSEVESTASILASVKEQEAQFEKLTRALEEERRHVSAQLERVRVSPQDANPLMANGTLTRRHQNGRFVGDADLERQKFSDLKLNGPQDHSHLLYSTIPRMQEPGQIVETYTEEDPEGAMSVVSVETSDDGTTRRTETTVKKVVKTVTTRTVQPVAMGPDGLPVDASSVSNNYIQTLGRDFRKNGNGGPGPYVGQAGTATLPRNFHYPPDGYSRHYEDGYPGGSDNYGSLSRVTRIEERYRPSMEGYRAPSRQDVYGPQPQVRVGGSSVDLHRFHPEPYGLEDDQRSMGYDDLDYGMMSDYGTARRTGTPSDPRRRLRSYEDMIGEEVPSDQYYWAPLAQHERGSLASLDSLRKGGPPPPNWRQPELPEVIAMLGFRLDAVKSNAAAYLQHLCYRNDKVKTDVRKLKGIPVLVGLLDHPKKEVHLGACGALKNISFGRDQDNKIAIKNCDGVPALVRLLRKARDMDLTEVITGTLWNLSSHDSIKMEIVDHALHALTDEVIIPHSGWEREPNEDCKPRHIEWESVLTNTAGCLRNVSSERSEARRKLRECDGLVDALIFIVQAEIGQKDSDSKLVENCVCLLRNLSYQVHREIPQAERYQEAAPNVANNTGPHAASCFGAKKGKGKKPIEDPANDTVDFPKRTSPARGYELLFQPEVVRIYISLLKESKTPAILEASAGAIQNLCAGRWTYGRYIRSALRQEKALSAIADLLTNEHERVVKAASGALRNLAVDARNKELIGKHAIPNLVKNLPGGQQNSSWNFSEDTVISILNTINEVIAENLEAAKKLRETQGIEKLVLINKSGNRSEKEVRAAALVLQTIWGYKELRKPLEKEGWKKSDFQVNLNNASRSQSSHSYDDSTLPLIDRNQKSDKKPDREEIQMSNMGSNTKSLDNNYSTPNERGDHNRTLDRSGDLGDMEPLKGTTPLMQKI

SEQ ID NO: 7584 - protein, 799 aa, Homo sapiens
MEIPKLLPARGTLQGGGGGGIPAGGGRVHRGPDSPAGQVPTRRLLLPRGPQDGGPGRRREEASTASRGPGPSLFAPRPHQPSGGGDDFFLVLLDPVGGDVETAGSGQAAGPVLREEAKAGPGLQGDESGANPAGCSAQGPHCLSAVPTPAPISAPGPAAAFAGTVTIHNQDLLLRFENGVLTLATPPPHAWEPGAAPAQQPRCLIAPQAGFPQAAHPGDCPELRSDLLLAEPAEPAPAPAPQEEAEGLAAALGPRGLLGSGPGVVLYLCPEALCGQTFAKKHQLKMHLLTHSSSQGQRPFKCPLGGCGWTFTTSYKLKRHLQSHDKLRPFGCPAEGCGKSFTTVYNLKAHMKGHEQENSFKCEVCEESFPTQAKLGAHQRSHFEPERPYQCAFSGCKKTFITVSALFSHNRAHFREQELFSCSFPGCSKQYDKACRLKIHLRSHTGERPFLCDFDGCGWNFTSMSKLLRHKRKHDDDRRFMCPVEGCGKSFTRAEHLKGHSITHLGTKPFVCPVAGCCARFSARSSLYIHSKKHLQDVDTWKSRCPISSCNKLFTSKHSMKTHMVKRHKVGQDLLAQLEAANSLTPSSELTSQRQNDLSDAEIVSLFSDVPDSTSAALLDTALVNSGILTIDVASVSSTLAGHLPANNNNSVGQAVDPPSLMATSDPPQSLDTSLFFGTAATGFQQSSLNMDEVSSVSVGPLGSLDSLAMKNSSPEPQALTPSSKLTVDTDTLTPSSTLCENSVSELLTPAKAEWSVHPNSDFFGQEGETQFGFPNAAGNHGSQKERNLITVTGSSFLV

SEQ ID NO: 7585 - protein, 698 aa, Homo sapiens
MAAAGAAVARSPGIGAGPALRARRSPPPRAARLPRLLVLLAAAAVGPGAGGAARLYRAGEDAVWVLDSGSVRGATANSSAAWLVQFYSSWCGHCIGYAPTWRALAGDVRDWASAIRVAALDCMEEKNQAVCHDYDIHFYPTFRYFKAFTKEFTTGENFKGPDRELRTVRQTMIDFLQNHTEGSRPPACPRLDPIQPSDVLSLLDNRGSHYVAIVFESNSSYLGREVILDLIPYESIVVTRALDGDKAFLEKLGVSSVPSCYLIYPNGSHGLINVVKPLRAFFSSYLKSLPDVRKKSLPLPEKPHKEENSEIVVWREFDKSKLYTVDLESGLHYLLRVELAAHKSLAGAELKTLKDFVTVLAKLFPGRPPVKKLLEMLQEWLASLPLDRIPYNAVLDLVNNKMRISGIFLTNHIKWVGCQGSRSELRGYPCSLWKLFHTLTVEASTHPDALVGTGFEDDPQAVLQTMRRYVHTFFGCKECGEHFEEMAKESMDSVKTPDQAILWLWKKHNMVNGRLAGHLSEDPRFPKLQWPTPDLCPACHEEIKGLASWDEGHVLTFLKQHYGRDNLLDTYSADQGDSSEGGTLARGEEEEKRLTPPEVSHGDRDTQSVRPPGALGPRPALPESLHHSLDGKLQSLDGPGAHKEVGGAAPFLGVDFSSLDMSLCVVLYVASSLFLMVMYFFFRVRSRRWKVKHHHPAV

SEQ ID NO: 7586 - protein, 633 aa, Homo sapiens
MTEEACRTRSQKRALERDPTEDDVESKKIKMERGLLASDLNTDGDMRVTPEPGAGPTQGLLRATEATAMAMGRGEGLVGDGPVDMRTSHSDMKSERRPPSPDVIVLSDNEQPSSPRVNGLTTVALKETSTEALMKSSPEERERMIKQLKEELRLEEAKLVLLKKLRQSQIQKEATAQKPTGSVGSTVTTPPPLVRGTQNIPAGKPSLQTSSARMPGSVIPPPLVRGGQQASSKLGPQASSQVVMPPLVRGAQQIHSIRQHSSTGPPPLLLAPRASVPSVQIQGQRIIQQGLIRVANVPNTSLLVNIPQPTPASLKGTTATSAQANSTPTSVASVVTSAESPASRQAAAKLALRKQLEKTLLEIPPPKPPAPEMNFLPSAANNEFIYLVGLEEVVQNLLETQGRMSAATVLSREPYMCAQCKTDFTCRWREEKSGAIMCENCMTTNQKKALKVEHTSRLKAAFVKALQQEQEIEQRLLQQGTAPAQAKAEPTAAPHPVLKQVIKPRRKLAFRSGEARDWSNGAVLQASSQLSRGSATTPRGVLHTFSPSPKLQNSASATALVSRTGRHSERTVSAGKGSATSNWKKTPLSTGGTLAFVSPSLAVHKSSSAVDRQREYLLDMIPPRSIPQSATWK

SEQ ID NO: 7587 - protein, 103 aa, Homo sapiens
MIGDILLFGTLLMNAGAVLNFKLKKKDTQGFGEESREPSTGDNIREFLLSLRYFRIFIALWNIFMMFCMIVLRKLKQIAFPSSTGAITLILLLTNCEICCKWI

SEQ ID NO: 7588 - protein, 2624 aa, Homo sapiens
MFRRARLSVKPNVRPGVGARGSTASNPQRGRESPRPPDPATDSASKPAEPTDVPTVDFGGAEPQEKAPRSSTEKTGGDNDVEESSRSSSTVSQRRKRISSTSSLVKSSVSVPSESHPLSTINQEAPQPTATSTKEKQPCSDRYRIYKAQKLREMLKEELRKEKKQWKNKYAINESQRPPDRSKMTMRDFIYYLPDNNPMTSSLEQEKKTEKPSTPVQTREQEGKSTPNAEDNEMEEETDDGPLLVPRVKVAEDGSIILDEESLTVEVLRTKGPCVVEENDPIFERGSTTTYSSFRKNYYSKPWSNKETDMFFLAISMVGTDFSMIGQLFPHRARIEIKNKFKREEKTNGWRIDKAFQEKRPFDFDFFAHLLQKVLAEEEKRKQKSVKNHSLKEKKSTKPRKNVKVKKVACEGVNNDPDESMSSRISDTERSQKDAQTVEEESLTLSREDAEQVALEVDLNQKKRRRKKQDGANELGVNNLLENATVQAGPSKGEKHKNKCQAIRPELKEGECSKEQMLSCTQNIDGIVGFASTEKVEKRTDPILSLSNQQDATSVATESSESSTSDLPSFEVGIRALCEVNNAEGSCIEERNVDLKNNSLEIDQTENVKPMLRGRFQRPKPNLSRAGKKSVLSQGKTESESKNSHSKTSVEKNHVEKDKMNTLDILRMETTERENPEAETVSVLGEKNCLQEGSQLKALRPVQVRGRLQKPKPNAGKAAERKEILISQEEIGANVEKNENESCADRDTPQHMEDQSRKDFEEEDVILQPEKNDSFQNVQPDEPKVLNECLSVQENNKANKLNQVPILRTRFQKPKPNIGRGTGRREISSKEEVLEKILVSGEMAAALRETVRLDTSPKEMVPAEINTKEMQSDLKETGRRAISPREKILDVIDDTIEMETGLKAMGREICLREKTPEVIDATEEIDKDLEEAGRREISPQKNGPEEVKPLGEVETDLKATGNESSPREKTPEVTDATEEIDKNLEETGRRKISPRENGPEEVKPVDEMETDLNATGRESSPREKTPEVIDATEEIDLEETEREVSPQENGLEEVKPLGEMETDLKATGRDSFPRGKTPEVIDAIEEIEIDLEETEREISPQENGLEEVKPLGEMQTDLKATGREISPREKTPEVIDATEEIDKDLEETGRREISPEENGPEEVKPVDEMETDLKTTGREGSSREKTREVIDAAEVIETDLEETEREISPQENGPEEVKPVGKMETDLKEIREEISQREKVLAEFSAIREKEIDLKETGKRDIPIMEKVSGKMAVVEEMEADLKETGKENFRERGSEEICVTEEKVAELKQTGKTDISPRENELEETSTSRQTDTHLMQSGSNDFSAVPSLDIQNISSEVLSMMHTPVEEKRNSEKEVSSHFSHFKISSQTHESDKTEVQGIQSPDVPEQFSDINLSKSLPQEQKPLEIKPAPFVRSRFKRPKPNLARAALKRETTESEKYIYEKKSETKKMETIVMQENNEQTDTLPSQHDEASLMISREKDTLGHRNEEAVILPCTQTERNLSPSNSCEPKEESQSAPVQKNDSVVSVGTNNVNTFQQEMKESVIQTARQVRGRLQRPRPNIRKTGQRQIVDKGEAKGIIKEGRTILPKDETEKKVLTVSNSQIETEIEVPSSAVPEHRMYENQSQVVLVENLHVNKTNETIRHENKPYVPSSAQMTRRKFQKAKPNLGRAHSKKEEPVLEKVTTDQSKEGKPEDHLLQKGASNTQLLLKEKAELLTSLEVSARKDCVGSKESALAKIDAELEEVGPSRRVGEETVGDNSPSSVVEEQYLNKLTSCPQPLNETSYSKIALDGKTTISSTSEYERNRGERRSHKKFKPNVTRGRGSKRVRGKTSKKEPRASKAMLVTLRASQEEDDDADDFESDYEEESYHLAPEEVNKAPVFVPVGLRSPEPVSAQIEETMEELEITVNVPDVGCIAVVEHELPNTDVTTEEMKQEENLSVPFEMTTSEHIQDEPGTNDGSTEAAITLLTMGDLVLQSEISSEQGDVGVCIIPHVHSKDKSHIPSSLDNVNHKIVHECQELSSPVITTSPASFEENKIVLEEQSSREEISLMEKVKENATPTRNTISKVTSNLRIRSRLAKPKPNLEKTLGTNRLDDYQEVSSLCVTKGAEMETQRETEKNASKATELENKNLGPVTTAENKDQSKLACVHGIKGTSISSEVNLTERNENQEESSQEVHMLSVAPVASSETGPCTLGLDRGLGENSVEEPQIKDSKGDSVLTLPVPEYTPTSIPEVQQENIINPQDLTVNLVANVPQDGEDEQAFILTLVEIPANAVEEFTDATAQFMPNPLLPAPILVKSVNTEERGDMSICLPATSVGQDAMGLSISGRDNSKKPPDNLDLVSRKRFQCRLDKNDHIPPAKKRSLTLRDDCQEYTTEVHSKELTNVFEETGESHKGQDIFLTSGSTLTTPEPQRQQVEAAFQSRGSRSPDACMDKNVPQLPQDEMIVSDKEERTDAAPKSQQMDSRTSSSKASLSRPGRRPLGFLSLICSKNSLESDEPMQVHSKKRLKPLIPGLRKKLKRSNPFNESQEKNRESSDLLPSPSVITTQSENISSSATQVSCDQPLLKEGYKSAQKRAPQGEATTVSEYFFNDIFIEVDETE

SEQ ID NO: 7589 - protein, 644 aa, Homo sapiens
MAKPSHSSYVLQQLNNQREWGFLCDCCIAIDDIYFQAHKAVLAACSSYFRMFFMNHQHSTAQLNLSNMKISAECFDLILQFMYLGKIMTAPSSFEQFKVAMNYLQLYNVPDCLEDIQDADCSSSKCSSSASSKQNSKMIFGVRMYEDTVARNGNEANRWCAEPSSTVNTPHNREADEESLQLGNFPEPLFDVCKKSSVSKLSTPKERVSRRFGRSFTCDSCGFGFSCEKLLDEHVLTCTNRHLYQNTRSYHRIVDIRDGKDSNIKAEFGEKDSSKTFSAQTDKYRGDTSQAADDSASTTGSRKSSTVESEIASEEKSRAAERKRIIIKMEPEDIPTDELKDFNIIKVTDKDCNESTDNDELEDEPEEPFYRYYVEEDVSIKKSGRKTLKPRMSVSADERGGLENMRPPNNSSPVQEDAENASCELCGLTITEEDLSSHYLAKHIENICACGKCGQILVKGRQLQEHAQRCGEPQDLTMNGLGNTEEKMDLEENPDEQSEIRDMFVEMLDDFRDNHYQINSIQKKQLFKHSACPFRCPNCGQRFETENLVVEHMSSCLDQDMFKSAIMEENERDHRRKHFCNLCGKGFYQRCHLREHYTVHTKEKQFVCQTCGKQFLRERQLRLHNDMHKGMASGEIGPSKPVEK

SEQ ID NO: 7590 - protein, 130 aa, Homo sapiens
MSGRGKQGGKARAKAKTRSSRAGLQFPVGRVHRLLRKGNYAERVGAGAPVYLAAVLEYLTAEILELAGNAARDNKKTRIIPRHLQLAIRNDEELNKLLGKVTIAQGGVLPNIQAVLLPKKTESHHKAKGK

SEQ ID NO: 7591 - protein, 1564 aa, Homo sapiens
MSSKEVKTALKSARDAIRNKEYKEALKHCKTVLKQEKNNYNAWVFIGVAAAELEQPDQAQSAYKKAAELEPDQLLAWQGLANLYEKYNHINAKDDLPGVYQKLLDLYESVDKQKWCDVCKKLVDLYYQEKKHLEVARTWHKLIKTRQEQGAENEELHQLWRKLTQFLAESTEDQNNETQQLLFTAFENALGLSDKIPSEDHQVLYRHFIQSLSKFPHESARLKKACEGMINIYPTVQYPLEVLCLHLIESGNLTDEGQQYCCRLVEMDSKSGPGLIGLGIKALQDKKYEDAVRNLTEGLKESPVCTSGWYHLAEAQVKMHRPKEAVLSCSQALKIVDNLGASGNSLYQRNLCLHLKAEALIKLSDYDSSEEAIRTLDQISDADNIPGLLVLKSLAYRNKGSFDEAAKIMEDLLSSYPDLAEVHALEALIHFTKKDYLQAEKCFQRALEKDTEVAEYHYQLGLTYWFMGEETRKDKTKALTHFLKAARLDTYMGKVFCYLGHYYRDVVGDKNRARGCYRKAFELDDTDAESGAAAVDLSVELEDMEMALAILTTVTQKASAGTAKWAWLRRGLYYLKAGQHSQAVADLQAALRADPKDFNCWESLGEAYLSRGGYTTALKSFTKASELNPESIYSVFKVAAIQQILGKYKEAVAQYQMIIKKKEDYVPALKGLGECHLMMAKAALVDYLDGKAVDYIEKALEYFTCALQHRADVSCLWKLAGDACTCLYAVAPSKVNVHVLGVLLGQKEGKQVLKKNELLHLGGRCYGRALKLMSTSNTWCDLGINYYRQAQHLAETGSNMNDLKELLEKSLHCLKKAVRLDSNNHLYWNALGVVACYSGIGNYALAQHCFIKSIQSEQINAVAWTNLGVLYLTNENIEQAHEAFKMAQSLDPSYLMCWIGQALIAEAVGSYDTMDLFRHTTELNMHTEGALGYAYWVCTTLQDKSNRETELYQYNILQMNAIPAAQVILNKYVERIQNYAPAFTMLGYLNEHLQLKKEAANAYQRAILLLQTAEDQDTYNVAIRNYGRLLCSTGEYDKAIQAFKSTPLEVLEDIIGFALALFMKGLYKESSKAYERALSIVESEQDKAHILTALAITEYKQGKTDVAKTLLFKCSILKEPTTESLQALCALGLAMQDATLSKAALNELLKHIKHKDSNYQRCLLTSAIYALQGRSVAVQKQISKAVHSNPGDPALWSLLSRVVAQYAQRNAKGGVVAGNVAHILDSNHGKKALLYTAVNQLAMGSSSAEDEKNTALKTIQKAALLSPGDPAIWAGLMAACHADDKLALVNNTQPKRIDLYLALLSAVSASIKDEKFFENYNQSLEKWSLSQAVTGLIDTGRISEAETLCTKNLKSNPDQPAVILLLRQVQCKPLLESQKPLPDAVLEELQKTVMSNSTSVPAWQWLAHVYQSQGMMRAAEMCYRKSLQLASQRGSWSGKLSSLLRLALLALKVCMANISNDHWPSLVQEATTEALKLCFCPLAVLLQALLQFKRKMGARETRRLLERVVYQPGYPKSIASTARWYLLRHLYAKDDYELIDVLVNNAKTHGDTRALELNQRLSSQ

SEQ ID NO: 7592 - protein, 530 aa, Homo sapiens
MRRLWGAARKPSGAGWEKEWAEAPQEAPGAWSGRLGPGRSGRKGRAVPGWASWPAHLALAARPARHLGGAGQGPRPLHSGTAPFHSRASGERQRRLEPQLQHESRCRSSTPADAWRAEAALPVRAMGAPWGSPTAAAGGRRGWRRGRGLPWTVCVLAAAGLTCTALITYACWGQLPPLPWASPTPSRPVGVLLWWEPFGGRDSAPRPPPDCRLRFNISGCRLLTDRASYGEAQAVLFHHRDLVKGPPDWPPPWGIQAHTAEEVDLRVLDYEEAAAAAEALATSSPRPPGQRWVWMNFESPSHSPGLRSLASNLFNWTLSYRADSDVFVPYGYLYPRSHPGDPPSGLAPPLSRKQGLVAWVVSHWDERQARVRYYHQLSQHVTVDVFGRGGPGQPVPEIGLLHTVARYKFYLAFENSQHLDYITEKLWRNALLAGAVPVVLGPDRANYERFVPRGAFIHVDDFPSASSLASYLLFLDRNPAVYRRYFHWRRSYAVHITSFWDEPWCRVCQAVQRAGDRPKSIRNLASWFER

SEQ ID NO: 7593 - protein, 706 aa, Homo sapiens
MEMFTFLLTCIFLPLLRGHSLFTCEPITVPRCMKMAYNMTFFPNLMGHYDQSIAAVEMEHFLPLANLECSPNIETFLCKAFVPTCIEQIHVVPPCRKLCEKVYSDCKKLIDTFGIRWPEELECDRLQYCDETVPVTFDPHTEFLGPQKKTEQVQRDIGFWCPRHLKTSGGQGYKFLGIDQCAPPCPNMYFKSDELEFAKSFIGTVSIFCLCATLFTFLTFLIDVRRFRYPERPIIYYSVCYSIVSLMYFIGFLLGDSTACNKADEKLELGDTVVLGSQNKACTVLFMLLYFFTMAGTVWWVILTITWFLAAGRKWSCEAIEQKAVWFHAVAWGTPGFLTVMLLAMNKVEGDNISGVCFVGLYDLDASRYFVLLPLCLCVFVGLSLLLAGIISLNHVRQVIQHDGRNQEKLKKFMIRIGVFSGLYLVPLVTLLGCYVYEQVNRITWEITWVSDHCRQYHIPCPYQAKAKARPELALFMIKYLMTLIVGISAVFWVGSKKTCTEWAGFFKRNRKRDPISESRRVLQESCEFFLKHNSKVKHKKKHYKPSSHKLKVISKSMGTSTGATANHGTSAVAITSHDYLGQETLTEIQTSPETSMREVKADGASTPRLREQDCGEPASPAASISRLSGEQVDGKGQAGSVSESARSEGRISPKSDITDTGLAQSNNLQVPSSSEPSSLKGSTSLLVHPVSGVRKEQGGGCHSDT

SEQ ID NO: 7594 - protein, 339 aa, Homo sapiens
MAASALYACTKCTQRYPFEELSQGQQLCKECRIAHPIVKCTYCRSEFQQESKTNTICKKCAQNVKQFGTPKPCQYCNIIAAFIGTKCQRCTNSEKKYGPPQTCEQCKQQCAFDRKEEGRRKVDGKLLCWLCTLSYKRVLQKTKEQRKSLGSSHSNSSSSSLTEKDQHHPKHHHHHHHHHHRHSSSHHKISNLSPEEEQGLWKQSHKSSATIQNETPKKKPKLESKPSNGDSSSINQSADSGGTDNFVLISQLKEEVMSLKRLLQQRDQTILEKDKKLTELKADFQYQESNLRTKMNSMEKAHKETVEQLQAKNRELLKQVAALSKGKKFDKSGSILTSP

SEQ ID NO: 7595 - protein, 1067 aa, Homo sapiens [sequence omitted]

SEQ ID NO: 7596 - protein, 462 aa, Homo sapiens
MAKFRRRTCIILALFILFIFSLMMGLKMLRPNTATFGAPFGLDLLPELHQRTIHLGKNFDFQKSDRINSETNTKNLKSVEITMKPSKASELNLDELPPLNNYLHVFYYSWYGNPQFDGKYIHWNHPVLEHWDPRIAKNYPQGRHNPPDDIGSSFYPELGSYSSRDPSVIETHMRQMRSASIGVLALSWYPPDVNDENGEPTDNLVPTILDKAHKYNLKVTFHIEPYSNRDDQNMYKNVKYIIDKYGNHPAFYRYKTKTGNALPMFYVYDSYITKPEKWANLLTTSGSRSIRNSPYDGLFIALLVEEKHKYDILQSGFDGIYTYFATNGFTYGSSHQNWASLKLFCDKYNLIFIPSVGPGYIDTSIRPWNTQNTRNRINGKYYEIGLSAALQTRPSLISITSFNEWHEGTQIEKAVPKRTSNTVYLDYRPHKPGLYLELTRKWSEKYSKERATYALDRQLPVS

SEQ ID NO: 7597 - protein, 96 aa, Homo sapiens
MCCTKSLLLAALMSVLLLHLCGESEAASNFDCCLGYTDRILHPKFIVGFTRQLANEGCDINAIIFHTKKKLSVCANPKQTWVKYIVRLLSKKVKNM

SEQ ID NO: 7598 - protein, 507 aa, Homo sapiens
MDPKLGRMAASLLAVLLLLLERGMFSSPSPPPALLEKVFQYIDLHQDEFVQTLKEWVAIESDSVQPVPRFRQELFRMMAVAADTLQRLGARVASVDMGPQQLPDGQSLPIPPVILAELGSDPTKGTVCFYGHLDVQPADRGDGWLTDPYVLTEVDGKLYGRGATDNKGPVLAWINAVSAFRALEQDLPVNIKFIIEGMEEAGSVALEELVEKEKDRFFSGVDYIVISDNLWISQRKPAITYGTRGNSYFMVEVKCRDQDFHSGTFGGILHEPMADLVALLGSLVDSSGHILVPGIYDEVVPLTEEEINTYKAIHLDLEEYRNSSRVEKFLFDTKEEILMHLWRYPSLSIHGIEGAFDEPGTKTVIPGRVIGKFSIRLVPHMNVSAVEKQVTRHLEDVFSKRNSSNKMVVSMTLGLHPWIANIDDTQYLAAKRAIRTVFGTEPDMIRDGSTIPIAKMFQEIVHKSVVLIPLGAVDDGEHSQNEKINRWNYIEGTKLFAAFFLEMAQLH

SEQ ID NO: 7599 - protein, 1478 aa, Homo sapiens
MGDAADPREMRKTFIVPAIKPFDHYDFSRAKIACNLAWLVAKAFGTENVPEELQEPFYTDQYDQEHIKPPVVNLLLSAELYCRAGSLILKSDAAKPLLGHDAVIQALAQKGLYVTDQEKLVTERDLHKKPIQMSAHLAMIDTLMMAYTVEMVSIEKVIACAQQYSAFFQATDLPYDIEDAVMYWINKVNEHLKDIMEQEQKLKEHHTVEAPGGQKARYRKEQTLLKQLPCIPLVENLLKDGTDGCALAALIHFYCPDVVRLEDICLKETMSLADSLYNLQLIQEFCQEYLNQCCHFTLEDMLYAASSIKSNYLVFMAELFWWFEVVKPSFVQPRVVRPQGAEPVKDMPSIPVLNAAKRNVLDSSSDFPSSGEGATFTQSHHHLPSRYSRPQAHSSASGGIRRSSSMSYVDGFIGTWPKEKRSSVHGVSFDISFDKEDSVQRSTPNRGITRSISNEGLTLNNSHVSKHIRKNLSFKPINGEEEAESIEEELNIDSHSDLKSCVPLNTNELNSNENIHYKLPNGALQNRILLDEFGNQIETPSIEEALQIIHDTEKSPHTPQPDQIANGFFLHSQEMSILNSNIKLNQSSPDNVTDTKGALSPITDNTEVDTGIHVPSEDIPETMDEDSSLRDYTVSLDSDMDDASKFLQDYDIRTGNTREALSPCPSTVSTKSQPGSSASSSSGVKMTSFAEQKFRKLNHTDGKSSGSSSQKTTPEGSELNIPHVVAWAQIPEETGLPQGRDTTQLLASEMVHLRMKLEEKRRAIEAQKKKMEAAFTKQRQKMGRTAFLTVVKKKGDGISPLREEAAGAEDEKVYTDRAKEKESQKTDGQRSKSLADIKESMENPQAKWLKSPTTPIDPEKQWNLASPSEETLNEGEILEYTKSIEKLNSSLHFLQQEMQRLSLQQEMLMQMREQQSWVISPPQPSPQKQIRDFKPSKQAGLSSAIAPFSSDSPRPTHPSPQSSNRKSASFSVKSQRTPRPNELKITPLNRTLTPPRSVDSLPRLRRFSPSQVPIQTRSFVCFGDDGEPQLKESKPKEEVKKEELESKGTLEQRGHNPEEKEIKPFESTVSEVLSLPVTETVCLTPNEDQLNQPTEPPPKPVFPPTAPKNVNLIEVSLSDLKPPEKADVPVEKYDGESDKEQFDDDQKVCCGFFFKDDQKAENDMAMKRAALLEKRLRREKETQLRKQQLEAEMEHKKEETRRKTEEERQKKEDERARREFIRQEYMRRKQLKLMEDMDTVIKPRPQVVKQKKQRPKSIHRDHIESPKTPIKGPPVSSLSLASLNTGDNESVHSGKRTPRSESVEGFLSPSRCGSRNGEKDWENASTTSSVASGTEYTGPKLYKEPSAKSNKHIIQNALAHCCLAGKVNEGQKKKILEEMEKSDANNFLILFRDSGCQFRSLYTYCPETEEINKLTGIGPKSITKKMIEGLYKYNSDRKQFSHIPAKTLSASVDAITIHSHLWQTKRPVTPKKLLPTKA

SEQ ID NO: 7600 - protein, 467 aa, Homo sapiens
MLIFWTITLFLLGAAKGKEVCYEDLGCFSDTEPWGGTAIRPLKILPWSPEKIGTRFLLYTNENPNNFQILLLSDPSTIEASNFQMDRKTRFIIHGFIDKGDESWVTDMCKKLFEVEEVNCICVDWKKGSQATYTQAANNVRVVGAQVAQMLDILLTEYSYPPSKVHLIGHSLGAHVAGEAGSKTPGLSRITGLDPVEASFESTPEEVRLDPSDADFVDVIHTDAAPLIPFLGFGTNQQMGHLDFFPNGGESMPGCKKNALSQIVDLDGIWAGTRDFVACNHLRSYKYYLESILNPDGFAAYPCTSYKSFESDKCFPCPDQGCPQMGHYADKFAGRTSEEQQKFFLNTGEASNFARWRYGVSITLSGRTATGQIKVALFGNKGNTHQYSIFRGILKPGSTHSYEFDAKLDVGTIEKVKFLWNNNVINPTLPKVGATKITVQKGEEKTVYNFCSEDTVREDTLLTLTPC

SEQ ID NO: 7601 - protein, 3130 aa, Homo sapiens
MFSVRIVTADYYMASPLQGLDTCQSPLTQAPVKKVPVVRVFGATPAGQKTCLHLHGIFPYLYVPYDGYGQQPESYLSQMAFSIDRALNVALGNPSSTAQHVFKVSLVSGMPFYGYHEKERHFMKIYLYNPTMVKRICELLQSGAIMNKFYQPHEAHIPYLLQLFIDYNLYGMNLINLAAVKFRKARRKSNTLHATGSCKNHLSGNSLADTLFRWEQDEIPSSLILEGVEPQSTCELEVDAVAADILNRLDIEAQIGGNPGLQAIWEDEKQRRRNRNETSQMSQPESQDHRFVPATESEKKFQKRLQEILKQNDFSVTLSGSVDYSDGSQEFSAELTLHSEVLSPEMLQCTPANMVEVHKDKESSKGHTRHKVEEALINEEAILNLMENSQTFQPLTQRLSESPVFMDSSPDEALVHLLAGLESDGYRGERNRMPSPCRSFGNNKYPQNSDDEENEPQIEKEEMELSLVMSQRWDSNIEEHCAKKRSLCRNTHRSSTEDDDSSSGEEMEWSDNSLLLASLSIPQLDGTADENSDNPLNNENSRTHSSVIATSKLSVKPSIFHKDAATLEPSSSAKITFQCKHTSALSSHVLNKEDLIEDLSQTNKNTEKGLDNSVTSFTNESTYSMKYPGSLSSTVHSENSHKENSKKEILPVSSCESSIFDYEEDIPSVTRQVPSRKYTNIRKIEKDSPFIHMHRHPNENTLGKNSFNFSDLNHSKNKVSSEGNEKGNSTALSSLFPSSFTENCELLSCSGENRTMVHSLNSTADESGLNKLKIRYEEFQEHKTEKPSLSQQAAHYMFFPSVVLSNCLTRPQKLSPVTYKLQPGNKPSRLKLNKRKLAGHQETSTKSSETGSTKDNFIQNNPCNSNPEKDNALASDLTKTTRGAFENKTPTDGFIDCHFGDGTLETEQSFGLYGNKYTLRAKRKVNYETEDSESSFVTHNSKISLPHPMEIGESLDGTLKSRKRRKMSKKLPPVIIKYIIINRFRGRKNMLVKLGKIDSKEKQVILTEEKMELYKKLAPLKDFWPKVPDSPATKYPIYPLTPKKSHRRKSKHKSAKKKTGKQQRTNNENIKRTLSFRKKRSHAILSPPSPSYNAETEDCDLNYSDVMSKLGFLSERSTSPINSSPPRCWSPTDPRAEEIMAAAEKEAMLFKGPNVYKKTVNSRIGKTSRARAQIKKSKAKLANPSIVTKKRNKRNQTNKLVDDGKKKPRAKQKTNEKGTSRKHTTLKDEKIKSQSGAEVKFVLKHQNVSEFASSSGGSQLLFKQKDMPLMGSAVDHPLSASLPTGINAQQKLSGCFSSFLESKKSVDLQTFPSSRDDLHPSVVCNSIGPGVSKINVQRPHNQSAMFTLKESTLIQKNIFDLSNHLSQVAQNTQISSGMSSKIEDNANNIQRNYLSSIGKLSEYRNSLESKLDQAYTPNFLHCKDSQQQIVCIAEQSKHSETCSPGNTASEESQMPNNCFVTSLRSPIKQIAWEQKQRGFILDMSNFKPERVKPRSLSEAISQTKALSQCKNRNVSTPSAFGEGQSGLAVLKELLQKRQQKAQNANTTQDPLSNKHQPNKNISGSLEHNKANKRTRSVTSPRKPRTPRSTKQKEKIPKLLKVDSLNLQNSSQLDNSVSDDSPIFFSDPGFESCYSLEDSLSPEHNYNFDINTIGQTGFCSFYSGSQFVPADQNLPQKFLSDAVQDLFPGQAIEKNEFLSHDNQKCDEDKHHTTDSASWIRSGTLSPEIFEKSTIDSNENRRHNQWKNSFHPLTTRSNSIMDSFCVQQAEDCLSEKSRLNRSSVSKEVFLSLPQPNNSDWIQGHTRKEMGQSLDSANTSFTAILSSPDGELVDVACEDLELYVSRNNDMLTPTPDSSPRSTSSPSQSKNGSFTPRTANILKPLMSPPSREEIMATLLDHDLSETIYQEPFCSNPSDVPEKPREIGGRLLMVETRLANDLAEFEGDFSLEGLRLWKTAFSAMTQNPRPGSPLRSGQGVVNKGSSNSPKMVEDKKIVIMPCKCAPSRQLVQVWLQAKEEYERSKKLPKTKPTGVVKSAENFSSSVNPDDKPVVPPKMDVSPCILPTTAHTKEDVDNSQIALQAPTTGCSQTASESQMLPPVASASDPEKDEDDDDNYYISYSSPDSPVIPPWQQPISPDSKALNGDDRPSSPVEELPSLAFENFLKPIKDGIQKSPCSEPQEPLVISPINTRARTGKCESLCFHSTPIIQRKLLERLPEAPGLSPLSTEPKTQKLSNKKGSNTDTLRRVLLTQAKNQFAAVNTPQKETSQIDGPSLNNTYGFKVSIQNLQEAKALHEIQNLTLISVELHARTRRDLEPDPEFDPICALFYCISSDTPLPDTEKTELTGVIVIDKDKTVFSQDIRYQTPLLIRSGITGLEVTYAADEKALFHEIANIIKRYDPDILLGYEIQMHSWGYLLQRAAALSIDLCRMISRVPDDKIENRFAAERDEYGSYTMSEINIVGRITLNLWRIMRNEVALTNYTFENVSFHVLHQRFPLFTFRVLSDWFDNKTDLYRWKMVDHYVSRVRGNLQMLEQLDLIGKTSEMARLFGIQFLHVLTRGSQYRVESMMLRIAKPMNYIPVTPSVQQRSQMRAPQCVPLIMEPESRFYSNSVLVLDFQSLYPSIVIAYNYCFSTCLGHVENLGKYDEFKFGCTSLRVPPDLLYQVRHDITVSPNGVAFVKPSVRKGVLPRMLEEILKTRFMVKQSMKAYKQDRALSRMLDARQLGLKLIANVTFGYTSANFSGRMPCIEVGDSIVHKARETLERAIKLVNDTKKWGARVVYGDTDSMFVLLKGATKEQSFKIGQEIAEAVTATNPKPVKLKFEKVYLPCVLQTKKRYVGYMYETLDQKDPVFDAKGIETVRRDSCPAVSKILERSLKLLFETRDISLIKQYVQRQCMKLLEGKASIQDFIFAKEYRGSFSYKPGACVPALELTRKMLTYDRRSEPQVGERVPYVIIYGTPGVPLIQLVRRPVEVLQDPTLRLNATYYITKQILPPLARIFSLIGIDVFSWYHELPRIHKATSSSRSEPEGRKGTISQYFTTLHCPVCDDLTQHGICSKCRSQPQHVAVILNQEIRELERQQEQLVKICKNCTGCFDRHIPCVSLNCPVLFKLSRVNRELSKAPYLRQLLDQF

SEQ ID NO: 7602 - protein, 718 aa, Homo sapiens
MLVHLFRVGIRGGPFPGRLLPPLRFQTFSAVRYSDGYRSSSLLRAVAHLRSQLWAHLPRAPLAPRWSPSAWCWVGGALLGPMVLSKHPHLCLVALCEAEEAPPASSTPHVVGSRFNWKLFWQFLHPHLLVLGVAVVLALGAALVNVQIPLLLGQLVEVVAKYTRDHVGSFMTESQNLSTHLLILYGVQGLLTFGYLVLLSHVGERMAVDMRRALFSSLLRQDITFFDANKTGQLVSRLTTDVQEFKSSFKLVISQGLRSCTQVAGCLVSLSMLSTRLTLLLMVATPALMGVGTLMGSGLRKLSRQCQEQIARAMGVADEALGNVRTVRAFAMEQREEERYGAELEACRCRAEELGRGIALFQGLSNIAFNCMVLGTLFIGGSLVAGQQLTGGDLMSFLVASQTVQRSMANLSVLFGQVVRGLSAGARVFEYMALNPCIPLSGGCCVPKEQLRGSVTFQNVCFSYPCRPGFEVLKDFTLTLPPGKIVALVGQSGGGKTTVASLLERFYDPTAGVVMLDGRDLRTLDPSWLRGQVVGFISQEPVLFGTTIMENIRFGKLEASDEEVYTAAREANAHEFITSFPEGYNTVVGERGTTLSGGQKQRLAIARALIKQPTVLILDEATSALDAESERVVQEALDRASAGRTVLVIAHRLSTVRGAHCIVVMADGRVWEAGTHEELLKKGGLYAELIRRQALDAPRTAAPPPKKPEGPRSHQHKS

SEQ ID NO: 7603 - protein, 1099 aa, Homo sapiens
MSVLNKTKWKGGTLQIQLAKESFLHRLAQEREAAKAKKEESTTGNANLLEKTGGVDFHMKAVPGTEVPGHKNWVVSKFGRVLPVLHLKNQHKRKIIKYDPSKYCHNLKKIGEDFSNTIPISSLTWELEGGNDPMSKKRRGEFSDFHGPPKKIIKVQKDESSTGSLAMSTRPRRVIERPPLTQQQAAQKRTCDSITPSKSSPVPVSDTQKLKNLPFKTSGLETAKKRNSISDDDTDSEDELRMMIAKEENLQRTTQPSINESESDPFEVVRDDFKSGVHKLHSLIGLGIKNRVSCHDSDDDIMRNDREYDSGDTDEIIAMKKNVAKVKNSTEFSQMEKSTKKTSFKNRENCELSDHCIKLQKRKSNVESALSHGLKSLNRKSPSHSSSSEDADSASELADSEGGEEYNAMMKNCLRVNLTLADLEQLAGSDLKVPNEDTKSDGPETTTQCKFDRGSKSPKTPTGLRRGRQCIRPAEIVASLLEGEENTCGKQKPKENNLKPKFQAFKGVGCLYEKESMKKSLKDSVASNNKDQNSMKHEDPSIISMEDGSPYVNGSLGEVTPCQHAKKANGPNYIQPQKRQTTFESQDRKAVSPSSSEKRSKNPISRPLEGKKSLSLSAKTHNIGFDKDSCHSTTKTEASQEERSDSSGLTSLKKSPKVSSKDTREIKTDFSLSISNSSDVSAKDKHAEDNEKRLAALEARQKAKEVQKKLVHNALANLDGHPEDKPTHIIFGSDSECETEETSTQEQSHPGEEWVKESMGKTSGKLFDSSDDDESDSEDDSNRFKIKPQFEGRAGQKLMDLQSHFGTDDRFRMDSRFLETDSEEEQEEVNEKKTAEEEELAEEKKKALNVVQSVLQINLSNSTNRGSVAAKKFKDIIHYDPTKQDHATYERKRDDKPKESKAKRKKKREEAEKLPEVSKEMYYNIAMDLKEIFQTTKYTSEKEEGTPWNEDCGKEKPEEIQDPAALTSDAEQPSGFTFSFFDSDTKDIKEETYRVETVKPGKIVWQEDPRLQDSSSEEEDVTEETDHRNSSPGEASLLEKETTRFFFFSKNDERLQGSDLFWRGVGSNMSRNSWEARTTNLRMDCRKKHKDAKRKMKPK

SEQ ID NO: 7604 - protein, 230 aa, Homo sapiens
MVVFGYEAGTKPRDSGVVPVGTEEAPKVFKMAASMHGQPSPSLEDAKLRRPMVIEIIEKNFDYLRKEMTQNIYQMATFGTTAGFSGIFSNFLFRRCFKVKHDALKTYASLATLPFLSTVVTDKLFVIDALYSDNISKENCVFRSSLIGIVCGVFYPSSLAFTKNGRLATKYHTVPLPPKGRVLIHWMTLCQTQMKLMAIPLVFQIMFGILNGLYHYAVFEETLEKTIHEE

SEQ ID NO: 7605 - protein, 563 aa, Homo sapiens
MSDDAGDTLATGDKAEVTEMPNSDSLPEDAEVHCDSAAVSHEPTPADPRGEGHENAAVQGAGAAAIGPPVQPQDANALEPPLNGDVTEDTLAECIDSVSLEAEPRSEIPLQEQNYLAVDSPPSGGGWAGWGSWGKSLLSSASATVGHGLTAVKEKAGATLRIHGVNSGSSEGAQPNTENGVPEITDAATDQGPAESPPTSPSSASRGMLSAITNVVQNTGKSVLTGGLDALEFIGKKTMNVLAESDPGFKRTKTLMERTVSLSQMLREAKEKEKQRLAQQLTMERTAHYGMLFDEYQGLSHLEALEILSNESESKVQSFLASLDGEKLELLKNDLISIKDIFAAKELENEENQEEQGLEEKGEEFARMLTELLFELHVAATPDKLNKAMKRAHDWVEEDQTVVSVDVAKVSEEETKKEEKEEKSQDPQEDKKEEKKTKTIEEVYMSSIESLAEVTARCIEQLHKVAELILHGQEEEKPAQDQAKVLIKLTTAMCNEVASLSKKFTNSLTTVGSNKKAEVLNPMISSVLLEGCNSTTYIQDAFQLLLPVLQVSHIQTSCLKAQP

SEQ ID NO: 7606 - protein, 364 aa, Homo sapiens
MAAISTSIPVISQPQFTAMNEPQCFYNESIAFFYNRSGKHLATEWNTVSKLVMGLGITVCIFIMLANLLVMVAIYVNRRFHFPIYYLMANLAAADFFAGLAYFYLMFNTGPNTRRLTVSTWLLRQGLIDTSLTASVANLLAIAIERHITVFRMQLHTRMSNRRVVVVIVVIWTMAIVMGAIPSVGWNCICDIENCSNMAPLYSDSYLVFWAIFNLVTFVVMVVLYAHIFGYVRQRTMRMSRHSSGPRRNRDTMMSLLKTVVIVLGAFIICWTPGLVLLLLDVCCPQCDVLAYEKFFLLLAEFNSAMNPIIYSYRDKEMSATFRQILCCQRSENPTGPTEGSDRSASSLNHTILAGVHSNDHSVV

SEQ ID NO: 7607 - protein, 1284 aa, Homo sapiens
MSSGDPAHLGLCLWLWLGATLGREQVQASGLLRLAVLPEDRLQMKWRESEGSGLGYLVQVKPMAGDSEQEVILTTKTPKATVGGLSPSKGYTLQIFELTGSGRFLLARREFVIEDLKSSSLDRSSQRPLGSGAPEPTPSHTGSPDPEQASEPQVAFTPSQDPRTPAGPQFRCLPPVPADMVFLVDGSWSIGHSHFQQVKDFLASVIAPFEIGPDKVQVGLTQYSGDAQTEWDLNSLSTKEQVLAAVRRLRYKGGNTFTGLALTHVLGQNLQPAAGLRPEAAKVVILVTDGKSQDDVHTAARVLKDLGVNVFAVGVKNADEAELRLLASPPRDITVHSVLDFLQLGALAGLLSRLICQRLQGGSPRQGPAAAPALDTLPAPTSLVLSQVTSSSIRLSWTPAPRHPLKYLIVWRASRGGTPREVVVEGPAASTELHNLASRTEYLVSVFPIYEGGVGEGLRGLVTTAPLPPPRALTLAAVTPRTVHLTWQPSAGATHYLVRCSPASPKGEEEEREVQVGRPEVLLDGLEPGRDYEVSVQSLRGPEGSEARGIRARTPTLAPPRHLGFSDVSHDAARVFWEGAPRPVRLVRVTYVSSEGGHSGQTEAPGNATSATLGPLSSSTTYTVRVTCLYPGGGSSTLTGRVTTKKAPSPSQLSMTELPGDAVQLAWVAAAPSGVLVYQITWTPLGEGKAHEISVPGNLGTAVLPGLGRHTEYDVTILAYYRDGARSDPVSLRYTPSTVSRSPPSNLALASETPDSLQVSWTPPLGRVLHYWLTYAPASGLGPEKSVSVPGARSHVTLPDLQAATKYRVLVSAIYAAGRSEAVSATGQTACPALRPDGSLPGFDLMVAFSLVEKAYASIRGVAMEPSAFGGTPTFTLFKDAQLTRRVSDVYPAPLPPEHTIVFLVRLLPETPREAFALWQMTAEDFQPLLGVLLDAGKKSLTYFHRDPRAALQEATFDPQEVRKIFFGSFHKVHVAVGRSKVRLYVDCRKVAERPLGEMGSPPAAGFVTLGRLAKARGPRSSSAAFQLQMLQIVCSDTWADEDRCCELPASRDGETCPAFVSACSCSSETPGPPGPQGPPGLPGRNGTPGEQGFPGPRGPPGVKGEKGDHGLPGLQGHPGHQGIPGRVGLQGPKGMRGLEGTAGLPGPPGPRGFQGMAGARGTSGERGPPGTVGPTGLPGPKGERGEKGEPQSLATLYQLVSQASHVSKFDSFHENTRPPMPILEQKLEPGTEPLGSPGTRSKALVPGEWGRGGRHLEGRGEPGAVGQMGSPGQQGASTQGLWE

SEQ ID NO: 7608 - protein, 493 aa, Homo sapiens
MILNSLSLCYHNKLILAPMVRVGTLPMRLLALDYGADIVYCEELIDLKMIQCKRVVNEVLSTVDFVAPDDRVVFRTCEREQNRVVFQMGTSDAERALAVARLVENDVAGIDVNMGCPKQYSTKGGMGAALLSDPDKIEKILSTLVKGTRRPVTCKIRILPSLEDTLSLVKRIERTGIAAIAVHGRKREERPQHPVSCEVIKAIADTLSIPVIANGGSHDHIQQYSDIEDFRQATAASSVMVARAAMWNPSIFLKEGLRPLEEVMQKYIRYAVQYDNHYTNTKYCLCQMLREQLESPQGRLLHAAQSSREICEAFGLGAFYEETTQELDAQQARLSAKTSEQTGEPAEDTSGVIKMAVKFDRRAYPAQITPKMCLLEWCRREKLAQPVYETVQRPLDRLFSSIVTVAEQKYQSTLWDKSKKLAEQAAAIVCLRSQGLPEGRLGEESPSLHKRKREAPDQDPGGPRAQELAQPGDLCKKPFVALGSGEESPLEGW

SEQ ID NO: 7609 - protein, 806 aa, Homo sapiens
MASGADSKGDDLSTAILKQKNRPNRLIVDEAINEDNSVVSLSQPKMDELQLFRGDTVLLKGKKRREAVCIVLSDDTCSDEKIRMNRVVRNNLRVRLGDVISIQPCPDVKYGKRIHVLPIDDTVEGITGNLFEVYLKPYFLEAYRPIRKGDIFLVRGGMRAVEFKVVETDPSPYCIVAPDTVIHCEGEPIKREDEEESLNEVGYDDIGGCRKQLAQIKEMVELPLRHPALFKAIGVKPPRGILLYGPPGTGKTLIARAVANETGAFFFLINGPEIMSKLAGESESNLRKAFEEAEKNAPAIIFIDELDAIAPKREKTHGEVERRIVSQLLTLMDGLKQRAHVIVMAATNRPNSIDPALRRFGRFDREVDIGIPDATGRLEILQIHTKNMKLADDVDLEQVANETHGHVGADLAALCSEAALQAIRKKMDLIDLEDETIDAEVMNSLAVTMDDFRWALSQSNPSALRETVVEVPQVTWEDIGGLEDVKRELQELVQYPVEHPDKFLKFGMTPSKGVLFYGPPGCGKTLLAKAIANECQANFISIKGPELLTMWFGESEANVREIFDKARQAAPCVLFFDELDSIAKARGGNIGDGGGAADRVINQILTEMDGMSTKKNVFIIGATNRPDIIDPAILRPGRLDQLIYIPLPDEKSRVAILKANLRKSPVAKDVDLEFLAKMTNGFSGADLTEICQRACKLAIRESIESEIRRERERQTNPSAMEVEEDDPVPEIRRDHFEEAMRFARRSVSDNDIRKYEMFAQTLQQSRGFGSFRFPSGNQGGAGPSQGSGGGTGGSVYTEDNDDDLYG

SEQ ID NO: 7610 - protein, 418 aa, Homo sapiens
MFSPDQENHPSKAPVKYGELIVLGYNGSLPNGDRGRRKSRFALFKRPKANGVKPSTVHIACTPQAAKAISNKDQHSISYTLSRAQTVVVEYTHDSNTDMFQIGRSTESPIDFVVTDTVPGSQSNSDTQSVQSTISRFACRIICERNPPFTARIYAAGFDSSKNIFLGEKAAKWKTSDGQMDGLTTNGVLVMHPRNGFTEDSKPGIWREISVCGNVFSLRETRSAQQRGKMVEIETNQLQDGSLIDLCGATLLWRTAEGLSHTPTVKHLEALRQEINAARPQCPVGFNTLAFPSMKRKDVVDEKQPWVYLNCGHVHGYHNWGNKEERDGKDRECPMCRSVGPYVPLWLGCEAGFYVDAGPPTHAFSPCGHVCSEKTTAYWSQIPLPHGTHTFHAACPFCAHQLAGEQGYIRLIFQGPLD

SEQ ID NO: 7611 - protein, 752 aa, Homo sapiens
MLPGLALLLLAAWTARALEVPTDGNAGLLAEPQIAMFCGRLNMHMNVQNGKWDSDPSGTKTCIDTKEGILQYCQEVYPELQITNVVEANQPVTIQNWCKRGRKQCKTHPHFVIPYRCLVGEFVSDALLVPDKCKFLHQERMDVCETHLHWHTVAKETCSEKSTNLHDYGMLLPCGIDKFRGVEFVCCPLAEESDNVDSADAEEDDSDVWWGGADTDYADGSEDKVVEVAEEEEVAEVEEEEADDDEDDEDGDEVEEEAEEPYEEATERTTSIATTTTTTTESVEEVVREVCSEQAETGPCRAMISRWYFDVTEGKCAPFFYGGCGGNRNNFDTEEYCMAVCGSAMSQSLLKTTQEPLARDPVKLPTTAASTPDAVDKYLETPGDENEHAHFQKAKERLEAKHRERMSQVMREWEEAERQAKNLPKADKKAVIQHFQEKVESLEQEAANERQQLVETHMARVEAMLNDRRRLALENYITALQAVPPRPRHVFNMLKKYVRAEQKDRQHTLKHFEHVRMVDPKKAAQIRSQVMTHLRVIYERMNQSLSLLYNVPAVAEEIQDEVDELLQKEQNYSDDVLANMISEPRISYGNDALMPSLTETKTTVELLPVNGEFSLDDLQPWHSFGADSVPANTENEGSGLTNIKTEEISEVKMDAEFRHDSGYEVHHQKLVFFAEDVGSNKGAIIGLMVGGVVIATVIVITLVMLKKKQYTSIHHGVVEVDAAVTPEERHLSKMQQNGYENPTYKFFEQMQN

SEQ ID NO: 7612 - protein, 1091 aa, Homo sapiens
MCRKKPDTMILTQIEAKEACDWLRATGFPQYAQLYEDFLFPIDISLVKREHDFLDRDAIEALCRRLNTLNKCAVMKLEISPHRKRSDDSDEDEPCAISGKWTFQRDSKRWSRLEEFDVFSPKQDLVPGSPDDSHPKDGPSPGGTLMDLSERQEVSSVRSLSSTGSLPSHAPPSEDAATPRTNSVISVCSSSNLAGNDDSFGSLPSPKELSSFSFSMKGHEKTAKSKTRSLLKRMESLKLKSSHHSKHKAPSKLGLIISGPILQEGMDEEKLKQLNCVEISALNGNRINVPMVRKRSVSNSTQTSSSSSQSETSSAVSTPSPVTRTRSLSACNKRVGMYLEGFDPFNQSTFNNVVEQNFKNRESYPEDTVFYIPEDHKPGTFPKALTNGSFSPSGNNGSVNWRTGSFHGPGHISLRRENSSDSPKELKRRNSSSSMSSRLSIYDNVPGSILYSSSGDLADLENEDIFPELDDILYHVKGMQRIVNQWSEKFSDEGDSDSALDSVSPCPSSPKQIHLDVDNDRTTPSDLDSTGNSLNEPEEPSEIPERRDSGVGASLTRSNRHRLRWHSFQSSHRPSLNSVSLQINCQSVAQMNLLQKYSLLKLTALLEKYTPSNKHGFSWAVPKFMKRIKVPDYKDRSVFGVPLTVNVQRTGQPLPQSIQQAMRYLRNHCLDQVGLFRKSGVKSRIQALRQMNEGAIDCVNYEGQSAYDVADMLKQYFRDLPEPLMTNKLSETFLQIYQYVPKDQRLQAIKAAIMLLPDENREVLQTLLYFLSDVTAAVKENQMTPTNLAVCLAPSLFHLNTLKRENSSPRVMQRKQSLGKPDQKDLNENLAATQGLAHMIAECKKLFQVPEEMSRCRNSYTEQELKPLTLEALGHLGNDDSADYQHFLQDCVDGLFKEVKEKFKGWVSYSTSEQAELSYKKVSEGPPLRLWRSVIEVPAVPEEILKRLLKEQHLWDVDLLDSKVIEILDSQTEIYQYVQNSMAPHPARDYVVLRTWRTNLPKGACALLLTSVDHDRAPVVGVRVNVLLSRYLIEPCGPGKSKLTYMCRVDLRGHMPEWYTKSFGHLCAAEVVKIRDSFSNQNTETKDTKSR

SEQ ID NO: 7613 - protein, 786 aa, Homo sapiens
MAGLTAAAPRPGVLLLLLSILHPSRPGGVPGAIPGGVPGGVFYPGAGLGALGGGALGPGGKPLKPVPGGLAGAGLGAGLGAFPAVTFPGALVPGGVADAAAAYKAAKAGAGLGGVPGVGGLGVSAGAVVPQPGAGVKPGKVPGVGLPGVYPGGVLPGARFPGVGVLPGVPTGAGVKPKAPGVGGAFAGIPGVGPFGGPQPGVPLGYPIKAPKLPGGYGLPYTTGKLPYGYGPGGVAGAAGKAGYPTGTGVGPQAAAAAAAKAAAKFGAGAAGVLPGVGGAGVPGVPGAIPGIGGIAGVGTPAAAAAAAAAAKAAKYGAAAGLVPGGPGFGPGVVGVPGAGVPGVGVPGAGIPVVPGAGIPGAAVPGVVSPEAAAKAAAKAAKYGARPGVGVGGIPTYGVGAGGFPGFGVGVGGIPGVAGVPGVGGVPGVGGVPGVGISPEAQAAAAAKAAKYGAAGAGVLGGLVPGAPGAVPGVPGTGGVPGVGTPAAAAAKAAAKAAQFGLVPGVGVAPGVGVAPGVGVAPGVGLAPGVGVAPGVGVAPGVGVAPGIGPGGVAAAAKSAAKVAAKAQLRAAAGLGAGIPGLGVGVGVPGLGVGAGVPGLGVGAGVPGFGAGADEGVRRSLSPELREGDPSSSQHLPSTPSSPRVPGALAAAKAAKYGAAVPGVLGGLGALGGVGIPGGVVGAGPAAAAAAAKAAAKAAQFGLVGAAGLGGLGVGGLGVPGVGGLGGIPPAAAAKAAKYGAAGLGGVLGGAGQFPLGGVAARPGFGLSPIFPGGACLGKACGRKRK

SEQ ID NO: 7614 - protein, 278 aa, Homo sapiens
MPDQALQQMLDRSCWVCFATDEDDRTAEWVRPCRCRGSTKWVHQACLQRWVDEKQRGNSTARVACPQCNAEYLIVFPKLGPVVYVLDLADRLISKACPFAAAGIMVGSIYWTAVTYGAVTVMQVVGHKEGLDVMERADPLFLLIGLPTIPVMLILGKMIRWEDYVLRLWRKYSNKLQILNSIFPGIGCPVPRIPAEANPLADHVSATRILCGALVFPTIATIVGKLMFSSVNSNLQRTILGGIAFVAIKGAFKVYFKQQQYLRQAHRKILNYPEQEEA

SEQ ID NO: 7615 - protein, 1393 aa, Homo sapiens
MACSIVQFCYFQDLQAARDFLFPHLREEILSGALRRDPSKSTDWEDDGWGAWEENEPQEPEEEGNTCKTQKTSWLQDCVLSLSPTNDLMVIAREQKAVFLVPKWKYSDKGKEEMQFAVGWSGSLNVEEGECVTSALCIPLASQKRSSTGRPDWTCIVVGFTSGYVRFYTENGVLLLAQLLNEDPVLQLKCRTYEIPRHPGVTEQNEELSILYPAAIVTIDGFSLFQSLRACRNQVAKAAASGNENIQPPPLAYKKWGLQDIDTIIDHASVGIMTLSPFDQMKTASNIGGFNAAIKNSPPAMSQYITVGSNPFTGFFYALEGSTQPLLSHVALAVASKLTSALFNAASGWLGWKSKHEEEAVQKQKPKVEPATPLAVRFGLPDSRRHGESICLSPCNTLAAVTDDFGRVILLDVARGIAIRMWKGYRDAQIGWIQTVEDLHERVPEKADFSPFGNSQGPSRVAQFLVIYAPRRGILEVWSTQQGPRVGAFNVGKHCRLLYPGYKIMGLNNVTSQSWQPQTYQICLVDPVSGSVKTVNVPFHLALSDKKSERAKDMHLVKKLAALLKTKSPNLDLVETEIKELILDIKYPATKKQALESILASERLPFSCLRNITQTLMDTLKSQELESVDEGLLQFCANKLKLLQLYESVSQLNSLDFHLDTPFSDNDLALLLRLDEKELLKLQALLEKYKQENTRTNVRFSDDKDGVLPVKTFLEYLEYEKDVLNIKKISEEEYVALGSFFFWKCLHGESSTEDMCHTLESAGLSPQLLLSLLLSVWLSKEKDILDKPQSICCLHTMLSLLSKMKVAIDETWDSQSVSPWWQQMRTACIQSENNGAALLSAHVGHSVAAQISNNMTEKKFSQTVLGADSEALTDSWEALSLDTEYWKLLLKQLEDCLILQTLLHSKGNTQTSKVSSLQAEPLPRLSVKKLLEGGKGGIADSVAKWIFKQDFSPEVLKLANEERDAENPDEPKEGVNRSFLEVSEMEMDLGAIPDLLHLAYEQFPCSLELDVLHAHCCWEYVVQWNKDPEEARFFVRSIEHLKQIFNAHVQNGIALMMWNTFLVKRFSAATYLMDKVGKSPKDRLCRRDVGMSDTAMTSFLGSCLDLLQILMEADVSRDEIQVPVLDTEDAWLSVEGPISIVELALEQKHIHYPLVEHHSILCSILYAVMRFSLKTVKPLSLFDSKGKNAFFKDLTSIQLLPSGEMDPNFISVRQQFLLKVVSAAVQAQHSATKVKDPTEEATPTPFGKDQDWPALAVDLAHHLQVSEDVVRRHYVGELYNYGVDHLGEEAILQVHDKEVLASQLLVLTGQRLAHALLHTQTKEGMELLARLPPTLCTWLKAMDPQDLQNTEVPIATTAKLVNKVIELLPEKHGQYGLALHLIEAVEAISLPSL

SEQ ID NO: 7616 - protein, 323 aa, Homo sapiens
MAEGERQPPPDSSEEAPPATQNFIIPKKEIHTVPDMGKWKRSQAYADYIGFILTLNEGVKGKKLTFEYRVSEAIEKLVALLNTLDRWIDETPPVDQPSRFGNKAYRTWYAKLDEEAENLVATVVPTHLAAAVPEVAVYLKESVGNSTRIDYGTGHEAAFAAFLCCLCKIGVLRVDDQIAIVFKVFNRYLEVMRKLQKTYRMEPAGSQGVWGLDDFQFLPFIWGSSQLIDHPYLEPRHFVDEKAVNENHKDYMFLECILFITEMKTGPFAEHSNQLWNISAVPSWSKVNQGLIRMYKAECLEKFPVIQHFKFGSLLPIHPVTSG

SEQ ID NO: 7617 - protein, 2063 aa, Homo sapiens
MVLDDLPNLEDIYTSLCSSTMEDSEMDFDSGLEDDDTKSDSILEDSTIFVAFKGNIDDKDFKWKLDAILKNVPNLLHMESSKLKVQKVEPWNSVRVTFNIPREAAERLRILAQSNNQQLRDLGILSVQIEGEGAINLALAQNRSQDVRMNGPMGAGNSVRMEAGFPMASGPGIIRMNNPATVMIPPGGNVSSSMMAPGPNPELQPRTPRPASQSDAMDPLLSGLHIQQQSHPSGSLAPPHHPMQPVSVNRQMNPANFPQLQQQQQQQQQQQQQQQQQQQQQQQQQLQARPPQQHQQQQPQGIRPQFTAPTQVPVPPGWNQLPSGALQPPPAQGSLGTMTANQGWKKAPLPGPMQQQLQARPSLATVQTPSHPPPPYPFGSQQASQAHTNFPQMSNPGQFTAPQMKSLQGGPSRVPTPLQQPHLTNKSPASSPSSFQQGSPASSPTVNQTQQQMGPRPPQNNPLPQGFQQPVSSPGRNPMVQQGNVPPNFMVMQQQPPNQGPQSLHPGLGGMPKRLPPGFSAGQANPNFMQGQVPSTTATTPGNSGAPQLQANQNVQHAGGQGAGPPQNQMQVSHGPPNMMQPSLMGIHGNMNNQQAGTSGVPQVNLSNMQGQPQQGPPSQLMGMHQQIVPSQGQMVQQQGTLNPQNPMILSRAQLMPQGQMMVNPPSQNLGPSPQRMTPPKQMLSQQGPQMMAPHNQMMGPQGQVLLQQNPMIEQIMTNQMQGNKQQFNTQNQSNVMPGPAQIMRGPTPNMQGNMVQFTGQMSGQMLPQQGPVNNSPSQVMGIQGQVLRPPGPSPHMAQQHGDPATTANNDVSLSQMMPDVSIQQTNMVPPHVQAMQGNSASGNHFSGHGMSFNAPFSGAPNGNQMSCGQNPGFPVNKDVTLTSPLLVNLLQSDISAGHFGVNNKQNNTNANKPKKKKPPRKKKNSQQDLNTPDTRPAGLEEADQPPLPGEQGINLDNSGPKLPEFSNRPPGYPSQPVEQRPLQQMPPQLMQHVAPPPQPPQQQPQPQLPQQQQPPPPSQPQSQQQQQQQQQMMMMLMMQQDPKSVRLPVSQNVHPPRGPLNPDSQRMPMQQSGSVPVMVSLQGPASVPPSPDKQRMPMPVNTPLGSNSRKMVYQESPQNPSSSPLAEMASLPEASGSEAPSVPGGPNNMPSHVVLPQNQLMMTGPKPGPSPLSATQGATPQQPPVNSLPSSHGHHFPNVAAPTQTSRPKTPNRASPRPYYPQTPNNRPPSTEPSEISLSPERLNASIAGLFPPQINIPLPPRPNLNRGFDQQGLNPTTLKAIGQAPSNLTMNPSNFATPQTHKLDSVVVNSGKQSNSGATKRASPSNSRRSSPGSSRKTTPSPGRQNSKAPKLTLASQTNAALLQNVELPRNVLVSPTPLANPPVPGSFPNNSGLNPQNSTVSVAAVGGVVEDNKESLNVPQDSDCQNSQSRKEQVNIELKAVPAQEVKMVVPEDQSKKDGQPSDPNKLPSVEENKNLVSPAMREAPTSLSQLLDNSGAPNVTIKPPGLTDLEVTPPVVSGEDLKKASVIPTLQDLSSSKEPSNSLNLPHSNELCSSLVHPELSEVSSNVAPSIPPVMSRPVSSSSISTPLPPNQITVFVTSNPITTSANTSAALPTHLQSALMSTVVTMPNAGSKVMVSEGQSAAQSNARPQFITPVFINSSSIIQVMKGSQPSTIPAAPLTTNSGLMPPSVAVVGPLHIPQNIKFSSAPVPPNALSSSPAPNIQTGRPLVLSSRATPVQLPSPPCTSSPVVPSHPPVQQVKELNPDEASPQVNTSADQNTLPSSQSTTMVSPLLTNSPGSSGNRRSPVSSSKGKGKVDKIGQILLTKACKKVTGSLEKGEEQYGADGETEGQGLDTTAPGLMGTEQLSTELDSKTPTPPAPTLLKMTSSPVGPGTASAGPSLPGGALPTSVRSIVTTLVPSELISAVPTTKSNHGGIASESLAGGLVEEKVGSHPELLPSIAPSQNLVSKETSTTALQASVARPELEVNAAIVSGQSSEPKEIVEKSKIPGRRNSRTEEPTVASESVENGHRKRSSRPASASSSTKDITSAVQSKRRKSK

SEQ ID NO: 7618 - protein, 181 aa, Homo sapiens
MAIFSVYVVNKAGGLIYQLDSYAPRAEAEKTFSYPLDLLLKLHDERVLVAFGQRDGIRVGHAVLAINGMDVNGRYTADGKEVLEYLGNPANYPVSIRFGRPRLTSNEKLMLASMFHSLFAIGSQLSPEQGSSGIEMLETDTFKLHCYQTLTEMPIRCELFDQNLKLALEVAEKAGTFGPGS

SEQ ID NO: 7619 - protein, 592 aa, Homo sapiens
MGRGLLRGLWPLHIVLWTRIASTIPPHVQKSDVEMEAQKDEIICPSCNRTAHPLRHINNDMIVTDNNGAVKFPQLCKFCDVRFSTCDNQKSCMSNCSITSICEKPQEVCVAVWRKNDENITLETVCHDPKLPYHDFILEDAASPKCIMKEKKKPGETFFMCSCSSDECNDNIIFSEEYNTSNPDLLLVIFQVTGISLLPPLGVAISVIIIFYCYRVNRQQKLSSTWETGKTRKLMEFSEHCAIILEDDRSDISSTCANNINHNTELLPIELDTLVGKGRFAEVYKAKLKQNTSEQFETVAVKIFPYEEYASWKTEKDIFSDINLKHENILQFLTAEERKTELGKQYWLITAFHAKGNLQEYLTRHVISWEDLRKLGSSLARGIAHLHSDHTPCGRPKMPIVHRDLKSSNILVKNDLTCCLCDFGLSLRLDPTLSVDDLANSGQVGTARYMAPEVLESRMNLENVESFKQTDVYSMALVLWEMTSRCNAVGEVKDYEPPFGSKVREHPCVESMKDNVLRDRGRPEIPSFWLNHQGIQMVCETLTECWDHDPEARLTAQCVAERFSELEHLDRLSGRSCSEEKIPEDGSLNTTK

SEQ ID NO: 7620 - protein, 348 aa, Homo sapiens
MSLVDLGKKLLEAARAGQDDEVRILMANGAPFTTDWLGTSPLHLAAQYGHYSTTEVLLRAGVSRDARTKVDRTPLHMAASEGHASIVEVLLKHGADVNAKDMLKMTALHWATEHNHQEVVELLIKYGADVHTQSKFCKTAFDISIDNGNEDLAEILQIAMQNQINTNPESPDTVTIHAATPQFIIGPGGVVNLTDETGVSAVQFGNSSTSVLATLAALAEASAPLSNSSETPVVATEEVVTAESVDGAIQQVVSSGGQQVITIVTDGIQLGNLHSIPTSGIGQPIIVTMPDGQQVLTVPATDIAEETVISEEPPAKRQCIEIIENRVESAEIEVRSLLPGVLCRSHPK

SEQ ID NO: 7621 - protein, 617 aa, Homo sapiens
MKVSLGNGEMGVSAHLQPCKAGTTRFFTSNTHSSVVLQGFDQLRIEGLLCDVTLVPGDGDEIFPVHRAMMASASDYFKAMFTGGMKEQDLMCIKLHGVNKVGLKKIIDFIYTAKLSLNMDNLQDTLEAASFLQILPVLDFCKVFLISGVSLDNCVEVGRIANTYNLIEVDKYVNNFILKNFPALLSTGEFLKLPFERLAFVLSSNSLKHCTELELFKAACRWLRLEDPRMDYAAKLMKNIRFPLMTPQDLINYVQTVDFMRTDNTCVNLLLEASNYQMMPYMQPVMQSDRTAIRSDSTHLVTLGGVLRQQLVVSKELRMYDERAQEWRSLAPMDAPRYQHGIAVIGNFLYVVGGQSNYDTKGKTAVDTVFRFDPRYNKWMQVASLNEKRTFFHLSALKGHLYAVGGRSAAGELATVECYNPRMNEWSYVAKMSEPHYGHAGTVYGGLMYISGGITHDTFQNELMCFDPDTDKWMQKAPMTTVRGLHCMCTVGDKLYVIGGNHFRGTSDYDDVLSCEYYSPTLDQWTPIAAMLRGQSDVGVAVFENKIYVVGGYSWNNRCMVEIVQKYDPEKDEWHKVFDLPESLGGIRACTLTVFPPEENPGSPSRESPLSAPSDHS

SEQ ID NO: 7622 - protein, 896 aa, Homo sapiens
MTEESEETVLYIEHRYVCSECNQLYGSLEEVLMHQNSHVPQQHFELVGVADPGVTVATDTASGTGLYQTLVQESQYQCLECGQLLMSPSQLLEHQELHLKMMAPQEAVPAEPSPKAPPLSSSTIHYECVDCKALFASQELWLNHRQTHLRATPTKAPAPVVLGSPVVLGPPVGQARVAVEHSYRKAEEGGEGATVPSAAATTTEVVTEVELLLYKCSECSQLFQLPADFLEHQATHFPAPVPESQEPALQQEVQASSPAEVPVSQPDPLPASDHSYELRNGEAIGRDRRGRRARRNNSGEAGGAATQELFCSACDQLFLSPHQLQQHLRSHREGVFKCPLCSRVFPSPSSLDQHLGDHSSESHFLCVDCGLAFGTEALLLAHRRAHTPNPLHSCPCGKTFVNLTKFLYHRRTHGVGGVPLPTTPVPPEEPVIGFPEPAPAETGEPEAPEPPVSEETSAGPAAPGTYRCLLCSREFGKALQLTRHQRFVHRLERRHKCSICGKMFKKKSHVRNHLRTHTGERPFPCPDCSKPFNSPANLARHRLTHTGERPYRCGDCGKAFTQSSTLRQHRLVHAQHFPYRCQECGVRFHRPYRLLMHRYHHTGEYPYKCRECPRSFLLRRLLEVHQLVVHAGRQPHRCPSCGAAFPSSLRLREHRCAAAAAQAPRRFECGTCGKKVGSAARLQAHEAAHAAAGPGEVLAKEPPAPRAPRATRAPVASPAALGSTATASPAAPARRRGLECSECKKLFSTETSLQVHRRIHTGERPYPCPDCGKAFRQSTHLKDHRRLHTGERPFACEVCGKAFAISMRLAEHRRIHTGERPYSCPDCGKSYRSFSNLWKHRKTHQQQHQAAVRQQLAEAEAAVGLAVMETAVEALPLVEAIEIYPLAEAEGVQISG

SEQ ID NO: 7623 - protein, 387 aa, Homo sapiens
MTTQLGPALVLGVALCLGCGQPLPQVPERPFSVLWNVPSAHCEARFGVHLPLNALGIIANRGQHFHGQNMTIFYKNQLGLYPYFGPRGTAHNGGIPQALPLDRHLALAAYQIHHSLRPGFAGPAVLDWEEWCPLWAGNWGRRRAYQAASWAWAQQVFPDLDPQEQLYKAYTGFEQAARALMEDTLRVAQALRPHGLWGFYHYPACGNGWHSMASNYTGRCHAATLARNTQLHWLWAASSALFPSIYLPPRLPPAHHQAFVRHRLEEAFRVALVGHRHPLPVLAYVRLTHRRSGRFLSQEECWHLHDYLVDTLGPYVINVTRAAMACSHQRCHGHGRCARRDPGQMEAFLHLWPDGSLGDWKSFSCHCYWGWAGPTCQEPRPGPKEAV

SEQ ID NO: 7624 - protein, 365 aa, Homo sapiens
MDIIETAKLEEHLENQPSDPTNTYARPAEPVEEENKNGNGKPKSLSSGLRKGTKKYPDYIQIAMPTESRNKFPLEWWKTGIAFIYAVFNLVLTTVMITVVHERVPPKELSPPLPDKFFDYIDRVKWAFSVSEINGIILVGLWITQWLFLRYKSIVGRRFCFIIGTLYLYRCITMYVTTLPVPGMHFQCAPKLNGDSQAKVQRILRLISGGGLSITGSHILCGDFLFSGHTVTLTLTYLFIKEYSPRHFWWYHLICWLLSAAGIICILVAHEHYTIDVIIAYYITTRLFWWYHSMANEKNLKVSSQTNFLSRAWWFPIFYFFEKNVQGSIPCCFSWPLSWPPGCFKSSCKKYSRVQKIGEDNEKST

SEQ ID NO: 7625 - protein, 273 aa, Homo sapiens
MSMSPTVIILACLGFFLDQSVWAHVGGQDKPFCSAWPSAVVPQGGHVTLRCHYRRGFNIFTLYKKDGVPVPELYNRIFWNSFLISPVTPAHAGTYRCRGFHPHSPTEWSAPSNPLVIMVTGLYEKPSLTARPGPTVRAGENVTLSCSSQSSFDIYHLSREGEAHELRLPAVPSINGTFQADFPLGPATHGETYRCFGSFHGSPYEWSDPSDPLPVSVTGNPSSSWPSPTEPSFKTGIARHLHAVIRYSVAIILFTILPFFLLHRWCSKKKMLL

SEQ ID NO: 7626 - protein, 78 aa, Homo sapiens
MGSGLPLVLLLTLLGSSHGTGPGMTLQLKLKESFLTNSSYESSFLELLEKLCLLLHLPSGTSVTLHHARSQHHVVCNT

SEQ ID NO: 7627 - protein, 885 aa, Homo sapiens
MAWRCPRMGRVPLAWCLALCGWACMAPRGTQAEESPFVGNPGNITGARGLTGTLRCQLQVQGEPPEVHWLRDGQILELADSTQTQVPLGEDEQDDWIVVSQLRITSLQLSDTGQYQCLVFLGHQTFVSQPGYVGLEGLPYFLEEPEDRTVAANTPFNLSCQAQGPPEPVDLLWLQDAVPLATAPGHGPQRSLHVPGLNKTSSFSCEAHNAKGVTTSRTATITVLPQQPRNLHLVSRQPTELEVAWTPGLSGIYPLTHCTLQAVLSDDGMGIQAGEPDPPEEPLTSQASVPPHQLRLGSLHPHTPYHIRVACTSSQGPSSWTHWLPVETPEGVPLGPPENISATRNGSQAFVHWQEPRAPLQGTLLGYRLAYQGQDTPEVLMDIGLRQEVTLELQGDGSVSNLTVCVAAYTAAGDGPWSLPVPLEAWRPVKEPSTPAFSWPWWYVLLGAVVAAACVLILALFLVHRRKKETRYGEVFEPTVERGELVVRYRVRKSYSRRTTEATLNSLGISEELKEKLRDVMVDRHKVALGKTLGEGEFGAVMEGQLNQDDSILKVAVKTMKIAICTRSELEDFLSEAVCMKEFDHPNVMRLIGVCFQGSERESFPAPVVILPFMKHGDLHSFLLYSRLGDQPVYLPTQMLVKFMADIASGMEYLSTKRFIHRDLAARNCMLNENMSVCVADFGLSKKIYNGDYYRQGRIAKMPVKWIAIESLADRVYTSKSDVWSFGVTMWEIATRGQTPYPGVENSEIYDYLRQGNRLKQPADCLDGLYALMSRCWELNPQDRPSFTELREDLENTLKALPPAQEPDEILYVNMDEGGGYPEPPGAAGGADPPTQPDPKDSCSCLTAAEVHPAGRYVLCPSTTPSPAQPADRGSPAAPGQEDGA

SEQ ID NO: 7628 - protein, 113 aa, Homo sapiens
MASSRRGLLLLLLLTAHLGPSEAQHWSHGWYPGGKRALSSAQDPQNALRPPAGSPVQTAHGLPSDALAPLDDSMPWEGRTTAQWSLHRKRHLARTLLTAAREPRPAPPSSNKV

SEQ ID NO: 7629 - protein, 332 aa, Homo sapiens
MAVTDSLSRAATVLATVLLLSFGSVAASHIEDQAEQFFRSGHTNNWAVLVCTSRFWFNYRHVANTLSVYRSVKRLGIPDSHIVLMLADDMACNPRNPKPATVFSHKNMELNVYGDDVEVDYRSYEVTVENFLRVLTGRIPPSTPRSKRLLSDDRSNILIYMTGHGGNGFLKFQDSEEITNIELADAFEQMWQKRRYNELLFIIDTCQGASMYERFYSPNIMALASSQVGEDSLSHQPDPAIGVHLMDRYTFYVLEFLEEINPASQTNMNDLFQVCPKSLCVSTPGHRTDLFQRDPKNVLITDFFGSVRKVEITTETIKLQQDSEIMESRYSS

SEQ ID NO: 7630 - protein, 870 aa, Homo sapiens
MASASSSRAGVALPFEKSQLTLKVVSAKPKVHNRQPRINSYVEVAVDGLPSETKKTGKRIGSSELLWNEIIILNVTAQSHLDLKVWSCHTLRNELLGTASVNLSNVLKNNGGKMENMQLTLNLQTENKGSVVSGGELTIFLDGPTVDLGNVPNGSALTDGSQLPSRDSSGTAVAPENRHQPPSTNCFGGRSRTHRHSGASARTTPATGEQSPGARSRHRQPVKNSGHSGLANGTVNDEPTTATDPEEPSVVGVTSPPAAPLSVTPNPNTTSLPAPATPAEGEEPSTSGTQQLPAAAQAPDALPAGWEQRELPNGRVYYVDHNTKTTTWERPLPPGWEKRTDPRGRFYYVDHNTRTTTWQRPTAEYVRNYEQWQSQRNQLQGAMQHFSQRFLYQSSSASTDHDPLGPLPPGWEKRQDNGRVYYVNHNTRTTQWEDPRTQGMIQEPALPPGWEMKYTSEGVRYFVDHNTRTTTFKDPRPGFESGTKQGSPGAYDRSFRWKYHQFRFLCHSNALPSHVKISVSRQTLFEDSFQQIMNMKPYDLRRRLYIIMRGEEGLDYGGIAREWFFLLSHEVLNPMYCLFEYAGKNNYCLQINPASSINPDHLTYFRFIGRFIAMALYHGKFIDTGFTLPFYKRMLNKRPTLKDLESIDPEFYNSIVWIKENNLEECGLELYFIQDMEILGKVTTHELKEGGESIRVTEENKEEYIMLLTDWRFTRGVEEQTKAFLDGFNEVAPLEWLRYFDEKELELMLCGMQEIDMSDWQKSTIYRHYTKNSKQIQWFWQVVKEMDNEKRIRLLQFVTGTCRLPVGGFAELIGSNGPQKFCIDKVGKETWLPRSHTCFNRLDLPPYKSYEQLREKLLYAIEETEGFGQE

SEQ ID NO: 7631 - protein, 1156 aa, Homo sapiens
MSKLRMVLLEDSGSADFRRHFVNLSPFTITVVLLLSACFVTSSLGGTDKELRLVDGENKCSGRVEVKVQEEWGTVCNNGWSMEAVSVICNQLGCPTAIKAPGWANSSAGSGRIWMDHVSCRGNESALWDCKHDGWGKHSNCTHQQDAGVTCSDGSNLEMRLTRGGNMCSGRIEIKFQGRWGTVCDDNFNIDHASVICRQLECGSAVSFSGSSNFGEGSGPIWFDDLICNGNESALWNCKHQGWGKHNCDHAEDAGVICSKGADLSLRLVDGVTECSGRLEVRFQGEWGTICDDGWDSYDAAVACKQLGCPTAVTAIGRVNASKGFGHIWLDSVSCQGHEPAIWQCKHHEWGKHYCNHNEDAGVTCSDGSDLELRLRGGGSRCAGTVEVEIQRLLGKVCDRGWGLKEADVVCRQLGCGSALKTSYQVYSKIQATNTWLFLSSCNGNETSLWDCKNWQWGGLTCDHYEEAKITCSAHREPRLVGGDIPCSGRVEVKHGDTWGSICDSDFSLEAASVLCRELQCGTVVSILGGAHFGEGNGQIWAEEFQCEGHESHLSLCPVAPRPEGTCSHSRDVGVVCSRYTEIRLVNGKTPCEGRVELKTLGAWGSLCNSHWDIEDAHVLCQQLKCGVALSTPGGARFGKGNGQIWRHMFHCTGTEQHMGDCPVTALGASLCPSEQVASVICSGNQSQTLSSCNSSSLGPTRPTIPEESAVACIESGQLRLVNGGGRCAGRVEIYHEGSWGTICDDSWDLSDAHVVCRQLGCGEAINATGSAHFGEGTGPIWLDEMKCNGKESRIWQCHSHGWGQQNCRHKEDAGVICSEFMSLRLTSEASREACAGRLEVFYNGAWGTVGKSSMSETTVGVVCRQLGCADKGKINPASLDKAMSIPMWVDNVQCPKGPDTLWQCPSSPWEKRLASPSEETWITCDNKIRLQEGPTSCSGRVEIWHGGSWGTVCDDSWDLDDAQVVCQQLGCGPALKAFKEAEFGQGTGPIWLNEVKCKGNESSLWDCPARRWGHSECGHKEDAAVNCTDISVQKTPQKATTGRSSRQSSFIAVGILGVVLLAIFVALFFLTKKRRQRQRLAVSSRGENLVHQIQYREMNSCLNADDLDLMNSSENSHESADFSAAELISVSKFLPISGMEKEAILSHTEKENGNL

SEQ ID NO: 7632 - protein, 1817 aa, Homo sapiens
MFNKSFGTPFGGGTGGFGTTSTFGQNTGFGTTSGGAFGTSAFGSSNNTGGLFGNSQTKPGGLFGTSSFSQPATSTSTGFGFGTSTGTANTLFGTASTGTSLFSSQNNAFAQNKPTGFGNFGTSTSSGGLFGTTNTTSNPFGSTSGSLFGPSSFTAAPTGTTIKFNPPTGTDTMVKAGVSTNISTKHQCITAMKEYESKSLEELRLEDYQANRKGPQNQVGAGTTTGLFGSSPATSSATGLFSSSTTNSGFAYGQNKTAFGTSTTGFGTNPGGLFGQQNQQTTSLFSKPFGQATTTQNTGFSFGNTSTIGQPSTNTMGLFGVTQASQPGGLFGTATNTSTGTAFGTGTGLFGQTNTGFGAVGSTLFGNNKLTTFGSSTTSAPSFGTTSGGLFGNKPTLTLGTNTNTSNFGFGTNTSGNSIFGSKPAPGTLGTGLGAGFGTALGAGQASLFGNNQPKIGGPLGTGAFGAPGFNTTTATLGFGAPQAPVALTDPNASAAQQAVLQQHINSLTYSPFGDSPLFRNPMSDPKKKEERLKPTNPAAQKALTTPTHYKLTPRPATRVRPKALQTTGTAKSHLFDGLDDDEPSLANGAFMPKKSIKKLVLKNLNNSNLFSPVNRDSENLASPSEYPENGERFSFLSKPVDENHQQDGDEDSLVSHFYTNPIAKPIPQTPESAGNKHSNSNSVDDTIVALNMRAALRNGLEGSSEETSFHDESLQDDREEIENNSYHMHPAGIILTKVGYYTIPSMDDLAKITNEKGECIVSDFTIGRKGYGSIYFEGDVNLTNLNLDDIVHIRRKEVVVYLDDNQKPPVGEGLNRKAEVTLDGVWPTDKTSRCLIKSPDRLADINYEGRLEAVSRKQGAQFKEYRPETGSWVFKVSHFSKYGLQDSDEEEEEHPSKTSTKKLKTAPLPPASQTTPLQMALNGKPAPPPQSQSPEVEQLGRVVELDSDMVDITQEPVLDTMLEESMPEDQEPVSASTHIASSLGINPHVLQIMKASLLTDEEDVDMALDQRFSRLPSKADTSQEICSPRLPISASHSSKTRSLVGGLLQSKFTSGAFLSPSVSVQECRTPRAASLMNIPSTSSWSVPPPLTSVFTMPSPAPEVPLKTVGTRRQLGLVPREKSVTYGKGKLLMDMALFMGRSFRVGWGPNWTLANSGEQLNGSHELENHQIADSMEFGFLPNPVAVKPLTESPFKVHLEKLSLRQRKPDEDMKLYQTPLELKLKHSTVHVDELCPLIVPNLGVAVIHDYADWVKEASGDLPEAQIVKHWSLTWTLCEALWGHLKELDSQLNEPREYIQILERRRAFSRWLSCTATPQIEEEVSLTQKNSPVEAVFSYLTGKRISEACSLAQQSGDHRLALLLSQFVGSQSVRELLTMQLVDWHQLQADSFIQDERLRIFALLAGKPVWQLSEKKQINVCSQLDWKRSLAIHLWYLLPPTASISRALSMYEEAFQNTSDSDRYACSPLPSYLEGSGCVIAEEQNSQTPLRDVCFHLLKLYSDRHYDLNQLLEPRSITADPLDYRLSWHLWEVLRALNYTHLSAQCEGVLQASYAGQLESEGLWEWAIFVLLHIDNSGIREKAVRELLTRHCQLLETPESWAKETFLTQKLRVPAKWIHEAKAVRAHMESDKHLEALCLFKAEHWNRCHKLIIRHLASDAIINENYDYLKGFLEDLAPPERSSLIQDWETSGLVYLDYIRVIEMLRHIQQVDCSGNDLEQLHIKVTSLCSRIEQIQCYSAKDRLAQSDMAKRVANLLRVVLSLHHPPDRTSDSTPDPQRVPLRLLAPHIGRLPMPEDYAMDELRSLTQSYLRELAVGSL

SEQ ID NO: 7633 - protein, 480 aa, Homo sapiens
MAELQMLLEEEIPSGKRALIESYQNLTRVADYCENNYIQATDKRKALEETKAYTTQSLASVAYQINALANNVLQLLDIQASQLRRMESSINHISQTVDIHKEKVARREIGILTTNKNTSRTHKIIAPANMERPVRYIRKPIDYTVLDDVGHGVKWLKAKHGNNQPARTGTLSRTNPPTQKPPSPPMSGRGTLGRNTPYKTLEPVKPPTVPNDYMTSPARLGSQHSPGRTASLNQRPRTHSGSSGGSGSRENSGSSSIGIPIAVPTPSPPTIGPAPGSAPGSQYGTMTRQISRHNSTTSSTSSGGYRRTPSVTAQFSAQPHVNGGPLYSQNSISIAPPPPPMPQLTPQIPLTGFVARVQENIADSPTPPPPPPPDDIPMFDDSPPPPPPPPVDYEDEEAAVVQYNDPYADGDPAWAPKNYIEKVVAIYDYTKDKDDELSFMEGAIIYVIKKNDDGWYEGVCNRVTGLFPGNYVESIMHYTD

SEQ ID NO: 7634 - protein, 1083 aa, Homo sapiens
MSDSEDSNFSEEEDSERSSDGEEAEVDEERRSAAGSEKEEEPEDEEEEEEEEEYDEEEEEEDDDRPPKKPRHGGFILDEADVDDEYEDEDQWEDGAEDILEKASNIDNVVLDEDRSGARRLQNLWRDQREEELGEYYMKKYAKSSVGETVYGGSDELSDDITQQQLLPGVKDPNLWTVKCKIGEERATAISLMRKFIAYQFTDTPLQIKSVVAPEHVKGYIYVEAYKQTHVKQAIEGVGNLRLGYWNQQMVPIKEMTDVLKVVKEVANLKPKSWVRLKRGIYKDDIAQVDYVEPSQNTISLKMIPRIDYDRIKARMSLKDWFAKRKKFKRPPQRLFDAEKIRSLGGDVASDGDFLIFEGNRYSRKGFLFKSFAMSAVITEGVKPTLSELEKFEDQPEGIDLEVVTESTGKEREHNFQPGDNVEVCEGELINLQGKILSVDGNKITIMPKHEDLKDMLEFPAQELRKYFKMGDHVKVIAGRFEGDTGLIVRVEENFVILFSDLTMHELKVLPRDLQLCSETASGVDVGGQHEWGELVQLDPQTVGVIVRLERETFQVLNMYGKVVTVRHQAVTRKKDNRFAVALDSEQNNIHVKDIVKVIDGPHSGREGEIRHLFRSFAFLHCKKLVENGGMFVCKTRHLVLAGGSKPRDVTNFTVGGFAPMSPRISSPMHPSAGGQRGGFGSPGGGSGGMSRGRGRRDNELIGQTVRISQGPYKGYIGVVKDATESTARVELHSTCQTISVDRQRLTTVGSRRPGGMTSTYGRTPMYGSQTPMYGSGSRTPMYGSQTPLQDGSRTPHYGSQTPLHDGSRTPAQSGAWDPNNPNTPSRAEEEYEYAFDDEPTPSPQAYGGTPNPQTPGYPDPSSPQVNPQYNPQTPGTPAMYNTDQFSPYAAPSPQGSYQPSPSPQSYHQVAPSPAGYQNTHSPASYHPTPSPMAYQASPSPSPVGYSPMTPGAPSPGGYNPHTPGSGIEQNSSDWVTTDIQVKVRDTYLDTQVVGQTGVIRSVTGGMCSVYLKDSEKVVSISSEHLEPITPTKNNKVKVILGEDREATGVLLSIDGEDGIVRMDLDEQLKILNLRFLGKLLEA

SEQ ID NO: 7635 - protein, 739 aa, Homo sapiens
MGFSNMEDDGPEEEERVAEPQANFNTPQALRFEELLANLLNEQHQIAKELFEQLKMKKPSAKQQKEVEKVKPQCKEVHQTLILDPAQRKRLQQQMQQHVQLLTQIHLLATCNPNLNPEASSTRICLKELGTFAQSSIALHHQYNPKFQTLFQPCNLMGAMQLIEDFSTHVSIDCSPHKTVKKTANEFPCLPKQVAWILATSKVFMYPELLPVCSLKAKNPQDKILFTKAEDNLLALGLKHFEGTEFLNPLISKYLLTCKTARQLTVRIKNLNMNRAPDNIIKFYKKTKQLPVLGKCCEEIQPHQWKPPIEREEHRLPFWLKASLPSIQEELRHMADGAREVGNMTGTTEINSDQGLEKDNSELGSETRYPLLLPKGVVLKLKPVADRFPKKAWRQKRSSVLKPLLIQPSPSLQPSFNPGKTPAQSTHSEAPPSKMVLRIPHPIQPATVLQTVPGVPPLGVSGGESFESPAALPAMPPEARTSFPLSESQTLLSSAPVPKVMMPSPASSMFRKPYVRRRPSKRRGARAFRCIKPAPVIHPASVIFTVPATTVKIVSLGGGCNMIQPVNAAVAQSPQTIPIATLLVNPTSFPCPLNQPLVASSVSPLIVSGNSVNLPIPSTPEDKAHMNVDIACAVADGENAFQGLEPKLEPQELSPLSATVFPKVEHSPGPPPVDKQCQEGLSENSAYRWTVVKTEEGRQALEPLPQGIQESLNNSSPGDLEEVVKMEPEDATEEISGFL

SEQ ID NO: 7636 - protein, 757 aa, Homo sapiens
MLSLLVWILTLSDTFSQGTQTRFSQEPADQTVVAGQRAVLPCVLLNYSGIVQWTKDGLALGMGQGLKAWPRYRVVGSADAGQYNLEITDAELSDDASYECQATEAALRSRRAKLTVLIPPEDTRIDGGPVILLQAGTPHNLTCRAFNAKPAATIIWFRDGTQQEGAVASTELLKDGKRETTVSQLLINPTDLDIGRVFTCRSMNEAIPSGKETSIELDVHHPPTVTLSIEPQTVQEGERVVFTCQATANPEILGYRWAKGGFLIEDAHESRYETNVDYSFFTEPVSCEVHNKVGSTNVSTLVNVHFAPRIVVDPKPTTTDIGSDVTLTCVWVGNPPLTLTWTKKDSNMVLSNSNQLLLKSVTQADAGTYTCRAIVPRIGVAEREVPLYVNGPPIISSEAVQYAVRGDGGKVECFIGSTPPPDRIAWAWKENFLEVGTLERYTVERTNSGSGVLSTLTINNVMEADFQTHYNCTAWNSFGPGTAIIQLEEREVLPVGIIAGATIGASILLIFFFIALVFFLYRRRKGSRKDVTLRKLDIKVETVNREPLTMHSDREDDTASVSTATRVMKAIYSSFKDDVDLKQDLRCDTIDTREEYEMKDPTNGYYNVRAHEDRPSSRAVLYADYRAPGPARFDGRPSSRLSHSSGYAQLNTYSRGPASDYGPEPTPPGPAAPAGTDTTSQLSYENYEKFNSHPFPGAAGYPTYRLGYPQAPPSGLERTPYEAYDPIGKYATATRFSYTSQHSDYGQRFQQRMQTHV

SEQ ID NO: 7637 - protein, 344 aa, Homo sapiens
MGFNLTFHLSYKFRLLLLLTLCLTVVGWATSNYFVGAIQEIPKAKEFMANFHKTLILGKGKTLTNEASTKKVELDNCPSVSPYLRGQSKLIFKPDLTLEEVQAENPKVSRGRYRPQECKALQRVAILVPHRNREKHLMYLLEHLHPFLQRQQLDYGIYVIHQAEGKKFNRAKLLNVGYLEALKEENWDCFIFHDVDLVPENDFNLYKCEEHPKHLVVGRNSTGYRLRYSGYFGGVTALSREQFFKVNGFSNNYWGWGGEDDDLRLRVELQRMKISRPLPEVGKYTMVFHTRDKGNEVNAERMKLLHQVSRVWRTDGLSSCSYKLVSVEHNPLYINITVDFWFGA

SEQ ID NO: 7638 - protein, 125 aa, Homo sapiens
MRGTRLALLALVLAACGELAPALRCYVCPEPTGVSDCVTIATCTTNETMCKTTLYSREIVYPFQGDSTVTKSCASKCKPSDVDGIGQTLPVSCCNTELCNVDGAPALNSLHCGALTLLPLLSLRL

SEQ ID NO: 7639 - protein, 540 aa, Homo sapiens
MAAGGSAPEPRVLVCLGALLAGWVAVGLEAVVIGEVHENVTLHCGNISGLRGQVTWYRNNSEPVFLLSSNSSLRPAEPRFSLVDATSLHIESLSLGDEGIYTCQEILNVTQWFQVWLQVASGPYQIEVHIVATGTLPNGTLYAARGSQVDFSCNSSSRPPPVVEWWFQALNSSSESFGHNLTVNFFSLLLISPNLQGNYTCLALNQLSKRHRKVTTELLVYYPPPSAPQCWAQMASGSFMLQLTCRWDGGYPDPDFLWIEEPGGVIVGKSKLGVEMLSESQLSDGKKFKCVTSHIVGPESGASCMVQIRGPSLLSEPMKTCFTGGNVTLTCQVSGAYPPAKILWLRNLTQPEVIIQPSSRHLITQDGQNSTLTIHNCSQDLDEGYYICRADSPVGVREMEIWLSVKEPLNIGGIVGTIVSLLLLGLAIISGLLLHYSPVFCWKVGNTSRGQNMDDVMVLVDSEEEEEEEEEEEEDAAVGEQEGAREREELPKEIPKQDHIHRVTALVNGNIEQMGNGFQDLQDDSSEEQSDIVQEEDRPV

SEQ ID NO: 7640 - protein, 212 aa, Homo sapiens
MKVFKFIGLMILLTSAFSAGSGQSPMTVLCSIDWFMVTVHPFMLNNDVCVHFHELHLGLGCPPNHVQPHAYQFTYRVTECGIRAKAVSQDMVIYSTEIHYSSKGTPSKFVIPVSCAAPQKSPWLTKPCSMRVASKSRATAQKDEKCYEVFSLSQSSQRPNCDCPPCVFSEEEHTQVPCHQAGAQEAQPLQPSHFLDISEDWSLHTDDMIGSM

SEQ ID NO: 7641 - protein, 270 aa, Homo sapiens
MGFWCRMSENQEQEEVITVRVQDPRVQNEGSWNSYVDYKIFLHTNSKAFTAKTSCVRRRYREFVWLRKQLQRNAGLVPVPELPGKSTFFGTSDEFIEKRRQGLQHFLEKVLQSVVLLSDSQLHLFLQSQLSVPEIEACVQGRSTMTVSDAILRYAMSNCGWAQEERQSSSHLAKGDQPKSCCFLPRSGRRSSPSPPPSEEKDHLEVWAPVVDSEVPSLESPTLPPLSSPLCCDFGRPKEGTSTLQSVRRAVGGDHAVPLDPGQLETVLEK

SEQ ID NO: 7642 - protein, 820 aa, Homo sapiens
MKMLLLLHCLGVFLSCSGHIQDEHPQYHSPPDVVIPVRITGTTRGMTPPGWLSYILPFGGQKHIIHIKVKKLLFSKHLPVFTYTDQGAILEDQPFVQNNCYYHGYVEGDPESLVSLSTCFGGFQGILQINDFAYEIKPLAFSTTFEHLVYKMDSEEKQFSTMRSGFMQNEITCRMEFEEIDNSTQKQSSYVGWWIHFRIVEIVVVIDNYLYIRYERNDSKLLEDLYVIVNIVDSILDVIGVKVLLFGLEIWTNKNLIVVDDVRKSVHLYCKWKSENITPRMQHDTSHLFTTLGLRGLSGIGAFRGMCTPHRSCAIVTFMNKTLGTFSIAVAHHLGHNLGMNHDEDTCRCSQPRCIMHEGNPPITKFSNCSYGDFWEYTVERTKCLLETVHTKDIFNVKRCGNGVVEEGEECDCGPLKHCAKDPCCLSNCTLTDGSTCAFGLCCKDCKFLPSGKVCRKEVNECDLPEWCNGTSHKCPDDFYVEDGIPCKERGYCYEKSCHDRNEQCRRIFGAGANTASETCYKELNTLGDRVGHCGIKNATYIKCNISDVQCGRIQCENVTEIPNMSDHTTVHWARFNDIMCWSTDYHLGMKGPDIGEVKDGTECGIDHICIHRHCVHITILNSNCSPAFCNKRGICNNKHHCHCNYLWDPPNCLIKGYGGSVDSGPPPKRKKKKKFCYLCILLLIVLFILLCCLYRLCKKSKPIKKQQDVQTPSAKEEEKIQRRPHELPPQSQPWVMPSQSQPPVTPSQSHPQVMPSQSQPPVTPSQSQPRVMPSQSQPPVMPSQSHPQLTPSQSQPPVTPSQRQPQLMPSQSQPPVTPS

SEQ ID NO: 7643 - protein, 1096 aa, Homo sapiens
MATVPVYCVCRLPYDVTRFMIECDACKDWFHGSCVGVEEEEAPDIDIYHCPNCEKTHGKSTLKKKRTWHKHGPGQAPDVKPVQNGSQLFIKELRSRTFPSAEDVVARVPGSQLTLGYMEEHGFTEPILVPKKDGLGLAVPAPTFYVSDVENYVGPERSVDVTDVTKQKDCKMKLKEFVDYYYSTNRKRVLNVTNLEFSDTRMSSFVEPPDIVKKLSWVENYWPDDALLAKPKVTKYCLICVKDSYTDFHIDSGGASAWYHVLKGEKTFYLIRPASANISLYERWRSASNHSEMFFADQVDKCYKCIVKQGQTLFIPSGWIYATLTPVDCLAFAGHFLHSLSVEMQMRAYEVERRLKLGSLTQFPNFETACWYMGKHLLEAFKGSHKSGKQLPPHLVQGAKILNGAFRSWTKKQALAEHEDELPEHFKPSQLIKDLAKEIRLSENASKAVRPEVNTVASSDEVCDGDREKEEPPSPIEATPPQSLLEKVSKKKTPKTVKMPKPSKIPKPPKPPKPPRPPKTLKLKDGGKKKGKKSRESASPTIPNLDLLEAHTKEALTKMEPPKKGKATKSVLSVPNKDVVHMQNDVERLEIREQTKSKSEAKWKYKNSKPDSLLKMEEEQKLEKSPLAGNKDNKFSFSFSNKKLLGSKALRPPTSPGVFGALQNFKEDKPKPVRDEYEYVSDDGELKIDEFPIRRKKNAPKRDLSFLLDKKAVLPTPVTKPKLDSAAYKSDDSSDEGSLHIDTDTKPGRNARVKKESGSSAAGILDLLQASEEVGALEYNPSSQPPASPSTQEAIQGMLSMANLQASDSCLQTTWGAGQAKGSSLAAHGARKNGGGSGKSAGKRLLKRAAKNSVDLDDYEEEQDHLDACFKDSDYVYPSLESDEDNPIFKSRSKKRKGSDDAPYSPTARVGPSVPRQDRPVREGTRVASIETGLAAAAAKLSQQEEQKSKKKKSAKRKLTPNTTSPSTSTSISAGTTSTSTTPASTTPASTTPASTSTASSQASQEGSSPEPPPESHSSSLADHEYTAAGTFTGAQAGRTSQPMAPGVFLTQRRPSASSPNNNTAAKGKRTKKGMATAKQRLGKILKIHRNGKLLL

SEQ ID NO: 7644 - protein, 2061 aa, Homo sapiens
MLRVIVESASNIPKTKFGKPDPIVSVIFKDEKKKTKKVDNELNPVWNEILEFDLRGIPLDFSSSLGIIVKDFETIGQNKLIGTATVALKDLTGDQSRSLPYKLISLLNEKGQDTGATIDLVIGYDPPSAPHPNDLSGPSVPGMGGDGEEDEGDEDRLDNAVRGPGPKGPVGTVSEAQLARRLTKVKNSRRMLSNKPQDFQIRVRVIEGRQLSGNNIRPVVKVHVCGQTHRTRIKRGNNPFFDELFFYNVNMTPSELMDEIISIRVYNSHSLRADCLMGEFKIDVGFVYDEPGHAVMRKWLLLNDPEDTSSGSKGYMKVSMFVLGTGDEPPPERRDRDNDSDDVESNLLLPAGIALRWVTFLLKIYRAEDIPQMDDAFSQTVKEIFGGNADKKNLVDPFVEVSFAGKKVCTNIIEKNANPEWNQVVNLQIKFPSVCEKIKLTIYDWDRLTKNDVVGTTYLHLSKIAASGGEVEDFSSSGTGAASYTVNTGETEVGFVPTFGPCYLNLYGSPREYTGFPDPYDELNTGKGEGVAYRGRILVELATFLEKTPPDKKLEPISNDDLLVVEKYQRRRKYSLSAVFHSATMLQDVGEAIQFEVSIGNYGNKFDTTCKPLASTTQYSRAVFDGNYYYYLPWAHTKPVVTLTSYWEDISHRLDAVNTLLAMAERLQTNIEALKSGIQGKIPANQLAELWLKLIDEVIEDTRYTLPLTEGKANVTVLDTQIRKLRSRSLSQIHEAAVRMRSEATDVKSTLAEIEDWLDKLMQLTEEPQNSMPDIIIWMIRGEKRLAYARIPAHQVLYSTSGENASGKYCGKTQTIFLKYPQEKNNGPKVPVELRVNIWLGLSAVEKKFNSFAEGTFTVFAEMYENQALMFGKWGTSGLVGRHKFSDVTGKIKLKREFFLPPKGWEWEGEWIVDPERSLLTEADAGHTEFTDEVYQNESRYPGGDWKPAEDTYTDANGDKAASPSELTCPPGWEWEDDAWSYDINRAVDEKGWEYGITIPPDHKPKSWVAAEKMYHTHRRRRLVRKRKKDLTQTASSTARAMEELQDQEGWEYASLIGWKFHWKQRSSDTFRRRRWRRKMAPSETHGAAAIFKLEGALGADTTEDGDEKSLEKQKHSATTVFGANTPIVSCNFDRVYIYHLRCYVYQARNLLALDKDSFSDPYAHICFLHRSKTTEIIHSTLNPTWDQTIIFDEVEIYGEPQTVLQNPPKVIMELFDNDQVGKDEFLGRSIFSPVVKLNSEMDITPKLLWHPVMNGDKACGDVLVTAELILRGKDGSNLPILPPQRAPNLYMVPQGIRPVVQLTAIEILAWGLRNMKNFQMASITSPSLVVECGGERVESVVIKNLKKTPNFPSSVLFMKVFLPKEELYMPPLVIKVIDHRQFGRKPVVGQCTIERLDRFRCDPYAGKEDIVPQLKASLLSAPPCRDIVIEMEDTKPLLASKLTEKEEEIVDWWSKFYASSGEHEKCGQYIQKGYSKLKIYNCELENVAEFEGLTDFSDTFKLYRGKSDENEDPSVVGEFKGSFRIYPLPDDPSVPAPPRQFRELPDSVPQECTVRIYIVRGLELQPQDNNGLCDPYIKITLGKKVIEDRDHYIPNTLNPVFGRMYELSCYLPQEKDLKISVYDYDTFTRDEKVGETIIDLENRFLSRFGSHCGIPEEYCVSGVNTWRDQLRPTQLLQNVARFKGFPQPILSEDGSRIRYGGRDYSLDEFEANKILHQHLGAPEERLALHILRTQGLVPEHVETRTLHSTFQPNISQGKLQMWVDVFPKSLGPPGPPFNITPRKAKKYYLRVIIWNTKDVILDEKSITGEEMSDIYVKGWIPGNEENKQKTDVHYRSLDGEGNFNWRFVFPFDYLPAEQLCIVAKKEHFWSIDQTEFRIPPRLIIQIWDNDKFSLDDYLGFLELDLRHTIIPAKSPEKCRLDMIPDLKAMNPLKAKTASLFEQKSMKGWWPCYAEKDGARVMAGKVEMTLEILNEKEADERPAGKGRDEPNMNPKLDLPNRPETSFLWFTNPCKTMKFIVWRRFKWVIIGLLFLLILLLFVAVLLYSLPNYLSMKIVKPNV

SEQ ID NO: 7645 - protein, 541 aa, Homo sapiens
MGHSPPVLPLCASVSLLGGLTFGYELAVISGALLPLQLDFGLSCLEQEFLVGSLLLGALLASLVGGFLIDCYGRKQAILGSNLVLLAGSLTLGLAGSLAWLVLGRAVVGFAISLSSMACCIYVSELVGPRQRGVLVSLYEAGITVGILLSYALNYALAGTPWGWRHMFGWATAPAVLQSLSLLFLPAGTDETATHKDLIPLQGGEAPKLGPGRPRYSFLDLFRARDNMRGRTTVGLGLVLFQQLTGQPNVLCYASTIFSSVGFHGGSSAVLASVGLGAVKVAATLTAMGLVDRAGRRALLLAGCALMALSVSGIGLVSFAVPMDSGPSCLAVPNATGQTGLPGDSGLLQDSSLPPIPRTNEDQREPILSTAKKTKPHPRSGDPSAPPRLALSSALPGPPLPARGHALLRWTALLCLMVFVSAFSFGFGPVTWLVLSEIYPVEIRGRAFAFCNSFNWAANLFISLSFLDLIGTIGLSWTFLLYGLTAVLGLGFIYLFVPETKGQSLAEIDQQFQKRRFTLSFGHRQNSTGIPYSRIEISAAS

SEQ ID NO: 7646 - protein, 419 aa, Homo sapiens
MPLSDFILALKDNPYFGAGFGLVGVGTALALARKGVQLGLVAFRRHYMITLEVPARDRSYAWLLSWLTRHSTRTQHLSVETSYLQHESGRISTKFEFVPSPGNHFIWYRGKWIRVERSREMQMIDLQTGTPWESVTFTALGTDRKVFFNILEEARELALQQEEGKTVMYTAVGSEWRPFGYPRRRRPLNSVVLQQGLADRIVRDVQEFIDNPKWYTDRGIPYRRGYLLYGPPGCGKSSFITALAGELEHSICLLSLTDSSLSDDRLNHLLSVAPQQSLVLLEDVDAAFLSRDLAVENPVKYQGLGRLTFSGLLNALDGVASTEARIVFMTTNHVDRLDPALIRPGRVDLKEYVGYCSHWQLTQMFQRFYPGQAPSLAENFAEHVLRATNQISPAQVQGYFMLYKNDPVGAIHNAESLRR

SEQ ID NO: 7647 - protein, 586 aa, Homo sapiens
MKYILVTGGVISGIGKGIIASSIGTILKSCGLRVTAIKIDPYINIDAGTFSPYEHGEVFVLNDGGEVDLDLGNYERFLDINLYKDNNITTGKIYQHVINKERRGDYLGKTVQVVPHITDAVQEWVMNQAKVPVDGNKEEPQICVIELGGTIGDIEGMPFVEAFRQFQFKAKRENFCNIHVSLVPQLSATGEQKTKPTQNSVRALRGLGLSPDLIVCRSSTPIEMAVKEKISMFCHVNPEQVICIHDVSSTYRVPVLLEEQSIVKYFKERLHLPIGDSASNLLFKWRNMADRYERLQKICSIALVGKYTKLRDCYASVFKALEHSALAINHKLNLMYIDSIDLEKITETEDPVKFHEAWQKLCKADGILVPGGFGIRGTLGKLQAISWARTKKIPFLGVCLGMQLAVIEFARNCLNLKDADSTEFRPNAPVPLVIDMPEHNPGNLGGTMRLGIRRTVFKTENSILRKLYGDVPFIEERHRHRFEVNPNLIKQFEQNDLSFVGQDVDGDRMEIIELANHPYFVGVQFHPEFSSRPMKPSPPYLGLLLAATGNLNAYLQQGCKLSSSDRYSDASDDSFSEPRIAELEIS

SEQ ID NO: 7648 - protein, 838 aa, Homo sapiens
MRLALLWALGLLGAGSPLPSWPLPNIGGTEEQQAESEKAPREPLEPQVLQDDLPISLKKVLQTSLPEPLRIKLELDGDSHILELLQNRELVPGRPTLVWYQPDGTRVVSEGHTLENCCYQGRVRGYAGSWVSICTCSGLRGLVVLTPERSYTLEQGPGDLQGPPIISRIQDLHLPGHTCALSWRESVHTQKPPEHPLGQRHIRRRRDVVTETKTVELVIVADHSEAQKYRDFQHLLNRTLEVALLLDTFFRPLNVRVALVGLEAWTQRDLVEISPNPAVTLENFLHWRRAHLLPRLPHDSAQLVTGTSFSGPTVGMAIQNSICSPDFSGGVNMDHSTSILGVASSIAHELGHSLGLDHDLPGNSCPCPGPAPAKTCIMEASTDFLPGLNFSNCSRRALEKALLDGMGSCLFERLPSLPPMAAFCGNMFVEPGEQCDCGFLDDCVDPCCDSLTCQLRPGAQCASDGPCCQNCQLRPSGWQCRPTRGDCDLPEFCPGDSSQCPPDVSLGDGEPCAGGQAVCMHGRCASYAQQCQSLWGPGAQPAAPLCLQTANTRGNAFGSCGRNPSGSYVSCTPRDAICGQLQCQTGRTQPLLGSIRDLLWETIDVNGTELNCSWVHLDLGSDVAQPLLTLPGTACGPGLVCIDHRCQRVDLLGAQECRSKCHGHGVCDSNRHCYCEEGWAPPDCTTQLKATSSLTTGLLLSLLVLLVLVMLGASYWYRARLHQRLCQLKGPTCQYRAAQSGPSERPGPPQRALLARGTKAELADRPNPPTRPLPADPVVRSPKSQGPAKPPPPRKPLPADPQGRCPSGDLPGPGAGIPPLVVPSRPAPPPPTVSSLYL

SEQ ID NO: 7649 - protein, 331 aa, Homo sapiens
MDTGVIEGGLNVTLTIRLLMHGKEVGSIIGKKGESVKKMREESGARINISEGNCPERIITLAGPTNAIFKAFAMIIDKLEEDISSSMTNSTAASRPPVTLRLVVPASQCGSLIGKGGCKIKEIRESTGAQVQVAGDMLPNSTERAITIAGIPQSIIECVKQICVVMLESPPKGVTIPYRPKPSSSPVIFAGGQAYTIQGQYAIPQPDLTKLHQLAMQQSHFPMTHGNTGFSGIESSSPEVKGYWAGLDASAQTTSHELTIPNDLIGCIIGRQGAKINEIRQMSGAQIKIANPVEGSTDRQVTITGSAASISLAQYLINVRLSSETGGMGSS

SEQ ID NO: 7650 - protein, 683 aa, Homo sapiens
MNGAPSPEDGASPSSPPLPPPPPPSWREFCESHARAAALDFARRFRLYLASHPQYAGPGAEAAFSRRFAELFLQHFEAEVARASGSLSPPILAPLSPGAEISPHDLSLESCRVGGPLAVLGPSRSSEDLAGPLPSSVSSSSTTSSKPKLKKRFSLRSVGRSVRGSVRGILQWRGTVDPPSSAGPLETSSGPPVLGGNSNSNSSGGAGTVGRGLVSDGTSPGERWTHRFERLRLSRGGGALKDGAGMVQREELLSFMGAEEAAPDPAGVGRGGGVAGPPSGGGGQPQWQKCRLLLRSEGEGGGGSRLEFFVPPKASRPRLSIPCSSITDVRTTTALEMPDRENTFVVKVEGPSEYIMETVDAQHVKAWVSDIQECLSPGPCPATSPRPMTLPLAPGTSFLTRENTDSLELSCLNHSESLPSQDLLLGPSESNDRLSQGAYGGLSDRPSASISPSSASIAASHFDSMELLPPELPPRIPIEEGPPTGTVHPLSAPYPPLDTPETATGSFLFQGEPEGGEGDQPLSGYPWFHGMLSRLKAAQLVLTGGTGSHGVFLVRQSETRRGEYVLTFNFQGKAKHLRLSLNEEGQCRVQHLWFQSIFDMLEHFRVHPIPLESGGSSDVVLVSYVPSSQRQQGEQSRSAGEEVPVHPRSEAGSRLGAMRGCAREMDATPMPPAPSCPSERVTV

SEQ ID NO: 7651 - protein, 136 aa, Homo sapiens
MARTKQTARKSTGGKAPRKQLATKAARKSAPATGGVKKPHRYRPGTVALREIRRYQKSTELLIRKLPFQRLVREIAQDFKTDLRFQSSAVMALQEACEAYLVGLFEDTNLCAIHAKRVTIMPKDIQLARRIRGERA

SEQ ID NO: 7652 - protein, 609 aa, Homo sapiens
MSGWESYYKTEGDEEAEEEQEENLEASGDYKYSGRDSLIFLVDASKAMFESQSEDELTPFDMSIQCIQSVYISKIISSDRDLLAVVFYGTEKDKNSVNFKNIYVLQELDNPGAKRILELDQFKGQQGQKRFQDMMGHGSDYSLSEVLWVCANLFSDVQFKMSHKRIMLFTNEDNPHGNDSAKASRARTKAGDLRDTGIFLDLMHLKKPGGFDISLFYRDIISIAEDEDLRVHFEESSKLEDLLRKVRAKETRKRALSRLKLKLNKDIVISVGIYNLVQKALKPPPIKLYRETNEPVKTKTRTFNTSTGGLLLPSDTKRSQIYGSRQIILEKEETEELKRFDDPGLMLMGFKPLVLLKKHHYLRPSLFVYPEESLVIGSSTLFSALLIKCLEKEVAALCRYTPRRNIPPYFVALVPQEEELDDQKIQVTPPGFQLVFLPFADDKRKMPFTEKIMATPEQVGKMKAIVEKLRFTYRSDSFENPVLQQHFRNLEALALDLMEPEQAVDLTLPKVEAMNKRLGSLVDEFKELVYPPDYNPEGKVTKRKHDNEGSGSKRPKVEYSEEELKTHISKGTLGKFTVPMLKEACRAYGLKSGLKKQELLEALTKHFQD

SEQ ID NO: 7653 - protein, 290 aa, Homo sapiens
MAAVEKRRQAVPPPAGFTDSGRQSVSRAAGAAESEEDFLRQVGVTEMLRAALLKVLEARPEEPIAFLAHYFENMGLRSPVNGGAGEPPGQLLLQQQRLGRALWHLRLAHHSQRAAFNNNVSVAYECLSAGGRRKRPGLDGRTYSELLRRICRDGQAPEEVVAPLLRKVQCRDHEAVPLSVFRAGTLTCFVLLEFVARAGALFQLLEDSAAAVADRRVGQAVLDTLEGALQASDAAAPARFLEAGSRLGPDSLALALDRAVGGRRPSAPMTREEFLERAAALFIAKVKPVG

SEQ ID NO: 7654 - protein, 296 aa, Homo sapiens
MAGSPTCLTLIYILWQLTGSAASGPVKELVGSVGGAVTFPLKSKVKQVDSIVWTFNTTPLVTIQPEGGTIIVTQNRNRERVDFPDGGYSLKLSKLKKNDSGIYYVGIYSSSLQQPSTQEYVLHVYEHLSKPKVTMGLQSNKNGTCVTNLTCCMEHGEEDVIYTWKALGQAANESHNGSILPISWRWGESDMTFICVARNPVSRNFSSPILARKLCEGAADDPDSSMVLLCLLLVPLLLSLFVLGLFLWFLKRERQEENNPKGRSSKYGLLHCGNTEKDGKSPLTAHDARHTKAICL

SEQ ID NO: 7655 - protein, 1838 aa, Homo sapiens
MALQLWALTLLGLLGAGASLRPRKLDFFRSEKELNHLAVDEASGVVYLGAVNALYQLDAKLQLEQQVATGPALDNKKCTPPIEASQCHEAEMTDNVNQLLLLDPPRKRLVECGSLFKGICALRALSNISLRLFYEDGSGEKSFVASNDEGVATVGLVSSTGPGGDRVLFVGKGNGPHDNGIIVSTRLLDRTDSREAFEAYTDHATYKAGYLSTNTQQFVAAFEDGPYVFFVFNQQDKHPARNRTLLARMCREDPNYYSYLEMDLQCRDPDIHAAAFGTCLAASVAAPGSGRVLYAVFSRDSRSSGGPGAGLCLFPLDKVHAKMEANRNACYTGTREARDIFYKPFHGDIQCGGHAPGSSKSFPCGSEHLPYPLGSRDGLRGTAVLQRGGLNLTAVTVAAENNHTVAFLGTSDGRILKVYLTPDGTSSEYDSILVEINKRVKRDLVLSGDLGSLYAMTQDKVFRLPVQECLSYPTCTQCRDSQDPYCGWCVVEGRCTRKAECPRAEEASHWLWSRSKSCVAVTSAQPQNMSRRAQGEVQLTVSPLPALSEEDELLCLFGESPPHPARVEGEAVICNSPSSIPVTPPGQDHVAVTIQLLLRRGNIFLTSYQYPFYDCRQAMSLEENLPCISCVSNRWTCQWDLRYHECREASPNPEDGIVRAHMEDSCPQFLGPSPLVIPMNHETDVNFQGKNLDTVKGSSLHVGSDLLKFMEPVTMQESGTFAFRTPKLSHDANETLPLHLYVKSYGKNIDSKLHVTLYNCSFGRSDCSLCRAANPDYRCAWCGGQSRCVYEALCNTTSECPPPVITRIQPETGPLGGGIRITILGSNLGVQAGDIQRISVAGRNCSFQPERYSVSTRIVCVIEAAETPFTGGVEVDVFGKLGRSPPNVQFTFQQPKPLSVEPQQGPQAGGTTLTIHGTHLDTGSQEDVRVTLNGVPCKVTKFGAQLQCVTGPQATRGQMLLEVSYGGSPVPNPGIFFTYRENPVLRAFEPLRSFASGGRSINVTGQGFSLIQRFAMVVIAEPLQSWQPPREAESLQPMTVVGTDYVFHNDTKVVFLSPAVPEEPEAYNLTVLIEMDGHRALLRTEAGAFEYVPDPTFENFTGGVKKQVNKLIHARGTNLNKAMTLQEAEAFVGAERCTMKTLTETDLYCEPPEVQPPPKRRQKRDTTHNLPEFIVKFGSREWVLGRVEYDTRVSDVPLSLILPLVIVPMVVVIAVSVYCYWRKSQQAEREYEKIKSQLEGLEESVRDRCKKEFTDLMIEMEDQTNDVHEAGIPVLDYKTYTDRVFFLPSKDGDKDVMITGKLDIPEPRRPVVEQALYQFSNLLNSKSFLINFIHTLENQREFSARAKVYFASLLTVALHGKLEYYTDIMHTLFLELLEQYVVAKNPKLMLRRSETVVERMLSNWMSICLYQYLKDSAGEPLYKLFKAIKHQVEKGPVDAVQKKAKYTLNDTGLLGDDVEYAPLTVSVIVQDEGVDAIPVKVLNCDTISQVKEKIIDQVYRGQPCSCWPRPDSVVLEWRPGSTAQILSDLDLTSQREGRWKRVNTLMHYNVRDGATLILSKVGVSQQPEDSQQDLPGERHALLEEENRVWHLVRPTDEVDEGKSKRGSVKEKERTKAITEIYLTRLLSVKGTLQQFVDNFFQSVLAPGHAVPPAVKYFFDFLDEQAEKHNIQDEDTIHIWKTNSLPLRFWVNILKNPHFIFDVHVHEVVDASLSVIAQTFMDACTRTEHKLSRDSPSNKLLYAKEISTYKKMVEDYYKGIRQMVQVSDQDMNTHLAEISRAHTDSLNTLVALHQLYQYTQKYYDEIINALEEDPAAQKMQLAFRLQQIAAALENKVTDL

SEQ ID NO: 7656 - protein, 163 aa, Homo sapiens
MSKGLLLLLLLSMGGTWASKEPLRPRCRPINATLAVEKEGCPVCITVNTTICAGYCPTMTRVLQGVLPALPQVVCNYRDVRFESIRLPGCPRGVNPVVSYAVALSCQCALCRRSTTDCGGPKDHPLTCDDPRFQASSSSKAPPPSLPSPSRLPGPSDTPILPQ

SEQ ID NO: 7657 - protein, 254 aa, Homo sapiens
MVSWGRFICLVVVTMATLSLARPSFSLVEDTTLEPEEPPTKYQISQPEVYVAAPGESLEVRCLLKDAAVISWTKDGVHLGPNNRTVLIGEYLQIKGATPRDSGLYACTASRTVDSETWYFMVNVTDAISSGDDEDDTDGAEDFVSENSNNKRAPYWTNTEKMEKRLHAVPAANTVKFRCPAGGNPMPTMRWLKNGKEFKQEHRIGGYKVRNQHWSLIMESVVPSDKGNYTCVVENEYGSINHTYHLDVVGSQGL

SEQ ID NO: 7658 - protein, 590 aa, Homo sapiens
MRPRRPLVFMSLVCALLNTCQAHRVHDDKPNIVLIMVDDLGIGDLGCYGNDTMRTPHIDRLAREGVRLTQHISAASLCSPSRSAFLTGRYPIRSGMVSSGNRRVIQNLAVPAGLPLNETTLAALLKKQGYSTGLIGKWHQGLNCDSRSDQCHHPYNYGFDYYYGMPFTLVDSCWPDPSRNTELAFESQLWLCVQLVAIAILTLTFGKLSGWVSVPWLLIFSMILFIFLLGYAWFSSHTSPLYWDCLLMRGHEITEQPMKAERAGSIMVKEAISFLERHSKETFLLFFSFLHVHTPLPTTDDFTGTSKHGLYGDNVEEMDSMVGKILDAIDDFGLRNNTLVYFTSDHGGHLEARRGHAQLGGWNGIYKGGKGMGGWEGGIRVPGIVRWPGKVPAGRLIKEPTSLMDILPTVASVSGGSLPQDRVIDGRDLMPLLQGNVRHSEHEFLFHYCGSYLHAVRWIPKDDSGSVWKAHYVTPVFQPPASGGCYVTSLCRCFGEQVTYHNPPLLFDLSRDPSESTPLTPATEPLHDFVIKKVANALKEHQETIVPVTYQLSELNQGRTWLKPCCGVFPFCLCDKEEEVSQPRGPNEKR

SEQ ID NO: 7659 - protein, 1439 aa, Homo sapiens
MAEAGDAALSVAEWLRALHLEQYTGLFEQHGLVWATECQGLSDTRLMDMGMLLPGHRRRILAGLLRAHTSPAPAPRPTPRPVPMKRHIFRSPPVPATPPEPLPTTTEDEGLPAAPPIPPRRSCLPPTCFTTPSTAAPDPVLPPLPAKRHLAELSVPPVPPRTGPPRLLVSLPTKEEESLLPSLSSPPQPQSEEPLSTLPQGPPQPPSPPPCPPEIPPKPVRLFPEFDDSDYDEVPEEGPGAPARVMTKKEEPPPSRVPRAVRVASLLSEGEELSGDDQGDEEEDDHAYEGVPNGGWHTSSLSLSLPSTIAAPHPMDGPPGGSTPVTPVIKAGWLDKNPPQGSYIYQKRWVRLDTDHLRYFDSNKDAYSKRFISVACISHVAAIGDQKFEVITNNRTFAFRAESDVERKEWMQALQQAMAEQRARARLSSAYLLGVPGSEQPDRAGSLELRGFKNKLYVAVVGDKVQLYKNLEEYHLGIGITFIDMSVGNVKEVDRRSFDLTTPYRIFSFSADSELEKEQWLEAMQGAIAEALSTSEVAERIWAAAPNRFCADCGAPQPDWASINLCVVICKRCAGEHRGLGAGVSKVRSLKMDRKVWTETLIELFLQLGNGAGNRFWAANVPPSEALQPSSSPSTRRCHLEAKYREGKYRRYHPLFGNQEELDKALCAAVTTTDLAETQALLGCGAGINCFSGDPEAPTPLALAEQAGQTLQMEFLRNNRTTEVPRLDSMKPLEKHYSVVLPTVSHSGFLYKTASAGKLLQDRRAREEFSRRWCVLGDGVLSYFENERAVTPNGEIRASEIVCLAVPPPDTHGFEHTFEVYTEGERLYLFGLESAEQAHEWVKCIAKAFVPPLAEDLLARDFERLGRLPYKAGLSLQRAQEGWFSLSGSELRAVFPEGPCEEPLQLRKLQELSIQGDSENQVLVLVERRRTLYIQGERRLDFMGWLGAIQKAAASMGDTLSEQQLGDSDIPVIVYRCVDYITQCGLTSEGIYRKCGQTSKTQRLLESLRQDARSVHLKEGEQHVDDVSSALKRFLRDLPDGLFTRAQRLTWLEASEIEDEEEKVSRYRELLVRLPPVNRATVKALISHLYCVQCFSDTNQMNVHNLAIVFGPTLFQTDGQDYKAGRVVEDLINHYVVVFSVDEEELRKQREEITAIVKMRVAGTASGTQHAGDFICTVYLEEKKAETEQHIKVPASMTAEELTLEILDRRNVGIREKDYWTCFEVNEREEAERPLHFAEKVLPILHGLGTDSHLVVKKHQAMEAMLLYLASRVGDTKHGMMKFREDRSLLGLGLPSGGFHDRYFILNSSCLRLYKEVRSHRPEKEWPIKSLKVYLGVKKKLRPPTCWGFTVVHETEKHEKQQWYLCCDTQMELREWFATFLFVQHDGLVWPSEPSRVSRAVPEVRLGSVSLIPLRGSENEMRRSVAAFTADPLSLLRNV

SEQ ID NO: 7660 - protein, 304 aa, Homo sapiens
MAQPGDPRRLCRLVQEGRLRALKEELQAAGGCPGPAGDTLLHCAARHGHRDVLAYLAEAWGMDIEATNRDYKRPLHEAASMGHRDCVRYLLGRGAAVDCLKKADWTPLMMACTRKNLGVIQELVEHGANPLLKNKDGWNSFHIASREGDPLILQYLLTVCPGAWKTESKIRRTPLHTAAMHGHLEAVKVLLKRCQYEPDYRDNCGVTALMDAIQCGHIDVARLLLDEHGACLSAEDSLGAQALHRAAVTGQDEAIRFLVSELGVDVDVRATSTHLTALHYAAKPCIWPVQVSTWPVPSFSCSRD

SEQ ID NO: 7661 - protein, 917 aa, Homo sapiens
MIAAQLLAYYFTELKDDQVKKIDKYLYAMRLSDETLIDIMTRFRKEMKNGLSRDFNPTATVKMLPTFVRSIPDGSEKGDFIALDLGGSSFRILRVQVNHEKNQNVHMESEVYDTPENIVHGSGSQLFDHVAECLGDFMEKRKIKDKKLPVGFTFSFPCQQSKIDEAILITWTKRFKASGVEGADVVKLLNKAIKKRGDYDANIVAVVNDTVGTMMTCGYDDQHCEVGLIIGTGTNACYMEELRHIDLVEGDEGRMCINTEWGAFGDDGSLEDIRTEFDREIDRGSLNPGKQLFEKMVSGMYLGELVRLILVKMAKEGLLFEGRITPELLTRGKFNTSDVSAIEKNKEGLHNAKEILTRLGVEPSDDDCVSVQHVCTIVSFRSANLVAATLGAILNRLRDNKGTPRLRTTVGVDGSLYKTHPQYSRRFHKTLRRLVPDSDVRFLLSESGSGKGAAMVTAVAYRLAEQHRQIEETLAHFHLTKDMLLEVKKRMRAEMELGLRKQTHNNAVVKMLPSFVRRTPDGTENGDFLALDLGGTNFRVLLVKIRSGKKRTVEMHNKIYAIPIEIMQGTGEELFDHIVSCISDFLDYMGIKGPRMPLGFTFSFPCQQTSLDAGILITWTKGFKATDCVGHDVVTLLRDAIKRREEFDLDVVAVVNDTVGTMMTCAYEEPTCEVGLIVGTGSNACYMEEMKNVEMVEGDQGQMCINMEWGAFGDNGCLDDIRTHYDRLVDEYSLNAGKQRYEKMISGMYLGEIVRNILIDFTKKGFLFRGQISETLKTRGIFETKFLSQIESDRLALLQVRAILQQLGLNSTCDDSILVKTVCGVVSRRAAQLCGAGMAAVVDKIRENRGLDRLNVTVGVDGTLYKLHPHFSRIMHQTVKELSPKCNVSFLLSEDGSGKGAALITAVGVRLRTEASS

SEQ ID NO: 7662 - protein, 228 aa, Homo sapiens
MASGCKIGPSILNSDLANLGAECLRMLDSGADYLHLDVMDGHFVPNITFGHPVVESLRKQLGQDPFFDMHMMVSKPEQWVKPMAVAGANQYTFHLEATENPGALIKDIRENGMKVGLAIKPGTSVEYLAPWANQIDMALVMTVEPGFGGQKFMEDMMPKVHWLRTQFPSLDIEVDGGVGPDTVHKCAEAGANMIVSGSAIMRSEDPRSVINLLRNVCSEAAQKRSLDR

SEQ ID NO: 7663 - protein, 329 aa, Homo sapiens
MEVAEPSSPTEEEEEEEEHSAEPRPRTRSNPEGAEDRAVGAQASVGSRSEGEGEAASADDGSLNTSGAGPKSWQVPPPAPEVQIRTPRVNCPEKVIICLDLSEEMSLPKLESFNGSKTNALNVSQKMIEMFVRTKHKIDKSHEFALVVVNDDTAWLSGLTSDPRELCSCLYDLETASCSTFNLEGLFSLIQQKTELPVTENVQTIPPPYVVRTILVYSRPPCQPQFSLTEPMKKMFQCPYFFFDVVYIHNGTEEKEEEMSWKDMFAFMGSLDTKGTSYKYEVALAGPALELHNCMAKLLAHPLQRPCQSHASYSLLEEEDEAIEVEATV

SEQ ID NO: 7664 - protein, 216 aa, Homo sapiens
MGAARLLPNLTLCLQLLILCCQTQGENHPSPNFNQYVRDQGAMTDQLSRRQIREYQLYSRTSGKHVQVTGRRISATAEDGNKFAKLIVETDTFGSRVRIKGAESEKYICMNKRGKLIGKPSGKSKDCVFTEIVLENNYTAFQNARHEGWFMAFTRQGRPRQASRSRQNQREAHFIKRLYQGQLPFPNHAEKQKQFEFVGSAPTRRTKRTRRPQPLT

SEQ ID NO: 7665 - protein, 559 aa, Homo sapiens
MPLVKRNIDPRHLCHTALPRGIKNELECVTNISLANIIRQLSSLSKYAEDIFGELFNEAHSFSFRVNSLQERVDRLSVSVTQLDPKEEELSLQDITMRKAFRSSTIQDQQLFDRKTLPIPLQETYDVCEQPPPLNILTPYRDDGKEGLKFYTNPSYFFDLWKEKMLQDTEDKRKEKRKQKQKNLDRPHEPEKVPRAPHDRRREWQKLAQGPELAEDDANLLHKHIEVANGPASHFETRPQTYVDHMDGSYSLSALPFSQMSELLTRAEERVLVRPHEPPPPPPMHGAGDAKPIPTCISSATGLIENRPQSPATGRTPVFVSPTPPPPPPPLPSALSTSSLRASMTSTPPPPVPPPPPPPATALQAPAVPPPPAPLQIAPGVLHPAPPPIAPPLVQPSPPVARAAPVCETVPVHPLPQGEVQGLPPPPPPPPLPPPGIRPSSPVTVTALAHPPSGLHPTPSTAPGPHVPLMPPSPPSQVIPASEPKRHPSTLPVISDARSVLLEAIRKGIQLRKVEEQREQEAKHERIENDVATILSRRIAVEYSDSEDDSEFDEVDWLE

SEQ ID NO: 7666 - protein, 241 aa, Homo sapiens
MAYHSGYGAHGSKHRARAAPDPPPLFDDTSGGYSSQPGGYPATGADVAFSVNHLLGDPMANVAMAYGSSIASHGKDMVHKELHRFVSVSKLKYFFAVDTAYVAKKLGLLVFPYTHQNWEVQYSRDAPLPPRQDLNAPDLYIPTMAFITYVLLAGMALGIQKRMILSVLTGLLFGSDGYYVALAWTSSALMYFIVRSLRTAALGPDSMGGPVPRQRLQLYLTLGAAAFQPLIIYWLTFHLVR

SEQ ID NO: 7667 - protein, 366 aa, Homo sapiens
MDTGVIEGGLNVTLTIRLLMHGKEVGSIIGKKGESVKKMREESGARINISEGNCPERIITLAGPTNAIFKAFAMIIDKLEEDISSSMTNSTAASRPPVTLRLVVPASQCGSLIGKGGCKIKEIRESTGAQVQVAGDMLPNSTERAITIAGIPQSIIECVKQICVVMLETLSQSPPKGVTIPYRPKPSSSPVIFAGGQDRYSTGSDSASFPHTTPSMCLNPDLEGPPLEAYTIQGQYAIPQPDLTKLHQLAMQQSHFPMTHGNTGFSGIESSSPEVKGYWAGLDASAQTTSHELTIPNDLIGCIIGRQGAKINEIRQMSGAQIKIANPVEGSTDRQVTITGSAASISLAQYLINVRLSSETGGMGSS

SEQ ID NO: 7668 - protein, 173 aa, Homo sapiens
MSLLGPKVLLFLAAFIITSDWIPLGVNSQRGDDVTQATPETFTEDPNLVNDPATDETVLAVLADIAPSTDDLASLSEKNTTAECWDEKFTCTRLYSVHRPVKQCIHQLCFTSLRRMYIVNKEICSRLVCKEHEAMKDELCRQMAGLPPRRLRRSNYFRLPPCENVDLQRPNGL

SEQ ID NO: 7669 - protein, 549 aa, Homo sapiens
MSPTISHKDSSRQRRPGNFSHSLDMKSGPLPPGGWDDSHLDSAGREGDREALLGDTGTGDFLKAPQSFRAELSSILLLLFLYVLQGIPLGLAGSIPLILQSKNVSYTDQAFFSFVFWPFSLKLLWAPLVDAVYVKNFGRRKSWLVPTQYILGLFMIYLSTQVDRLLGNTDDRTPDVIALTVAFFLFEFLAATQDIAVDGWALTMLSRENVGYASTCNSVGQTAGYFLGNVLFLALESADFCNKYLRFQPQPRGIVTLSDFLFFWGTVFLITTTLVALLKKENEVSVVKEETQGITDTYKLLFAIIKMPAVLTFCLLILTAKIGFSAADAVTGLKLVEEGVPKEHLALLAVPMVPLQIILPLIISKYTAGPQPLNTFYKAMPYRLLLGLEYALLVWWTPKVEHQGGFPIYYYIVVLLSYALHQVTVYSMYVSIMAFNAKVSDPLIGGTYMTLLNTVSNLGGNWPSTVALWLVDPLTVKECVGASNQNCRTPDAVELCKKLGGSCVTALDGYYVESIICVFIGFGWWFFLGPKFKKLQDEGSSSWKCKRNN

SEQ ID NO: 7670 - protein, 96 aa, Homo sapiens; identical to SEQ ID NO: 7203

SEQ ID NO: 7671 - protein, 1960 aa, Homo sapiens [sequence omitted]

SEQ ID NO: 7672 - protein, 314 aa, Homo sapiens
MEDKRNIQIIEWEHLDKKKFYVFGVAMTMMIRVSVYPFTLIRTRLQVQKGKSLYHGTFDAFIKILRADGITGLYRGFLVNTFTLISGQCYVTTYELTRKFVADYSQSNTVKSLVAGGSASLVAQSITVPIDVVSQHLMMQRKGEKMGRFQVRGNPEGQGVVAFGQTKDIIRQILQADGLRGFYRGYVASLLTYIPNSAVWWPFYHFYAEQLSYLCPKECPHIVFQAVSGPLAAATASILTNPMDVIRTRVQVEGKNSIILTFRQLMAEEGPWGLMKGLSARIISATPSTIVIVVGYESLKKLSLRPELVDSRHW

SEQ ID NO: 7673 - protein, 1411 aa, Homo sapiens
MASISEPVTFREFCPLYYLLNAIPTKIQKGFRSIVVYLTALDTNGDYIAVGSSIGMLYLYCRHLNQMRKYNFEGKTESITVVKLLSCFDDLVAAGTASGRVAVFQLVSSLPGRNKQLRRFDVTGIHKNSITALAWSPNGMKLFSGDDKGKIVYSSLDLDQGLCNSQLVLEEPSSIVQLDYSQKVLLVSTLQRSLLFYTEEKSVRQIGTQPRKSTGKFGACFIPGLCKQSDLTLYASRPGLRLWKADVHGTVQATFILKDAFAGGVKPFELHPRLESPNSGSCSLPERHLGLVSCFFQEGWVLSWNEYSIYLLDTVNQATVAGLEGSGDIVSVSCTENEIFFLKGDRNIIRISSRPEGLTSTVRDGLEMSGCSERVHVQQAEKLPGATVSETRLRGSSMASSVASEPRSRSSSLNSTDSGSGLLPPGLQATPELGKGSQPLSQRFNAISSEDFDQELVVKPIKVKRKKKKKKTEGGSRSTCHSSLESTPCSEFPGDSPQSLNTDLLSMTSSVLGSSVDQLSAESPDQESSFNGEVNGVPQENTDPETFNVLEVSGSMPDSLAEEDDIRTEMPHCHHAHGRELLNGAREDVGGSDVTGLGDEPCPADDGPNSTQLPFQEQDSSPGAHDGEDIQPIGPQSTFCEVPLLNSLTVPSSLSWAPSAEQWLPGTRADEGSPVEPSQEQDILTSMEASGHLSTNLWHAVTDDDTGQKEIPISERVLGSVGGQLTPVSALAASTHKPWLEQPPRDQTLTSSDEEDIYAHGLPSSSSETSVTELGPSCSQQDLSRLGAEDAGLLKPDQFAESWMGYSGPGYGILSLVVSEKYIWCLDYKGGLFCSALPGAGLRWQKFEDAVQQVAVSPSGALLWKIEQKSNRAFACGKVTIKGKRHWYEALPQAVFVALSDDTAWIIRTSGDLYLQTGLSVDRPCARAVKVDCPYPLSQITARNNVVWALTEQRALLYREGVSSFCPEGEQWKCDIVSERQALEPVCITLGDQQTLWALDIHGNLWFRTGIISKKPQGDDDHWWQVSITDYVVFDQCSLFQTIIHATHSVATAAQAPVEKVADKLRMAFWSQQLQCQPSLLGVNNSGVWISSGKNEFHVAKGSLIGTYWNHVVPRGTASATKWAFVLASAAPTKEGSFLWLCQSSKDLCSVSAQSAQSRPSTVQLPPEAEMRAYAACQDALWALDSLGQVFIRTLSKSCPTGMHWTRLDLSQLGAVKLTSLACGNQHIWACDSRGGVYFRVGTQPLNPSLMLPAWIMIEPPVQPAGVSLVSVHSSPNDQMLWVLDSRWNVHVRTGITEEMPVGTAWEHVPGLQACQLALSTRTVWARCPNGDLARRYGVTDKNPAGDYWKKIPGSVSCFTVTASDELWAVGPPGYLLQRLTKTFSHSHGTQKSSQAAMPHPEDLEDEWEVI

SEQ ID NO: 7674 - protein, 269 aa, Homo sapiens
MAASAGAGAVIAAPDSRRWLWSVLAAALGLLTAGVSALEVYTPKEIFVANGTQGKLTCKFKSTSTTGGLTSVSWSFQPEGADTTVSFFHYSQGQVYLGNYPPFKDRISWAGDLDKKDASINIENMQFIHNGTYICDVKNPPDIVVQPGHIRLYVVEKENLPVFPVWVVVGIVTAVVLGLTLLISMILAVLYRRKNSKRDYTGCSTSESLSPVKQAPRKSPSDTEGLVKSLPSGSHQGPVIYAQLDHSGGHHSDKINKSESVVYADIRKN

SEQ ID NO: 7675 - protein, 1632 aa, Homo sapiens
MPARTAPARVPTLAVPAISLPDDVRRRLKDLERDSLTEKECVKEKLNLLHEFLQTEIKNQLCDLETKLRKEELSEEGYLAKVKSLLNKDLSLENGAHAYNREVNGRLENGNQARSEARRVGMADANSPPKPLSKPRTPRRSKSDGEAKRSRDPPASASQVTGIRAEPSPSPRITRKSTRQTTITSHFAKGPAKRKPQEESERAKSDESIKEEDKDQDEKRRRVTSRERVARPLPAEEPERAKSGTRTEKEEERDEKEEKRLRSQTKEPTPKQKLKEEPDREARAGVQADEDEDGDEKDEKKHRSQPKDLAAKRRPEEKEPEKVNPQISDEKDEDEKEEKRRKTTPKEPTEKKMARAKTVMNSKTHPPKCIQCGQYLDDPDLKYGQHPPDAVDEPQMLTNEKLSIFDANESGFESYEALPQHKLTCFSVYCKHGHLCPIDTGLIEKNIELFFSGSAKPIYDDDPSLEGGVNGKNLGPINEWWITGFDGGEKALIGFSTSFAEYILMDPSPEYAPIFGLMQEKIYISKIVVEFLQSNSDSTYEDLINKIETTVPPSGLNLNRFTEDSLLRHAQFVVEQVESYDEAGDSDEQPIFLTPCMRDLIKLAGVTLGQRRAQARRQTIRHSTREKDRGPTKATTTKLVYQIFDTFFAEQIEKDDREDKENAFKRRRCGVCEVCQQPECGKCKACKDMVKFGGSGRSKQACQERRCPNMAMKEADDDEEVDDNIPEMPSPKKMHQGKKKKQNKNRISWVGEAVKTDGKKSYYKKVCIDAETLEVGDCVSVIPDDSSKPLYLARVTALWEDSSNGQMFHAHWFCAGTDTVLGATSDPLELFLVDECEDMQLSYIHSKVKVIYKAPSENWAMEGGMDPESLLEGDDGKTYFYQLWYDQDYARFESPPKTQPTEDNKFKFCVSCARLAEMRQKEIPRVLEQLEDLDSRVLYYSATKNGILYRVGDGVYLPPEAFTFNIKLSSPVKRPRKEPVDEDLYPEHYRKYSDYIKGSNLDAPEPYRIGRIKEIFCPKKSNGRPNETDIKIRVNKFYRPENTHKSTPASYHADINLLYWSDEEAVVDFKAVQGRCTVEYGEDLPECVQVYSMGGPNRFYFLEAYNAKSKSFEDPPNHARSPGNKGKGKGKGKGKPKSQACEPSEPEIEIKLPKLRTLDVFSGCGGLSEGFHQAGISDTLWAIEMWDPAAQAFRLNNPGSTVFTEDCNILLKLVMAGETTNSRGQRLPQKGDVEMLCGGPPCQGFSGMNRFNSRTYSKFKNSLVVSFLSYCDYYRPRFFLLENVRNFVSFKRSMVLKLTLRCLVRMGYQCTFGVLQAGQYGVAQTRRRAIILAAAPGEKLPLFPEPLHVFAPRACQLSVVVDDKKFVSNITRLSSGPFRTITVRDTMSDLPEVRNGASALEISYNGEPQSWFQRQLRGAQYQPILRDHICKDMSALVAARMRHIPLAPGSDWRDLPNIEVRLSDGTMARKLRYTHHDRKNGRSSSGALRGVCSCVEAGKACDPAARQFNTLIPWCLPHTGNRHNHWAGLYGRLEWDGFFSTTVTNPEPMGKQGRVLHPEQHRVVSVRECARSQGFPDTYRLFGNILDKHRQVGNAVPPPLAKAIGLEIKLCMLAKARESASAKIKEEEAAKD

SEQ ID NO: 7676 - protein, 282 aa, Homo sapiens
MAAATELNRPSSGDRNLERRCRPNLSREVLYEIFRSLHTLVGQLDLRDDVVKITIDWNKLQSLSAFQPALLFSALEQHILYLQPFLAKLQSPIKEENTTAVEEIGRTEMGNKNEVNDKFSIGDLQEEEKHKESDLRDVKKTQIHFDPEVVQIKAGKAEIDRRISAFIERKQAEINENNVREFCNVIDCNQENSCARTDAIFTPYPGFKSHVKVSRVVNTYGPQTRPEGIPGSGHKPNSMLRDCGNQAVEERLQNIEAHLRLQTELFWKKKKSSTTSTELFTG

SEQ ID NO: 7677 - protein, 483 aa, Homo sapiens
MTKMDIRGAVDAAVPTNIIAAKAAEVRANKVNWQSYLQGQMISAEDCEFIQRFEMKRSPEEKQEMLQTEGSQCAKTFINLMTHICKEQTVQYILTMVDDMLQENHQRVSIFFDYARCSKNTAWPYFLPMLNRQDPFTVHMAARIIAKLAAWGKELMEGSDLNYYFNWIKTQLSSQKLRGSGVAVETGTVSSSDSSQYVQCVAGCLQLMLRVNEYRFAWVEADGVNCIMGVLSNKCGFQLQYQMIFSIWLLAFSPQMCEHLRRYNIIPVLSDILQESVKEKVTRIILAAFRNFLEKSTERETRQEYALAMIQCKVLKQLENLEQQKYDDEDISEDIKFLLEKLGESVQDLSSFDEYSSELKSGRLEWSPVHKSEKFWRENAVRLNEKNYELLKILTKLLEVSDDPQVLAVAAHDVGEYVRHYPRGKRVIEQLGGKQLVMNHMHHEDQQVRYNALLAVQKLMVHNWEYLGKQLQSEQPQTAAARS

SEQ ID NO: 7678 - protein, 167 aa, Homo sapiens
MLVLLAFIIAFHITSAALLFIATVDNAWWVGDEFFADVWRICTNNTNCTVINDSFQEYSTLQAVQATMILSTILCCIAFFIFVLQLFRLKQGERFVLTSIIQLMSCLCVMIAASIYTDRREDIHDKNAKFYPVTREGSYGYSYILAWVAFACTFISGMMYLILRKRK

SEQ ID NO: 7679 - protein, 326 aa, Homo sapiens
MAPPAGGAAAAASDLGSAAVLLAVHAAVRPLGAGPDAEAQLRRLQLSADPERPGRFRLELLGAGPGAVNLEWPLESVSYTIRGPTQHELQPPPGGPGTLSLHFLNPQEAQRWAVLVRGATVEGQNGSKSNSPPALGPEACPVSLPSPPEASTLKGPPPEADLPRSPGNLTEREELAGSLARAIAGGDEKGAAQVAAVLAQHRVALSVQLQEACFPPGPIRLQVTLEDAASAASAASSAHVALQVHPHCTVAALQEQVFSELGFPPAVQRWVIGRCLCVPERSLASYGVRQDGDPAFLYLLSAPREAPAQLVLSFLHLHQCPRPPWL

SEQ ID NO: 7680 - protein, 217 aa, Homo sapiens
MSLVGGFPHHPVVHHEGYPFAAAAAAAAAAAASRCSHEENPYFHGWLIGHPEMSPPDYSMALSYSPEYASGAAGLDHSHYGGVPPGAGPPGLGGPRPVKRRGTANRKERRRTQSINSAFAELRECIPNVPADTKLSKIKTLRLATSYIAYLMDLLAKDDQNGEAEAFKAEIKKTDVKEEKRKKELNEILKSTVSSNDKKTKGRTGWPQHVWALELKQ

SEQ ID NO: 7681 - protein, 308 aa, Homo sapiens
MRTHTRGAPSVFFIYLLCFVSAYITDENPEVMIPFTNANYDSHPMLYFSRAEVAELQLRAASSHEHIAARLTEAVHTMLSSPLEYLPPWDPKDYSARWNEIFGNNLGALAMFCVLYPENIEARDMAKDYMERMAAQPSWLVKDAPWDEVPLAHSLVGFATAYDFLYNYLSKTQQEKFLEVIANASGYMYETSYRRGWGFQYLHNHQPTNCMALLTGSLVLMNQGYLQEAYLWTKQVLTIMEKSLVLLREVTDGSLYEGVAYGSYTTRSLFQYMFLVQRHFNINHFGHPWLKQHFAFMYRTILPGMMAA

SEQ ID NO: 7682 - protein, 361 aa, Homo sapiens
MLKRCGRRLLLALAGALLACLLVLTADPPPPPLPAERGRRALRSLAGPAGAAPAPGLGAAAAAPGALVRDVHSLSEYFSLLTRARRDAGPPPGAAPRPADGHPRPLAEPLAPRDVFIAVKTTKKFHRARLDLLLETWISRHKEMTFIFTDGEDEALARHTGNVVITNCSAAHSRQALSCKMAVEYDRFIESGRKWFCHVDDDNYVNLRALLRLLASYPHTRDVYVGKPSLDRPIQAMERVSENKVRPVHFWFATGGAGFCISRGLALKMSPWASGGHFMNTAERIRLPDDCTIGYIVEALLGVPLIRSGLFHSHLENLQQVPTSELHEQVTLSYGMFENKRNAVHVKGPFSVEADPSRWGN

SEQ ID NO: 7683 - protein, 713 aa, Homo sapiens
MLLATLLLLLLGGALAHPDRIIFPNHACEDPPAVLLEVQGTLQRPLVRDSRTSPANCTWLILGSKEQTVTIRFQKLHLACGSERLTLRSPLQPLISLCEAPPSPLQLPGGNVTITYSYAGARAPMGQGFLLSYSQDWLMCLQEEFQCLNHRCVSAVQRCDGVDACGDGSDEAGCSSDPFPGLTPRPVPSLPCNVTLEDFYGVFSSPGYTHLASVSHPQSCHWLLDPHDGRRLAVRFTALDLGFGDAVHVYDGPGPPESSRLLRSLTHFSNGKAVTVETLSGQAVVSYHTVAWSNGRGFNATYHVRGYCLPWDRPCGLGSGLGAGEGLGERCYSEAQRCDGSWDCADGTDEEDCPGCPPGHFPCGAAGTSGATACYLPADRCNYQTFCADGADERRCRHCQPGNFRCRDEKCVYETWVCDGQPDCADGSDEWDCSYVLPRKVITAAVIGSLVCGLLLVIALGCTCKLYAIRTQEYSIFAPLSRMEAEIVQQQAPPSYGQLIAQGAIPPVEDFPTENPNDNSVLGNLRSLLQILRQDMTPGGGPGARRRQRGRLMRRLVRRLRRWGLLPRTNTPARASEARSQVTPSAAPLEALDGGTGPAREGGAVGGQDGEQAPPLPIKAPLPSASTSPAPTTVPEAPGPLPSLPLEPSLLSGVVQALRGRLLPSLGPPGPTRSPPGPHTAVLALEDEDDVLLVPLAEPGVWVAEAEDEPLLT

SEQ ID NO: 7684 - protein, 453 aa, Homo sapiens
MISQFFILSSKGDPLIYKDFRGDSGGRDVAELFYRKLTGLPGDESPVVMHHHGRHFIHIRHSGLYLVVTTSENVSPFSLLELLSRLATLLGDYCGSLGEGTISRNVALVYELLDEVLDYGYVQTTSTEMLRNFIQTEAVVSKPFSLFDLSSVGLFGAETQQSKVAPSSAASRPVLSSRSDQSQKNEVFLDVVERLSVLIASNGSLLKVDVQGEIRLKSFLPSGSEMRIGLTEEFCVGKSELRGYGPGIRVDEVSFHSSVNLDEFESHRILRLQPPQGELTVMRYQLSDDLPSPLPFRLFPSVQWDRGSGRLQVYLKLRCDLLSKSQALNVRLHLPLPRGVVSLSQELSSPEQKAELAEGALRWDLPRVQGGSQLSGLFQMDVPGPPGPPSHGLSTSASPLGLGPASLSFELPRHTCSGLQVRFLRLAFRPCGNANPHKWVRHLSHSDAYVIRI

SEQ ID NO: 7685 - protein, 360 aa, Homo sapiens
MGLLLLVPLLLLPGSYGLPFYNGFYYSNSANDQNLGNGHGKDLLNGVKLVVETPEETLFTYQGASVILPCRYRYEPALVSPRRVRVKWWKLSENGAPEKDVLVAIGLRHRSFGDYQGRVHLRQDKEHDVSLEIQDLRLEDYGRYRCEVIDGLEDESGLVELELRGVVFPYQSPNGRYQFNFHEGQQVCAEQAAVVASFEQLFRAWEEGLDWCNAGWLQDATVQYPIMLPRQPCGGPGLAPGVRSYGPRHRRLHRYDVFCFATALKGRVYYLEHPEKLTLTEAREACQEDDATIAKVGQLFAAWKFHGLDRCDAGWLADGSVRYPVVHPHPNCGPPEPGVRSFGFPDPQSRLYGVYCYRQH

SEQ ID NO: 7686 - protein, 130 aa, Homo sapiens; identical to SEQ ID NO: 7590

SEQ ID NO: 7687 - protein, 269 aa, Homo sapiens
MIRTLLLSTLVAGALSCGDPTYPPYVTRVVGGEEARPNSWPWQVSLQYSSNGKWYHTCGGSLIANSWVLTAAHCISSSRTYRVGLGRHNLYVAESGSLAVSVSKIVVHKDWNSNQISKGNDIALLKLANPVSLTDKIQLACLPPAGTILPNNYPCYVTGWGRLQTNGAVPDVLQQGRLLVVDYATCSSSAWWGSSVKTSMICAGGDGVISSCNGDSGGPLNCQASDGRWQVHGIVSFGSRLGCNYYHKPSVFTRVSNYIDWINSVIANN

SEQ ID NO: 7688 - protein, 732 aa, Homo sapiens
MDPSADTWDLFSPLISLWINRFYIYLGFAVSISLWICVQIVIKTQGKNLQEKSVPKAAQDLMTNGYVSLQEKDIFVSGVKIFYGSQTGTAKGFATVLAEAVTSLDLPVAIINLKEYDPDDHLIEEVTSKNVCVFLVATYTDGLPTESAEWFCKWLEEASIDFRFGKTYLKGMRYAVFGLGNSAYASHFNKVGKNVDKWLWMLGAHRVMSRGEGDCDVVKSKHGSIEADFRAWKTKFISQLQALQKGERKKSCGGHCKKGKCESHQHGSEEREEGSHEQDELHHRDTEEEEPFESSSEEEFGGEDHQSLNSIVDVEDLGKIMDHVKKEKREKEQQEEKSGLFRNMGRNEDGERRAMITPALREALTKQGYQLIGSHSGVKLCRWTKSMLRGRGGCYKHTFYGIESHRCMETTPSLACANKCVFCWRHHTNPVGTEWRWKMDQPEMILKEAIENHQNMIKQFKGVPGVKAERFEEGMTVKHCALSLVGEPIMYPEINRFLKLLHQCKISSFLVTNAQFPAEIRNLEPVTQLYVSVDASTKDSLKKIDRPLFKDFWQRFLDSLKALAVKQQRTVYRLTLVKAWNVDELQAYAQLVSLGNPDFIEVKGVTYCGESSASSLTMAHVPWHEEVVQFVHELVDLIPEYEIACEHEHSNCLLIAHRKFKIGGEWWTWIDYNRFQELIQEYEDSGGSKTFSAKDYMARTPHWALFGASERGFDPKDTRHQRKNKSKAISGC

SEQ ID NO: 7689 - protein, 831 aa, Homo sapiens
MKVHMHTKFCLICLLTFIFHHCNHCHEEHDHGPEALHRQHRGMTELEPSKFSKQAAENEKKYYIEKLFERYGENGRLSFFGLEKLLTNLGLGERKVVEINHEDLGHDHVSHLDILAVQEGKHFHSHNHQHSHNHLNSENQTVTSVSTKRNHKCDPEKETVEVSVKSDDKHMHDHNHRLRHHHRLHHHLDHNNTHHFHNDSITPSERGEPSNEPSTETNKTQEQSDVKLPKGKRKKKGRKSNENSEVITPGFPPNHDQGEQYEHNRVHKPDRVHNPGHSHVHLPERNGHDPGRGHQDLDPDNEGELRHTRKREAPHVKNNAIISLRKDLNEDDHHHECLNVTQLLKYYGHGANSPISTDLFTYLCPALLYQIDSRLCIEHFDKLLVEDINKDKNLVPEDEANIGASAWICGIISITVISLLSLLGVILVPIINQGCFKFLLTFLVALAVGTMSGDALLHLLPHSQGGHDHSHQHAHGHGHSHGHESNKFLEEYDAVLKGLVALGGIYLLFIIEHCIRMFKHYKQQRGKQKWFMKQNTEESTIGRKLSDHKLNNTPDSDWLQLKPLAGTDDSVVSEDRLNETELTDLEGQQESPPKNYLCIEEEKIIDHSHSDGLHTIHEHDLHAAAHNHHGENKTVLRKHNHQWHHKHSHHSHGPCHSGSDLKETGIANIAWMVIMGDGIHNFSDGLAIGAAFSAGLTGGISTSIAVFCHELPHELGDFAVLLKAGMTVKQAIVYNLLSAMMAYIGMLIGTAVGQYANNITLWIFAVTAGMFLYVALVDMLPEMLHGDGDNEEHGFCPVGQFILQNLGLLFGFAIMLVIALYEDKIVFDIQF

SEQ ID NO: 7690 - protein, 385 aa, Homo sapiens
MRLLAKIICLMLWAICVAEDCNELPPRRNTEILTGSWSDQTYPEGTQAIYKCRPGYRSLGNVIMVCRKGEWVALNPLRKCQKRPCGHPGDTPFGTFTLTGGNVFEYGVKAVYTCNEGYQLLGEINYRECDTDGWTNDIPICEEISCKSPDVINGSPISQKIIYKENERFQYKCNMGYEYSERGDAVCTESGWRPLPSCEEKSCDNPYIPNGDYSPLRIKHRTGDEITYQCRNGFYPATRGNTAKCTSTGWIPAPRCTLKPCDYPDIKHGGLYHENMRRPYFPVAVGKYYSYYCDEHFETPSGSYWDHIHCTQDGWSPAVPCLRKCYFPYLENGYNQNHGRKFVQGKSIDVACHPGYALPKAQTTVTCMENGWSPTPRCIRVSFTL

SEQ ID NO: 7691 - protein, 949 aa, Homo sapiens
MKVARFQKIPNGENETMIPVLTSKKASELPVSEVASILQADLQNGLNKCEVSHRRAFHGWNEFDISEDEPLWKKYISQFKNPLIMLLLASAVISVLMHQFDDAVSITVAILIVVTVAFVQEYRSEKSLEELSKLVPPECHCVREGKLEHTLARDLVPGDTVCLSVGDRVPADLRLFEAVDLSIDESSLTGETTPCSKVTAPQPAATNGDLASRSNIAFMGTLVRCGKAKGVVIGTGENSEFGEVFKMMQAEEAPKTPLQKSMDLLGKQLSFYSFGIIGIIMLVGWLLGKDILEMFTISVSLAVAAIPEGLPIVVTVTLALGVMRMVKKRAIVKKLPIVETLGCCNVICSDKTGTLTKNEMTVTHIFTSDGLHAEVTGVGYNQFGEVIVDGDVVHGFYNPAVSRIVEAGCVCNDAVIRNNTLMGKPTEGALIALAMKMGLDGLQQDYIRKAEYPFSSEQKWMAVKCVHRTQQDRPEICFMKGAYEQVIKYCTTYQSKGQTLTLTQQQRDVYQQEKARMGSAGLRVLALASGPELGQLTFLGLVGIIDPPRTGVKEAVTTLIASGVSIKMITGDSQETAVAIASRLGLYSKTSQSVSGEEIDAMDVQQLSQIVPKVAVFYRASPRHKMKIIKSLQKNGSVVAMTGDGVNDAVALKAADIGVAMGQTGTDVCKEAADMILVDDDFQTIMSAIEEGKGIYNNIKNFVRFQLSTSIAALTLISLATLMNFPNPLNAMQILWINIIMDGPPAQSLGVEPVDKDVIRKPPRNWKDSILTKNLILKILVSSIIIVCGTLFVFWRELRDNVITPRDTTMTFTCFVFFDMFNALSSRSQTKSVFEIGLCSNRMFCYAVLGSIMGQLLVIYFPPLQKVFQTESLSILDLLFLLGLTSSVCIVAEIIKKVERSREKIQKHVSSTSSSFLEVWLWERSGQQLVEIHPHLETGLPLTEDVSCV

SEQ ID NO: 7692 - protein, 932 aa, Homo sapiens
MAVVIRLQGLPIVAGTMDIRHFFSGLTIPDGGVHIVGGELGEAFIVFATDEDARLGMMRTGGTIKGSKVTLLLSSKTEMQNMIELSRRRFETANLDIPPANASRSGPPPSSGMSSRVNLPTTVSNFNNPSPSVVTATTSVHESNKNIQTFSTASVGTAPPNMGASFGSPTFSSTVPSTASPMNTVPPPPIPPIPAMPSLPPMPSIPPIPVPPPVPTLPPVPPVPPIPPVPSVPPMTPLPPMSGMPPLNPPPVAPLPAGMNGSGAPMNLNNNLNPMFLGPLNPVNPIQMNSQSSVKPLPINPDDLYVSVHGMPFSAMENDVRDFFHGLRVDAVHLLKDHVGRNNGNGLVKFLSPQDTFEALKRNRMLMIQRYVEVSPATERQWVAAGGHITFKQNMGPSGQTHPPPQTLPRSKSPSGQKRSRSRSPHEAGFCVYLKGLPFEAENKHVIDFFKKLDIVEDSIYIAYGPNGKATGEGFVEFRNEADYKAALCRHKQYMGNRFIQVHPITKKGMLEKIDMIRKRLQNFSYDQREMILNPEGDVNSAKVCAHITNIPFSITKMDVLQFLEGIPVDENAVHVLVDNNGQGLGQALVQFKNEDDARKSERLHRKKLNGREAFVHVVTLEDMREIEKNPPAQGKKGLKMPVPGNPAVPGMPNAGLPGVGLPSAGLPGAGLPSTGLPGSAITSAGLPGAGMPSAGIPSAGGEEHAFLTVGSKEANNGPPFNFPGNFGGSNAFGPPIPPPGLGGGAFGDARPGMPSVGNSGLPGLGLDVPGFGGGPNNLSGPSGFGGGPQNFGNGPGSLGGPPGFGSGPPGLGSAPGHLGGPPAFGPGPGPGPGPGPIHIGGPPGFASSSGKPGPTVIKVQNMPFTVSIDEILDFFYGYQVIPGSVCLKYNEKGMPTGEAMVAFESRDEATAAVIDLNDRPIGSRKVKLVLG

SEQ ID NO: 7693 - protein, 286 aa, Homo sapiens
MALVLILQLLTLWPLCHTDITPSVAIIVPPASYHPKPWLGAQPATVVTPGVNVTLRCRAPQPAWRFGLFKPGEIAPLLFRDVSSELAEFFLEEVTPAQGGSYRCCYRRPDWGPGVWSQPSDVLELLVTEELPRPSLVALPGPVVGPGANVSLRCAGRLRNMSFVLYREGVAAPLQYRHSAQPWADFTLLGARAPGTYSCYYHTPSAPYVLSQRSEVLVISWEGEGPEARPASSAPGMQAPGPPPSDPGAQAPSLSSFRPRGLVLQPLLPQTQDSWDPAPPPSDPGV

SEQ ID NO: 7694 - protein, 373 aa, Homo sapiens
MLPWLLVFSALGIQAWGDSSWNKTQAKQVSEGLQYLFENISQLTEKGLPTDVSTTVSRKAWGAEAVGCSIQLTTPVNVLVIHHVPGLECHDQTVCSQRLRELQAHHVHNNSGCDVAYNFLVGDDGRVYEGVGWNIQGVHTQGYNNISLGFAFFGTKKGHSPSPAALSAMENLITYAVQKGHLSSSYVQPLLGKGENCLAPRQKTSLKKACPGVVPRSVWGARETHCPRMTLPAKYGIIIHTAGRTCNISDECRLLVRDIQSFYIDRLKSCDIGYNFLVGQDGAIYEGVGWNVQGSSTPGYDDIALGITFMGTFTGIPPNAAALEAAQDLIQCAMVKGYLTPNYLLVGHSDVARTLSPGQALYNIISTWPHFKH

SEQ ID NO: 7695 - protein, 708 aa, Homo sapiens
MSERGIKWACEYCTYENWPSAIKCTMCRAQRPSGTIITEDPFKSGSSDVGRDWDPSSTEGGSSPLICPDSSARPRVKSSYSMENANKWSCHMCTYLNWPRAIRCTQCLSQRRTRSPTESPQSSGSGSRPVAFSVDPCEEYNDRNKLNTRTQHWTCSVCTYENWAKAKRCVVCDHPRPNNIEAIELAETEEASSIINEQDRARWRGSCSSGNSQRRSPPATKRDSEVKMDFQRIELAGAVGSKEELEVDFKKLKQIKNRMKKTDWLFLNACVGVVEGDLAAIEAYKSSGGDIARQLTADEVRLLNRPSAFDVGYTLVHLAIRFQRQDMLAILLTEVSQQAAKCIPAMVCPELTEQIRREIAASLHQRKGDFACYFLTDLVTFTLPADIEDLPPTVQEKLFDEVLDRDVQKELEEESPIINWSLELATRLDSRLYALWNRTAGDCLLDSVLQATWGIYDKDSVLRKALHDSLHDCSHWFYTRWKDWESWYSQSFGLHFSLREEQWQEDWAFILSLASQPGASLEQTHIFVLAHILRRPIIVYGVKYYKSFRGETLGYTRFQGVYLPLLWEQSFCWKSPIALGYTRGHFSALVAMENDGYGNRGAGANLNTDDDVTITFLPLVDSERKLLHVHFLSAQELGNEEQQEKLLREWLDCCVTEGGVLVAMQKSSRRRNHPLVTQMVEKWLDRYRQIRPCTSLSDGEEDEDDEDE

SEQ ID NO: 7696 - protein, 2386 aa, Homo sapiens
MLRGPGPGLLLLAVQCLGTAVPSTGASKSKRQAQQMVQPQSPVAVSQSKPGCYDNGKHYQINQQWERTYLGNALVCTCYGGSRGFNCESKPEAEETCFDKYTGNTYRVGDTYERPKDSMIWDCTCIGAGRGRISCTIANRCHEGGQSYKIGDTWRRPHETGGYMLECVCLGNGKGEWTCKPIAEKCFDHAAGTSYVVGETWEKPYQGWMMVDCTCLGEGSGRITCTSRNRCNDQDTRTSYRIGDTWSKKDNRGNLLQCICTGNGRGEWKCERHTSVQTTSSGSGPFTDVRAAVYQPQPHPQPPPYGHCVTDSGVVYSVGMQWLKTQGNKQMLCTCLGNGVSCQETAVTQTYGGNSNGEPCVLPFTYNGRTFYSCTTEGRQDGHLWCSTTSNYEQDQKYSFCTDHTVLVQTRGGNSNGALCHFPFLYNNHNYTDCTSEGRRDNMKWCGTTQNYDADQKFGFCPMAAHEEICTTNEGVMYRIGDQWDKQHDMGHMMRCTCVGNGRGEWTCIAYSQLRDQCIVDDITYNVNDTFHKRHEEGHMLNCTCFGQGRGRWKCDPVDQCQDSETGTFYQIGDSWEKYVHGVRYQCYCYGRGIGEWHCQPLQTYPSSSGPVEVFITETPSQPNSHPIQWNAPQPSHISKYILRWRPKNSVGRWKEATIPGHLNSYTIKGLKPGVVYEGQLISIQQYGHQEVTRFDFTTTSTSTPVTSNTVTGETTPFSPLVATSESVTEITASSFVVSWVSASDTVSGFRVEYELSEEGDEPQYLDLPSTATSVNIPDLLPGRKYIVNVYQISEDGEQSLILSTSQTTAPDAPPDTTVDQVDDTSIVVRWSRPQAPITGYRIVYSPSVEGSSTELNLPETANSVTLSDLQPGVQYNITIYAVEENQESTPVVIQQETTGTPRSDTVPSPRDLQFVEVTDVKVTIMWTPPESAVTGYRVDVIPVNLPGEHGQRLPISRNTFAEVTGLSPGVTYYFKVFAVSHGRESKPLTAQQTTKLDAPTNLQFVNETDSTVLVRWTPPRAQITGYRLTVGLTRRGQPRQYNVGPSVSKYPLRNLQPASEYTVSLVAIKGNQESPKATGVFTTLQPGSSIPPYNTEVTETTIVITWTPAPRIGFKLGVRPSQGGEAPREVTSDSGSIVVSGLTPGVEYVYTIQVLRDGQERDAPIVNKVVTPLSPPTNLHLEANPDTGVLTVSWERSTTPDITGYRITTTPTNGQQGNSLEEVVHADQSSCTFDNLSPGLEYNVSVYTVKDDKESVPISDTIIPAVPPPTDLRFTNIGPDTMRVTWAPPPSIDLTNFLVRYSPVKNEEDVAELSISPSDNAVVLTNLLPGTEYVVSVSSVYEQHESTPLRGRQKTGLDSPTGIDFSDITANSFTVHWIAPRATITGYRIRHHPEHFSGRPREDRVPHSRNSITLTNLTPGTEYVVSIVALNGREESPLLIGQQSTVSDVPRDLEVVAATPTSLLISWDAPAVTVRYYRITYGETGGNSPVQEFTVPGSKSTATISGLKPGVDYTITVYAVTGRGDSPASSKPISINYRTEIDKPSQMQVTDVQDNSISVKWLPSSSPVTGYRVTTTPKNGPGPTKTKTAGPDQTEMTIEGLQPTVEYVVSVYAQNPSGESQPLVQTAVTNIDRPKGLAFTDVDVDSIKIAWESPQGQVSRYRVTYSSPEDGIHELFPAPDGEEDTAELQGLRPGSEYTVSVVALHDDMESQPLIGTQSTAIPAPTDLKFTQVTPTSLSAQWTPPNVQLTGYRVRVTPKEKTGPMKEINLAPDSSSVVVSGLMVATKYEVSVYALKDTLTSRPAQGVVTTLENVSPPRRARVTDATETTITISWRTKTETITGFQVDAVPANGQTPIQRTIKPDVRSYTITGLQPGTDYKIYLYTLNDNARSSPVVIDASTAIDAPSNLRFLATTPNSLLVSWQPPRARITGYIIKYEKPGSPPREVVPRPRPGVTEATITGLEPGTEYTIYVIALKNNQKSEPLIGRKKTDELPQLVTLPHPNLHGPEILDVPSTVQKTPFVTHPGYDTGNGIQLPGTSGQQPSVGQQMIFEEHGFRRTTPPTTATPIRHRPRPYPPNVGEEIQIGHIPREDVDYHLYPHGPGLNPNASTGQEALSQTTISWAPFQDTSEYIISCHPVGTDEEPLQFRVPGTSTSATLTGLTRGATYNVIVEALKDQQRHKVREEVVTVGNSVNEGLNQPTDDSCFDPYTVSHYAVGDEWERMSESGFKLLCQCLGFGSGHFRCDSSRWCHDNGVNYKIGEKWDRQGENGQMMSCTCLGNGKGEFKCDPHEATCYDDGKTYHVGEQWQKEYLGAICSCTCFGGQRGWRCDNCRRPGGEPSPEGTTGQSYNQYSQRYHQRTNTNVNCPIECFMPLDVQADREDSRE

SEQ ID NO: 7697 - protein, 614 aa, Homo sapiens
MDGKVAVQECGPPAVSWVPEEGEKLDQEDEDQVKDRGQWTNKMEFVLSVAGEIIGLGNVWRFPYLCYKNGGGAFFIPYFIFFFVCGIPVFFLEVALGQYTSQGSVTAWRKICPLFQGIGLASVVIESYLNVYYIIILAWALFYLFSSFTSELPWTTCNNFWNTEHCTDFLNHSGAGTVTPFENFTSPVMEFWERRVLGITSGIHDLGSLRWELALCLLLAWVICYFCIWKGVKSTGKVVYFTATFPYLMLVILLIRGVTLPGAYQGIIYYLKPDLFRLKDPQVWMDAGTQIFFSFAICQGCLTALGSYNKYHNNCYKDCIALCFLNSATSFVAGFVVFSILGFMSQEQGVPISEVAESGPGLAFIAFPKAVTMMPLSQLWSCLFFIMLIFLGLDSQFVCVECLVTASIDMFPRQLRKSGRRELLILTIAVMCYLIGLFLVTEGGMYIFQLFDYYASSGICLLFLSLFEVVCISWVYGADRFYDNIEDMIGYRPWPLVKISWLFLTPGLCLATFLFSLSKYTPLKYNNVYVYPPWGYSIGWFLALSSMVCVPLFVVITLLKTRGPFRKRLRQLITPDSSLPQPKQHPCLDGSAGRNFGPSPTREGLIAGEKETHL

SEQ ID NO: 7698 - protein, 140 aa, Homo sapiens [sequence omitted]

SEQ ID NO: 7699 - protein, 350 aa, Homo sapiens
MDLKALLSSLNDFASLSFAESWDNVGLLVEPSPPHTVNTLFLTNDLTEEVMEEVLQKKADLILSYHPPIFRPMKRITWNTWKERLVIRALENRVGIYSPHTAYDAAPQGVNNWLAKGLGACTSRPIHPSKAPNYPTEGNHRVEFNVNYTQDLDKVMSAVKGIDGVSVTSFSARTGNEEQTRINLNCTQKALMQVVDFLSRNKQLYQKTEILSLEKPLLLHTGMGRLCTLDESVSLATMIDRIKRHLKLSHIRLALGVGRTLESQVKVVALCAGSGSSVLQGVEADLYLTGEMSHHDTLDAASQGINVILCEHSNTERGFLSDLRDMLDSHLENKINIILSETDRDPLQVV

SEQ ID NO: 7700 - protein, 866 aa, Homo sapiens
MGNRGMEELIPLVNKLQDAFSSIGQSCHLDLPQIAVVGGQSAGKSSVLENFVGRDFLPRGSGIVTRRPLILQLIFSKTEHAEFLHCKSKKFTDFDEVRQEIEAETDRVTGTNKGISPVPINLRVYSPHVLNLTLIDLPGITKVPVGDQPPDIEYQIKDMILQFISRESSLILAVTPANMDLANSDALKLAKEVDPQGLRTIGVITKLDLMDEGTDARDVLENKLLPLRRGYIGVVNRSQKDIEGKKDIRAALAAERKFFLSHPAYRHMADRMGTPHLQKTLNQQLTNHIRESLPALRSKLQSQLLSLEKEVEEYKNFRPDDPTRKTKALLQMVQQFGVDFEKRIEGSGDQVDTLELSGGARINRIFHERFPFELVKMEFDEKDLRREISYAIKNIHGVRTGLFTPDLAFEAIVKKQVVKLKEPCLKCVDLVIQELINTVRQCTSKLSSYPRLREETERIVTTYIREREGRTKDQILLLIDIEQSYINTNHEDFIGFANAQQRSTQLNKKRAIPNQVIRRGWLTINNISLMKGGSKEYWFVLTAESLSWYKDEEEKEKKYMLPLDNLKIRDVEKGFMSNKHVFAIFNTEQRNVYKDLRQIELACDSQEDVDSWKASFLRAGVYPEKDQAENEDGAQENTFSMDPQLERQVETIRNLVDSYVAIINKSIRDLMPKTIMHLMINNTKAFIHHELLAYLYSSADQSSLMEESADQAQRRDDMLRMYHALKEALNIIGDISTSTVSTPVPPPVDDTWLQSASSHSPTPQRRPVSSIHPPGRPPAVRGPTPGPPLIPVPVGAAASFSAPPIPSRPGPQSVFANSDLFPAPPQIPSRPVRIPPGIPPGVPSRRPPAAPSRPTIIRPAEPSLLD

SEQ ID NO: 7701 - protein, 482 aa, Homo sapiens
MVMEKPSPLLVGREFVRQYYTLLNKAPEYLHRFYGRNSSYVHGGVDASGKPQEAVYGQNDIHHKVLSLNFSECHTKIRHVDAHATLSDGVVVQVMGLLSNSGQPERKFMQTFVLAPEGSVPNKFYVHNDMFRYEDEVFGDSEPELDEESEDEVEEEQEERQPSPEPVQENANSGYYEAHPVTNGIEEPLEESSHEPEPEPESETKTEELKPQVEEKNLEELEEKSTTPPPAEPVSLPQEPPKAFSWASVTSKNLPPSGTVSSSGIPPHVKAPVSQPRVEAKPEVQSQPPRVREQRPRERPGFPPRGPRPGRGDMEQNDSDNRRIIRYPDSHQLFVGNLPHDIDENELKEFFMSFGNVVELRINTKGVGGKLPNFGFVVFDDSEPVQRILIAKPIMFRGEVRLNVEEKKTRAARERETRGGGDDRRDIRRNDRGPGGPRGIVGGGMMRDRDGRGPPPRGGMAQKLGSGRGTGQMEGRFTGQRR

SEQ ID NO: 7702 - protein, 492 aa, Homo sapiens
MKLLLLHPAFQSCLLLTLLGLWRTTPEAHASSLGAPAISAASFLQDLIHRYGEGDSLTLQQLKALLNHLDVGVGRGNVTQHVQGHRNLSTCFSSGDLFTAHNFSEQSRIGSSELQEFCPTILQQLDSRACTSENQENEENEQTEEGRPSAVEVWGFGFLSVSLINLASLLGVLVLPCTEKAFFSRVLTYFIALSIGTLLSNALFQLIPEAFGFNPLEDYYVSKSAVVFGGFYLFFFTEKILKILLKQKNEHHHGHSHYASESLPSKKDQEEGVMEKLQNGDLDHMIPQHCSSELDGKAPMVDEKVIVGSLSVQDLQASQSACYWLKGVRYSDIGTLAWMITLSDGLHNFIDGLAIGASFTVSVFQGISTSVAILCEEFPHELGDFVILLNAGMSIQQALFFNFLSACCCYLGLAFGILAGSHFSANWIFALAGGMFLYISLADMFPEMNEVCQEDERKGSILIPFIIQNLGLLTGFTIMVVLTMYSGQIQIG

SEQ ID NO: 7703 - protein, 241 aa, Homo sapiens
MKILLVFDFDNTIIDDNSDTWIVQCAPNKKLPIELRDSYRKGFWTEFMGRVFKYLGDKGVREHEMKRAVTSLPFTPGMVELFNFIRKNKDKFDCIIISDSNSVFIDWVLEAASFHDIFDKVFTNPAAFNSNGHLTVENYHTHSCNRCPKNLCKKVVLIEFVDKQLQQGVNYTQIVYIGDGGNDVCPVTFLKNDDVAMPRKGYTLQKTLSRMSQNLEPMEYSVVVWSSGVDIISHLQFLIKD

SEQ ID NO: 7704 - protein, 1059 aa, Homo sapiens
MDWLFFRNICLLIILMVVMEVNSEFIVEVKEFDIENGTTKWQTVRRQKREWIKFAAACREGEDNSKRNPIAKIRSDCESNQKITYRISGVGIDRPPYGVFTINPRTGEINITSVVDREITPLFLIYCRALNSRGEDLERPLELRVKVMDINDNAPVFSQSVYTASIEENSDANTLVVKLCATDADEENHLNSKIAYKIVSQEPSGAPMFILNRYTGEVCTMSSFLDREQHSMYNLVVRGSDRDGAADGLSSECDCRIKVLDVNDNFPTLEKTSYSASIEENCLSSELIRLQAIDLDEEGTDNWLAQYLILSGNDGNWFDIQTDPQTNEGILKVVKMLDYEQAPNIQLSIGVKNQADFHYSVASQFQMHPTPVRIQVVDVREGPAFHPSTMAFSVREGIKGSSLLNYVLGTYTAIDLDTGNPATDVRYIIGHDAGSWLKIDSRTGEIQFSREFDKKSKYIINGIYTAEILAIDDGSGKTATGTICIEVPDINDYCPNIFPERRTICIDSPSVLISVNEHSYGSPFTFCVVDEPPGIADMWDVRSTNATSAILTAKQVLSPGFYEIPILVKDSYNRACELAQMVQLYACDCDDNHMCLDSGAAGIYTEDITGDTYGPVTEDQAGVSNVGLGPAGIGMMVLGILLLILAPLLLLLCCCKQRQPEGLGTRFAPVPEGGEGVMQSWRIEGAHPEDRLFSAYALPGGGGTADGGGSVLGRCALQATPALLNQHPPFSEIYTNTYAAGGTVEGGVSGVELNTGMGTAVGLMAAGAAGASGAARKRSSTMGTLRDYADADINMAFLDSYFSEKAYAYADEDEGRPANDCLLIYDHEGVGSPVGSIGCCSWIVDDLDESCMETLDPKFRTLAEICLNTEIEPFPSHQACIPISTDLPLLGPNYFVNESSGLTPSEVEFQEEMAASEPVVHGDIIVTETYGNADPCVQPTTIIFDPQLAPNVVVTEAVMAPVYDIQGNICVPAELADYNNVIYAERVLASPGVPDMSNSSTTEGCMGPVMSGNILVGPEIQVMQMMSPDLPIGQTVGSTSPMTSRHRVTRYSNIHYTQQ

SEQ ID NO: 7705 - protein, 193 aa, Homo sapiens
MRLLPLLRTVLWAAFLGSPLRGGSSLRHVVYWNSSNPRLLRGDAVVELGLNDYLDIVCPHYEGPGPPEGPETFALYMVDWPGYESCQAEGPRAYKRWVCSLPFGHVQFSEKIQRFTPFSLGFEFLPGETYYYISVPTPESSGQCLRLQVSVCCKERNLPSHPKEPESSQDPLEEEGSLLPALGVPIQTDKMEH

SEQ ID NO: 7706 - protein, 108 aa, Homo sapiens
MRQRLLPSVTSLLLVALLFPGSSQARHVNHSATEALGELRERAPGQGTNGFQLLRHAVKRDLLPPRTPPYQGDVPPGIRNTICHMQQGICRLFFCHSGTGQQHRQRCG

SEQ ID NO: 7707 - protein, 1754 aa, Homo sapiens
MAPYPCGCHILLLLFCCLAAARANLLNLNWLWFNNEDTSHAATTIPEPQGPLPVQPTADTTTHVTPRNGSTEPATAPGSPEPPSELLEDGQDTPTSAESPDAPEENIAGVGAEILNVAKGIRSFVQLWNDTVPTESLARAETLVLETPVGPLALAGPSSTPQENGTTLWPSRGIPSSPGAHTTEAGTLPAPTPSPPSLGRPWAPLTGPSVPPPSSGRASLSSLLGGAPPWGSLQDPDSQGLSPAAAAPSQQLQRPDVRLRTPLLHPLVMGSLGKHAAPSAFSSGLPGALSQVAVTTLTRDSGAWVSHVANSVGPGLANNSALLGADPEAPAGRCLPLPPSLPVCGHLGISRFWLPNHLHHESGEQVRAGARAWGGLLQTHCHPFLAWFFCLLLVPPCGSVPPPAPPPCCQFCEALQDACWSRLGGGRLPVACASLPTQEDGYCVLIGPAAERISEEVGLLQLLGDPPPQQVTQTDDPDVGLAYVFGPDANSGQVARYHFPSLFFRDFSLLFHIRPATEGPGVLFAITDSAQAMVLLGVKLSGVQDGHQDISLLYTEPGAGQTHTAASFRLPAFVGQWTHLALSVAGGFVALYVDCEEFQRMPLARSSRGLELEPGAGLFVAQAGGADPDKFQGVIAELKVRRDPQVSPMHCLDEEGDDSDGASGDSGSGLGDARELLREETGAALKPRLPAPPPVTTPPLAGGSSTEDSRSEEVEEQTTVASLGAQTLPGSDSVSTWDGSVRTPGGRVKEGGLKGQKGEPGVPGPPGRAGPPGSPCLPGPPGLPCPVSPLGPAGPALQTVPGPQGPPGPPGRDGTPGRDGEPGDPGEDGKPGDTGPQGFPGTPGDVGPKGDKGDPGVGERGPPGPQGPPGPPGPSFRHDKLTFIDMEGSGFGGDLEALRGPRGFPGPPGPPGVPGLPGEPGRFGVNSSDVPGPAGLPGVPGREGPPGFPGLPGPPGPPGREGPPGRTGQKGSLGEAGAPGHKGSKGAPGPAGARGESGLAGAPGPAGPPGPPGPPGPPGPGLPAGFDDMEGSGGPFWSTARSADGPQGPPGLPGLKGDPGVPGLPGAKGEVGADGVPGFPGLPGREGIAGPQGPKGDRGSRGEKGDPGKDGVGQPGLPGPPGPPGPVVYVSEQDGSVLSVPGPEGRPGFAGFPGPAGPKGNLGSKGERGSPGPKGEKGEPGSIFSPDGGALGPAQKGAKGEPGFRGPPGPYGRPGYKGEIGFPGRPGRPGMNGLKGEKGEPGDASLGFGMRGMPGPPGPPGPPGPPGTPVYDSNVFAESSRPGPPGLPGNQGPPGPKGAKGEVGPPGPPGQFPFDFLQLEAEMKGEKGDRGDAGQKGERGEPGGGGFFGSSLPGPPGPPGPPGPRGYPGIPGPKGESIRGQPGPPGPQGPPGIGYEGRQGPPGPPGPPGPPSFPGPHRQTISVPGPPGPPGPPGPPGTMGASSGVRLWATRQAMLGQVHEVPEGWLIFVAEQEELYVRVQNGFRKVQLEARTPLPRGTDNEVAALQPPVVQLHDSNPYPRREHPHPTARPWRADDILASPPRLPEPQPYPGAPHHSSYVHLRPARPTSPPAHSHRDFQPVLHLVALNSPLSGGMRGIRGADFQCFQQARAVGLAGTFRAFLSSRLQDLYSIVRRADRAAVPIVNLKDELLFPSWEALFSGSEGPLKPGARIFSFDGKDVLRHPTWPQKSVWHGSDPNGRRLTESYCETWRTEAPSATGQASSLLGGRLLGQSAASCHHAYIVLCIENSFMTASK

SEQ ID NO: 7708 - protein, 503 aa, Homo sapiens
MPVPPPPAPPPPPTFALANTEKPTLNKTEQAGRNALLSDISKGKKLKKTVTNDRSAPILDKPKGAGAGGGGGGFGGGGGFGGGGGGGGGGSFGGGGPPGLGGLFQAGMPKLRSTANRDNDSGGSRPPLLPPGGRSTSAKPFSPPSGPGRFPVPSPGHRSGPPEPQRNRMPPPRPDVGSKPDSIPPPVPSTPRPIQSSPHNRGSPPVPGGPRQPSPGPTPPPFPGNRGTALGGGSIRQSPLSSSSPFSNRPPLPPTPSRALDDKPPPPPPPVGNRPSIHREAVPPPPPQNNKPPVPSTPRPSASSQAPPPPPPPSRPGPPPLPPSSSGNDETPRLPQRNLSLSSSTPPLPSPGRSGPLPPPPSERPPPPVRDPPGRSGPLPPPPPVSRNGSTSRALPATPQLPSRSGVDSPRSGPRPPLPPDRPSAGAPPPPPPSTSIRNGFQDSPCEDEWESRFYFHPISDLPPPEPYVQTTKSYPSKLARNESRSGSNRRERGAPPLPPIPR

SEQ ID NO: 7709 - protein, 476 aa, Homo sapiens
MVKLIHTLADHGDDVNCCAFSFSLLATCSLDKTIRLYSLRDFTELPHSPLKFHTYAVHCCCFSPSGHILASCSTDGTTVLWNTENGQMLAVMEQPSGSPVRVCQFSPDSTCLASGAADGTVVLWNAQSYKLYRCGSVKDGSLAACAFSPNGSFFVTGSSCGDLTVWDDKMRCLHSEKAHDLGITCCDFSSQPVSDGEQGLQFFRLASCGQDCQVKIWIVSFTHILGFELKYKSTLSGHCAPVLACAFSHDGQMLVSGSVDKSVIVYDTNTENILHTLTQHTRYVTTCAFAPNTLLLATGSMDKTVNIWQFDLETLCQARRTEHQLKQFTEDWSEEDVSTWLCAQDLKDLVGIFKMNNIDGKELLNLTKESLADDLKIESLGLRSKVLRKIEELRTKVKSLSSGIPDEFICPITRELMKDPVIASDGYSYEKEAMENWISKKKRTSPMTNLVLPSAVLTPNRTLKMAINRWLETHQK

SEQ ID NO: 7710 - protein, 342 aa, Homo sapiens
MCSTMSAPTCLAHLPPCFLLLALVLVPSDASGQSSRNDWQVLQPEGPMLVAEGETLLLRCMVVGSCTDGMIKWVKVSTQDQQEIYNFKRGSFPGVMPMIQRTSEPLNCDYSIYIHNVTREHTGTYHCVRFDGLSEHSEMKSDEGTSVLVKGAGDPEPDLWIIQPQELVLGTTGDTVFLNCTVLGDGPPGPIRWFQGAGLSREAIYNFGGISHPKETAVQASNNDFSILLQNVSSEDAGTYYCVKFQRKPNRQYLSGQGTSLKVKAKSTSSKEAEFTSEPATEMSPTGLLVVFAPVVLGLKAITLAALLLALATSRRSPGQEDVKTTGPAGAMNTLAWSKGQE

SEQ ID NO: 7711 - protein, 143 aa, Homo sapiens
MQHRGFLLLTLLALLALTSAVAKKKDKVKKGGPGSECAEWAWGPCTPSSKDCGVGFREGTCGAQTQRIRCRVPCNWKKEFGADCKYKFENWGACDGGTGTKVRQGTLKKARYNAQCQETIRVTKPCTPKTKAKAKAKKGKGKD

SEQ ID NO: 7712 - protein, 61 aa, Homo sapiens
MAAEADGPLKRLLVPILLPEKCYDQLFVQWDLLHVPCLKILLSKGLGLGIVAGSLLAAPGV

SEQ ID NO: 7713 - protein, 55 aa, Homo sapiens
MASVGECPAPVPVKDKKLLEVKLGELPSWILMRDFSPSGIFGAFQREHERLRKYH

SEQ ID NO: 7714 - protein, 477 aa, Homo sapiens
MSSWIRWHGPAMARLWGFCWLVVGFWRAAFACPTSCKCSASRIWCSDPSPGIVAFPRLEPNSVDPENITEIFIANQKRLEIINEDDVEAYVGLRNLTIVDSGLKFVAHKAFLKNSNLQHINFTRNKLTSLSRKHFRHLDLSELILVGNPFTCSCDIMWIKTLQEAKSSPDTQDLYCLNESSKNIPLANLQIPNCGLPSANLAAPNLTVEEGKSITLSCSVAGDPVPNMYWDVGNLVSKHMNETSHTQGSLRITNISSDDSGKQISCVAENLVGEDQDSVNLTVHFAPTITFLESPTSDHHWCIPFTVKGNPKPALQWFYNGAILNESKYICTKIHVTNHTEYHGCLQLDNPTHMNNGDYTLIAKNEYGKDEKQISAHFMGWPGIDDGANPNYPDVIYEDYGTAANDIGDTTNRSNEIPSTDVTDKTGREHLSVYAVVVIASVVGFCLLVMLFLLKLARHSKFGMKGFVLFHKIPLDG

SEQ ID NO: 7715 - protein, 151 aa, Homo sapiens
MSKNTVSSARFRKVDVDEYDENKFVDEEDGGDGQAGPDEGEVDSCLRQGNMTAALQAALKNPPINTKSQAVKDRAGSIVLKVLISFKANDIEKAVQSLDKNGVDLLMKYIYKGFESPSDNSSAMLLQWHEKALAAGGVGSIVRVLTARKTV

SEQ ID NO: 7716 - protein, 1142 aa, Homo sapiens
MKEPLLGGECDKAVASQLGLLDEIKTEPDNAQEYCHRQQSRTQENELKINAVFSESASQLTAGIQLSLASSGVNKMLPSVSTTAIQVSCAGCKKILQKGQTAYQRKGSAQLFCSIPCITEYISSASSPVPSKRTCSNCSKDILNPKDVISVQLEDTTSCKTFCSLSCLSSYEEKRKPFVTICTNSILTKCSMCQKTAIIQYEVKYQNVKHNLCSNACLSKFHSANNFIMNCCENCGTYCYTSSSLSHILQMEGQSHYFNSSKSITAYKQKPAKPLISVPCKPLKPSDEMIETTSDLGKTELFCSINCFSAYSKAKMESSSVSVVSVVHDTSTELLSPKKDTTPVISNIVSLADTDVALPIMNTDVLQDTVSSVTATADVIVDLSKSSPSEPSNAVASSSTEQPSVSPSSSVFSQHAIGSSTEVQKDNMKSMKISDELCHPKCTSKVQKVKGKSRSIKKSCCADFECLENSKKDVAFCYSCQLFCQKYFSCGRESFATHGTSNWKKTLEKFRKHEKSEMHLKSLEFWREYQFCDGAVSDDLSIHSKQIEGNKKYLKLIIENILFLGKQCLPLRGNDQSVSSVNKGNFLELLEMRAKDKGEETFRLMNSQVDFYNSTQIQSDIIEIIKTEMLQDIVNEINDSSAFSIICDETINSAMKEQLSICVRYPQKSSKAILIKERFLGFVDTEEMTGTHLHRTIKTYLQQIGVDMDKIHGQAYDSTTNLKIKFNKIAAEFKKEEPRALYIHCYAHFLDLSIIRFCKEVKELRSALKTLSSLFNTICMSGEMLANFRNIYRLSQNKTCKKHISQSCWTVHDRTLLSVIDSLPEIIETLEVIASHSSNTSFADELSHLLTLVSKFEFVFCLKFLYRVLSVTGILSKELQNKTIDIFSLSSKIEAILECLSSERNDVYFKTIWDGTEEICQKITCKGFKVEKPSLQKRRKIQKSVDLGNSDNMFFPTSTEEQYKINIYYQGLDTILQNLKLCFSEFDYCKIKQISELLFKWNEPLNETTAKHVQEFYKLDEDIIPELRFYRHYAKLNFVIDDSCINFVSLGCLFIQHGLHSNIPCLSKLLYIALSWPITSASTENSFSTLPRLKTYLCNTMGQEKLTGPALMAVEQELVNKLMEPERLNEIVEKFISQMKEI

SEQ ID NO: 7717 - protein, 322 aa, Homo sapiens
MALPPGPAALRHTLLLLPALLSSGWGELEPQIDGQTWAERALRENERHAFTCRVAGGPGTPRLAWYLDGQLQEASTSRLLSVGGEAFSGGTSTFTVTAHRAQHELNCSLQDPRSGRSANASVILNVQFKPEIAQVGAKYQEAQGPGLLVVLFALVRANPPANVTWIDQDGPVTVNTSDFLVLDAQNYPWLTNHTVQLQLRSLAHNLSVVATNDVGVTSASLPAPGPSRHPSLISSDSNNLKLNNVRLPRENMSLPSNLQLNDLTPDSRAVKPADRQMAQNNSRPELLDPEPGGLLTSQGFIRLPVLGYIYRVSSVSSDEIWL

SEQ ID NO: 7718 - protein, 3859 aa, Homo sapiens
MAFVATQGATVVDQTTLMKKYLQFVAALTDVNTPDETKLKMMQEVSENFENVTSSPQYSTFLEHIIPRFLTFLQDGEVQFLQEKPAQQLRKLVLEIIHRIPTNEHLRPHTKNVLSVMFRFLETENEENVLICLRIIIELHKQFRPPITQEIHHFLDFVKQIYKELPKVVNRYFENPQVIPENTVPPPEMVGMITTIAVKVNPEREDSETRTHSIIPRGSLSLKVLAELPIIVVLMYQLYKLNIHNVVAEFVPLIMNTIAIQVSAQARQHKLYNKELYADFIAAQIKTLSFLAYIIRIYQELVTKYSQQMVKGMLQLLSNCPAETAHLRKELLIAAKHILTTELRNQFIPCMDKLFDESILIGSGYTARETLRPLAYSTLADLVHHVRQHLPLSDLSLAVQLFAKNIDDESLPSSIQTMSCKLLLNLVDCIRSKSEQESGNGRDVLMRMLEVFVLKFHTIARYQLSAIFKKCKPQSELGAVEAALPGVPTAPAAPGPAPSPAPVPAPPPPPPPPPPATPVTPAPVPPFEKQGEKDKEDKQTFQVTDCRSLVKTLVCGVKTITWGITSCKAPGEAQFIPNKQLQPKETQIYIKLVKYAMQALDIYQVQIAGNGQTYIRVANCQTVRMKEEKEVLEHFAGVFTMMNPLTFKEIFQTTVPYMVERISKNYALQIVANSFLANPTTSALFATILVEYLLDRLPEMGSNVELSNLYLKLFKLVFGSVSLFAAENEQMLKPHLHKIVNSSMELAQTAKEPYNYFLLLRALFRSIGGGSHDLLYQEFLPLLPNLLQGLNMLQSGLHKQHMKDLFVELCLTVPVRLSSLLPYLPMLMDPLVSALNGSQTLVSQGLRTLELCVDNLQPDFLYDHIQPVRAELMQALWRTLRNPADSISHVAYRVLGKFGGSNRKMLKESQKLHYVVTEVQGPSITVEFSDCKASLQLPMEKAIETALDCLKSANTEPYYRRQAWEVIKCFLVAMMSLEDNKHALYQLLAHPNFTEKTIPNVIISHRYKAQDTPARKTFEQALTGAFMSAVIKDLRPSALPFVASLIRHYTMVAVAQQCGPFLLPCYQVGSQPSTAMFHSEENGSKGMDPLVLIDAIAICMAYEEKELCKIGEVALAVIFDVASIILGSKERACQLPLFSYIVERLCACCYEQAWYAKLGGVVSIKFLMERLPLTWVLQNQQTFLKALLFVMMDLTGEVSNGAVAMAKTTLEQLLMRCATPLKDEERAEEIVAAQEKSFHHVTHDLVREVTSPNSTVRKQAMHSLQVLAQVTGKSVTVIMEPHKEVLQDMVPPKKHLLRHQPANAQIGLMEGNTFCTTLQPRLFTMDLNVVEHKVFYTELLNLCEAEDSALTKLPCYKSLPSLVPLRIAALNALAACNYLPQSREKIIAALFKALNSTNSELQEAGEACMRKFLEGATIEVDQIHTHMRPLLMMLGDYRSLTLNVVNRLTSVTRLFPNSFNDKFCDQMMQHLRKWMEVVVITHKGGQRSDGNESISECGRCPLSPFCQFEEMKICSAIINLFHLIPAAPQTLVKPLLEVVMKTERAMLIEAGSPFREPLIKFLTRHPSQTVELFMMEATLNDPQWSRMFMSFLKHKDARPLRDVLAANPNRFITLLLPGGAQTAVRPGSPSTSTMRLDLQFQAIKIISIIVKNDDSWLASQHSLVSQLRRVWVSENFQERHRKENMAATNWKEPKLLAYCLLNYCKRNYGDIELLFQLLRAFTGRFLCNMTFLKEYMEEEIPKNYSIAQKRALFFRFVDFNDPNFGDELKAKVLQHILNPAFLYSFEKGEGEQLLGPPNPEGDNPESITSVFITKVLDPEKQADMLDSLRIYLLQYATLLVEHAPHHIHDNNKNRNSKLRRLMTFAWPCLLSKACVDPACKYSGHLLLAHIIAKFAIHKKIVLQVFHSLLKAHAMEARAIVRQAMAILTPAVPARMEDGHQMLTHWTRKIIVEEGHTVPQLVHILHLIVQHFKVYYPVRHHLVQHMVSAMQRLGFTPSVTIEQRRLAVDLSEVVIKWELQRIKDQQPDSDMDPNSSGEGVNSVSSSIKRGLSVDSAQEVKRFRTATGAISAVFGRSQSLPGADSLLAKPIDKQHTDTVVNFLIRVACQVNDNTNTAGSPGEVLSRRCVNLLKTALRPDMWPKSELKLQWFDKLLMTVEQPNQVNYGNICTGLEVLSFLLTVLQSPAILSSFKPLQRGIAACMTCGNTKVLRAVHSLLSRLMSIFPTEPSTSSVASKYEELECLYAAVGKVIYEGLTNYEKATNANPSQLFGTLMILKSACSNNPSYIDRLISVFMRSLQKMVREHLNPQAASGSTEATSGTSELVMLSLELVKTRLAVMSMEMRKNFIQAILTSLIEKSPDAKILRAVVKIVEEWVKNNSPMAANQTPTLREKSILLVKMMTYIEKRFPEDLELNAQFLDLVNYVYRDETLSGSELTAKLEPAFLSGLRCAQPLIRAKFFEVFDNSMKRRVYERLLYVTCSQNWEAMGNHFWIKQCIELLLAVCEKSTPIGTSCQGAMLPSITNVINLADSHDRAAFAMVTHVKQEPRERENSESKEEDVEIDIELAPGDQTSTPKTKELSEKDIGNQLHMLTNRHDKFLDTLREVKTGALLSAFVQLCHISTTLAEKTWVQLFPRLWKILSDRQQHALAGEISPFLCSGSHQVQRDCQPSALNCFVEAMSQCVPPIPIRPCVLKYLGKTHNLWFRSTLMLEHQAFEKGLSLQIKPKQTTEFYEQESITPPQQEILDSLAELYSLLQEEDMWAGLWQKRCKYSETATAIAYEQHGFFEQAQESYEKAMDKAKKEHERSNASPAIFPEYQLWEDHWIRCSKELNQWEALTEYGQSKGHINPYLVLECAWRVSNWTAMKEALVQVEVSCPKEMAWKVNMYRGYLAICHPEEQQLSFIERLVEMASSLAIREWRRLPHVVSHVHTPLLQAAQQIIELQEAAQINAGLQPTNLGRNNSLHDMKTVVKTWRNRLPIVSDDLSHWSSIFMWRQHHYQGKPTWSGMHSSSIVTAYENSSQHDPSSNNAMLGVHASASAIIQYGKIARKQGLVNVALDILSRIHTIPTVPIVDCFQKIRQQVKCYLQLAGVMGKNECMQGLEVIESTNLKYFTKEMTAEFYALKGMFLAQINKSEEANKAFSAAVQMHDVLVKAWAMWGDYLENIFVKERQLHLGVSAITCYLHACRHQNESKSRKYLAKVLWLLSFDDDKNTLADAVDKYCIGVPPIQWLAWIPQLLTCLVGSEGKLLLNLISQVGRVYPQAVYFPIRTLYLTLKIEQRERYKSDPGPIRATAPMWRCSRIMHMQRELHPTLLSSLEGIVDQMVWFRENWHEEVLRQLQQGLAKCYSVAFEKSGAVSDAKITPHTLNFVKKLVSTFGVGLENVSNVSTMFSSAASESLARRAQATAQDPVFQKLKGQFTTDFDFSVPGSMKLHNLISKLKKWIKILEAKTKQLPKFFLIEEKCRFLSNFSAQTAEVEIPGEFLMPKPTHYYIKIARFMPRVEIVQKHNTAARRLYIRGHNGKIYPYLVMNDACLTESRREERVLQLLRLLNPCLEKRKETTKRHLFFTVPRVVAVSPQMRLVEDNPSSLSLVEIYKQRCAKKGIEHDNPISRYYDRLATVQARGTQASHQVLRDILKEVQSNMVPRSMLKEWALHTFPNATDYWTFRKMFTIQLALIGFAEFVLHLNRLNPEMLQIAQDTGKLNVAYFRFDINDATGDLDANRPVPFRLTPNISEFLTTIGVSGPLTASMIAVARCFAQPNFKVDGILKTVLRDEIIAWHKKTQEDTSSPLSAAGQPENMDSQQLVSLVQKAVTAIMTRLHNLAQFEGGESKVNTLVAAANSLDNLCRMDPAWHPWL

SEQ ID NO: 7719 - protein, 102 aa, Homo sapiens
MADFLKGLPVYNKSNFSRFHADSVCKASNRRPSVYLPTREYPSEQIIVTEKTNILLRYLHQQWDKKNAAKKRDQEQVELEGESSAPPRKVARTDSPDMHEDT

SEQ ID NO: 7720 - protein, 416 aa, Homo sapiens
MELRVGNKYRLGRKIGSGSFGDIYLGANIASGEEVAIKLECVKTKHPQLHIESKFYKMMQGGVGIPSIKWCGAEGDYNVMVMELLGPSLEDLFNFCSRKFSLKTVLLLADQMISRIEYIHSKNFIHRDVKPDNFLMGLGKKGNLVYIIDFGLAKKYRDARTHQHIPYRENKNLTGTARYASINTHLGIEQSRRDDLESLGYVLMYFNLGSLPWQGLKAATKRQKYERISEKKMSTPIEVLCKGYPSEFSTYLNFCRSLRFDDKPDYSYLRQLFRNLFHRQGFSYDYVFDWNMLKFGAARNPEDVDRERREHEREERMGQLRGSATRALPPGPPTGATANRLRSAAEPVASTPASRIQPAGNTSPRAISRVDRERKVSMRLHRGAPANVSSSDLTGRQEVSRIPASQTSVPFDHLGK

SEQ ID NO: 7721 - protein, 1094 aa, Homo sapiens
MKIATVSVLLPLALCLIQDAASKNEDQEMCHEFQAFMKNGKLFCPQDKKFFQSLDGIMFINKCATCKMILEKEAKSQKRARHLARAPKATAPTELNCDDFKKGERDGDFICPDYYEAVCGTDGKTYDNRCALCAENAKTGSQIGVKSEGECKSSNPEQDVCSAFRPFVRDGRLGCTRENDPVLGPDGKTHGNKCAMCAELFLKEAENAKREGETRIRRNAEKDFCKEYEKQVRNGRLFCTRESDPVRGPDGRMHGNKCALCAEIFKQRFSEENSKTDQNLGKAEEKTKVKREIVKLCSQYQNQAKNGILFCTRENDPIRGPDGKMHGNLCSMCQAYFQAENEEKKKAEARARNKRESGKATSYAELCSEYRKLVRNGKLACTRENDPIQGPDGKVHGNTCSMCEVFFQAEEEEKKKKEGKSRNKRQSKSTASFEELCSEYRKSRKNGRLFCTRENDPIQGPDGKMHGNTCSMCEAFFQQEERARAKAKREAAKEICSEFRDQVRNGTLICTREHNPVRGPDGKMHGNKCAMCASVFKLEEEEKKNDKEEKGKVEAEKVKREAVQELCSEYRHYVRNGRLPCTRENDPIEGLDGKIHGNTCSMCEAFFQQEAKEKERAEPRAKVKREAEKETCDEFRRLLQNGKLFCTRENDPVRGPDGKTHGNKCAMCKAVFQKENEERKRKEEEDQRNAAGHGSSGGGGGNTQDECAEYREQMKNGRLSCTRESDPVRDADGKSYNNQCTMCKAKLEREAERKNEYSRSRSNGTGSESGKDTCDEFRSQMKNGKLICTRESDPVRGPDGKTHGNKCTMCKEKLEREAAEKKKKEDEDRSNTGERSNTGERSNDKEDLCREFRSMQRNGKLICTRENNPVRGPYGKMHINKCAMCQSIFDREANERKKKDEEKSSSKPSNNAKDQCRQVQNEAEDAKFRQPGRSLASVARMSTDECSEFRNYIRNNELICPRENDPVHGADGKFYTNKCYMCRAVFLTEALERAKLQEKPSHVRASQEEDSPDSFSSLDSEMCKDYRVLPRIGYLCPKDLKPVCGDDGQTYNNPCMLCHENLIRQTNTHIRSTGKCEESSTPGTTAASMPPSDE

SEQ ID NO: 7722 - protein, 114 aa, Homo sapiens
MFGACYKQPLKPSGSEPPAEECRMTPRHAGCDVTEMQRILSQPTFTEHLLRAVCTKLANMYSTSTDCREHCRRGMKAKQLKAEAGRSCQRKGVPIQTPREHSWISCKKEFEANP

SEQ ID NO: 7723 - protein, 230 aa, Homo sapiens
MRLAGPLRIVVLVVSVGVTWIVVSILLGGPGSGFPRIQQLFTSPESSVTAAPRARKYKCGLPQPCPEEHLAFRVVSGAANVIGPKICLEDKMLMSSVKDNVGRGLNIALVNGVSGELIEARAFDMWAGDVNDLLKFIRPLHEGTLVFVASYDDPATKMNEETRKLFSELGSRNAKELAFRDSWVFVGAKGVQNKSPFEQHVKNSKHSNKYEGWPEALEMEGCIPRRSTAS

SEQ ID NO: 7724 - protein, 439 aa, Homo sapiens
MASDDFDIVIEAMLEAPYKKEEDEQQRKEVKKDYPSNTTSSTSNSGNETSGSSTIGETSKKKRSRSHNKSRDRKRSRSRDRDRYRRRNSRSRSPGRQCRHRSRSWDRRHGSESRSRDHRREDRVHYRSPPLATGYRYGHSKSPHFREKSPVREPVDNLSPEERDARTVFCMQLAARIRPRDLEDFFSAVGKVRDVRIISDRNSRRSKGIAYVEFCEIQSVPLAIGLTGQRLLGVPIIVQASQAEKNRLAAMANNLQKGNGGPMRLYVGSLHFNITEDMLRGIFEPFGKIDNIVLMKDSDTGRSKGYGFITFSDSECARRALEQLNGFELAGRPMRVGHVTERLDGGTDITFPDGDQELDLGSAGGRFQLMAKLAEGAGIQLPSTAAAAAAAAAQAAALQLNGAVPLGALNPAALTALSPALNLASQCFQLSSLFTPQTM

SEQ ID NO: 7725 - protein, 360 aa, Homo sapiens
MQIIRHSEQTLKTALISKNPVLVSQYEKLNAGEQRLMNEAFQPASDLFGPITLHSPSDWITSHPEAPQDFEQFFSDPYRKTPSPNKRSIYIQSIGSLGNTRIISEEYIKWLTGYCKAYFYGLRVKLLEPVPVSVTRCSFRVNENTHNLQIHAGDILKFLKKKKPEDAFCVVGITMIDLYPRDSWNFVFGQASLTDGVGIFSFARYGSDFYSMHYKGKVKKLKKTSSSDYSIFDNYYIPEITSVLLLRSCKTLTHEIGHIFGLRHCQWLACLMQGSNHLEEADRRPLNLCPICLHKLQCAVGFSIVERYKALVRWIDDESSDTPGATPEHSHEDNGNLPKPVEAFKEWKEWIIKCLAVLQK

SEQ ID NO: 7726 - protein, 291 aa, Homo sapiens
MALAALMIALGSLGLHTWQAQAVPILPLGLAPDTFDDTYVGCAEEMEEKAAPLLKEEMAHHALLRESWEAAQETWEDKRRGLTLPPGFKAQNGIAIMVYTNSSNTLYWELNQAVRTGGGSRELYMRHFPFKALHFYLIRALQLLRGSGGCSRGPGEVVFRGVGSLRFEPKRLGDSVRLGQFASSSLDKAVAHRFGNATLFSLTTCFGAPIQAFSVFPKEREVLIPPHEVFLVTRFSQDGAQSLVTLWSYNQTCSHFNCAYLGGEKRRGCVSAPGALGTGDLHMTKRHLQQP

SEQ ID NO: 7727 - protein, 870 aa, Homo sapiens
MGPPSLVLCLLSATVFSLLGGSSAFLSHHRLKGRFQRDRRNIRPNIILVLTDDQDVELGSMQVMNKTRRIMEQGGAHFINAFVTTPMCCPSRSSILTGKYVHNHNTYTNNENCSSPSWQAQHESRTFAVYLNSTGYRTAFFGKYLNEYNGSYVPPGWKEWVGLLKNSRFYNYTLCRNGVKEKHGSDYSKDYLTDLITNDSVSFFRTSKKMYPHRPVLMVISHAAPHGPEDSAPQYSRLFPNASQHITPSYNYAPNPDKHWIMRYTGPMKPIHMEFTNMLQRKRLQTLMSVDDSMETIYNMLVETGELDNTYIVYTADHGYHIGQFGLVKGKSMPYEFDIRVPFYVRGPNVEAGCLNPHIVLNIDLAPTILDIAGLDIPADMDGKSILKLLDTERPVNRFHLKKKMRVWRDSFLVERGKLLHKRDNDKVDAQEENFLPKYQRVKDLCQRAEYQTACEQLGQKWQCVEDATGKLKLHKCKGPMRLGGSRALSNLVPKYYGQGSEACTCDSGDYKLSLAGRRKKLFKKKYKASYVRSRSIRSVAIEVDGRVYHVGLGDAAQPRNLTKRHWPGAPEDQDDKDGGDFSGTGGLPDYSAANPIKVTHRCYILENDTVQCDLDLYKSLQAWKDHKLHIDHEIETLQNKIKNLREVRGHLKKKRPEECDCHKISYHTQHKGRLKHRGSSLHPFRKGLQEKDKVWLLREQKRKKKLRKLLKRLQNNDTCSMPGLTCFTHDNQHWQTAPFWTLGPFCACTSANNNTYWCMRTINETHNFLFCEFATGFLEYFDLNTDPYQLMNAVNTLDRDVLNQLHVQLMELRSCKGYKQCNPRTRNMDLGLKDGGSYEQYRQFQRRKWPEMKRPSSKSLGQLWEGWEG

SEQ ID NO: 7728 - protein, 2078 aa, Homo sapiens
MPWPFSESIKKRACRYLLQRYLGHFLQEKLSLEQLSLDLYQGTGSLAQVPLDKWCLNEILESADAPLEVTEGFIQSISLSVPWGSLLQDNCALEVRGLEMVFRPRPRPATGSEPMYWSSFMTSSMQLAKECLSQKLTDEQGEGSQPFEGLEKFAETIETVLRRVKVTFIDTVLRIEHVPENSKTGTALEIRIERTVYCDETADESSGINVHQPTAFAHKLLQLSGVSLFWDEFSASAKSSPVCSTAPVETEPKLSPSWNPKIIYEPHPQLTRNLPEIAPSDPVQIGRLIGRLELSLTLKQNEVLPGAKLDVDGQIDSIHLLLSPRQVHLLLDMLAAIAGPENSSKIGLANKDRKNRPMQQEDEYRIQMELNRYYLRKDSLSVGVSSEQSFYETETARTPSSREEEVFFSMADMDMSHSLSSLPPLGDPPNMDLELSLTSTYTNTPAGSPLSATVLQPTWGEFLDHHKEQPVRGSTFPSNLVHPTPLQKTSLPSRSVSVDESRPELIFRLAVGTFSISVLHIDPLSPPETSQNLNPLTPMAVAFFTCIEKIDPARFSTEDFKSFRAVFAEACSHDHLRFIGTGIKVSYEQRQRSASRYFSTDMSIGQMEFLECLFPTDFHSVPPHYTELLTFHSKEETGSHSPVCLQLHYKHSENRGPQGNQARLSSVPHKAELQIKLNPVCCELDISIVDRLNSLLQPQKLATVEMMASHMYTSYNKHISLHKAFTEVFLDDSHSPANCRISVQVATPALNLSVRFPIPDLRSDQERGPWFKKSLQKEILYLAFTDLEFKTEFIGGSTPEQIKLELTFRELIGSFQEEKGDPSIKFFHVSSGVDGDTTSSDDFDWPRIVLKINPPAMHSILERIAAEEEEENDGHYQEEEEGGAHSLKDVCDLRRPAPSPFSSRRVMFENEQMVMPGDPVEMTEFQDKAISNSHYVLELTLPNIYVTLPNKSFYEKLYNRIFNDLLLWEPTAPSPVETFENISYGIGLSVASQLINTFNKDSFSAFKSAVHYDEESGSEEETLQYFSTVDPNYRSRRKKKLDSQNKNSQSFLSVLLNINHGLIAVFTDVKQDNGDLLENKHGEFWLEFNSGSLFCVTKYEGFDDKHYICLHSSSFSLYHKGIVNGVILPTETRLPSSTRPHWLEPTIYSSEEDGLSKTSSDGVGGDSLNMLSVAVKILSDKSESNTKEFLIAVGLKGATLQHRMLPSGLSWHEQILYFLNIADEPVLGYNPPTSFTTFHVHLWSCALDYRPLYLPIRSLLTVETFSVSSSVALDKSSSTLRIILDEAALHLSDKCNTVTINLSRDYVRVMDMGLLELTITAVKSDSDGEQTEPRFELHCSSDVVHIRTCSDSCAALMNLIQYIASYGDLQTPNKADMKPGAFQRRSKVDSSGRSSSRGPVLPEADQQMLRDLMSDAMEEIDMQQGTSSVKPQANGVLDEKSQIQEPCCSDLFLFPDESGNVSQESGPTYASFSHHFISDAMTGVPTENDDFCILFAPKAAMQEKEEEPVIKIMVDDAIVIRDNYFSLPVNKTDTSKAPLHFPIPVIRYVVKEVSLVWHLYGGKDFGIVPPTSPAKSYISPHSSPSHTPTRHGRNTVCGGKGRNHDFLMEIQLSKVKFQHEVYPPCKPDCDSSLSEHPVSRQVFIVQDLEIRDRLATSQMNKFLYLYCSKEMPRKAHSNMLTVKALHVCPESGRSPQECCLRVSLMPLRLNIDQDALFFLKDFFTSLSAEVELQMTPDPEVKKSPGADVTCSLPRHLSTSKEPNLVISFSGPKQPSQNDSANSVEVVNGMEEKNFSAEEASFRDQPVFFREFRFTSEVPIRLDYHGKHVSMDQGTLAGILIGLAQLNCSELKLKRLSYRHGLLGVDKLFSYAITEWLNDIKKNQLPGILGGVGPMHSLVQLVQGLKDLVWLPIEQYRKDGRIVRGFQRGAASFGTSTAMAALELTNRMVQTIQAAAETAYDMVSPGTLSIEPKKTKRFPHHRLAHQPVDLREGVAKAYSVVKEGITDTAQTIYETAAREHESRGVTGAVGEVLRQIPPAVVKPLIVATEATSNVLGGMRNQIRPDVRQDESQKWRHGDD

SEQ ID NO: 7729 - protein, 490 aa, Homo sapiens
MRPAFALCLLWQALWPGPGGGEHPTADRAGCSASGACYSLHHATMKRQAAEEACILRGGALSTVRAGAELRAVLALLRAGPGPGGGSKDLLFWVALERRRSHCTLENEPLRGFSWLSSDPGGLESDTLQWVEEPQRSCTARRCAVLQATGGVEPAGWKEMRCHLRANGYLCKYQFEVLCPAPRPGAASNLSYRAPFQLHSAALDFSPPGTEVSALCRGQLPISVTCIADEIGARWDKLSGDVLCPCPGRYLRAGKCAELPNCLDDLGGFACECATGFELGKDGRSCVTSGEGQPTLGGTGVPTRRPPATATSPVPQRTWPIRVDEKLGETPLVPEQDNSVTSIPEIPRWGSQSTMSTLQMSLQAESKATITPSGSVISKFNSTTSSATPQAFDSSSAVVFIFVSTAVVVLVILTMTVLGLVKLCFHESPSSQPRKESMGPPGLESDPEPAALGSSSAHCTNNGVKVGDCDLRDRAEGALLAESPLGSSDA

SEQ ID NO: 7730 - protein, 42 aa, Homo sapiens
MAAMSLLRRVSVTAVAALSGRPLGTRLGFGGFLTRGFPKAAG

SEQ ID NO: 7731 - protein, 1907 aa, Homo sapiens
MAPEPAPGRTMVPLVPALVMLGLVAGAHGDSKPVFIKVPEDQTGLSGGVASFVCQATGEPKPRITWMKKGKKVSSQRFEVIEFDDGAGSVLRIQPLRVQRDEAIYECTATNSLGEINTSAKLSVLEEEQLPPGFPSIDMGPQLKVVEKARTATMLCAAGGNPDPEISWFKDFLPVDPATSNGRIKQLRSGALQIESSEESDQGKYECVATNSAGTRYSAPANLYVRVRRVAPRFSIPPSSQEVMPGGSVNLTCVAVGAPMPYVKWMMGAEELTKEDEMPVGRNVLELSNVVRSANYTCVAISSLGMIEATAQVTVKALPKPPIDLVVTETTATSVTLTWDSGNSEPVTYYGIQYRAAGTEGPFQEVDGVATTRYSIGGLSPFSEYAFRVLAVNSIGRGPPSEAVRARTGEQAPSSPPRRVQARMLSASTMLVQWEPPEEPNGLVRGYRVYYTPDSRRPPNAWHKHNTDAGLLTTVGSLLPGITYSLRVLAFTAVGDGPPSPTIQVKTQQGVPAQPADFQAEVESDTRIQLSWLLPPQERIIMYELVYWAAEDEDQQHKVTFDPTSSYTLEDLKPDTLYRFQLAARSDMGVGVFTPTIEARTAQSTPSAPPQKVMCVSMGSTTVRVSWVPPPADSRNGVITQYSVAYEAVDGEDRGRHVVDGISREHSSWDLVGLEKWTEYRVWVRAHTDVGPGPESSPVLVRTDEDVPSGPPRKVEVEPLNSTAVHVYWKLPVPSKQHGQIRGYQVTYVRLENGEPRGLPIIQDVMLAEAQWRPEESEDYETTISGLTPETTYSVTVAAYTTKGDGARSKPKIVTTTGAVPGRPTMMISTTAMNTALLQWHPPKELPGELLGYRLQYCRADEARPNTIDFGKDDQHFTVTGLHKGTTYIFRLAAKNRAGLGEEFEKEIRTPEDLPSGFPQNLHVTGLTTSTTELAWDPPVLAERNGRIISYTVVFRDINSQQELQNITTDTRFTLTGLKPDTTYDIKVRAWTSKGSGPLSPSIQSRTMPVEQVFAKNFRVAAAMKTSVLLSWEVPDSYKSAVPFKILYNGQSVEVDGHSMRKLIADLQPNTEYSFVLMNRGSSAGGLQHLVSIRTAPDLLPHKPLPASAYIEDGRFDLSMPHVQDPSLVRWFYIVVVPIDRVGGSMLTPRWSTPEELELDELLEAIEQGGEEQRRRRRQAERLKPYVAAQLDVLPETFTLGDKKNYRGFYNRPLSPDLSYQCFVLASLKEPMDQKRYASSPYSDEIVVQVTPAQQQEEPEMLWVTGPVLAVILIILIVIAILLFKRKRTHSPSSKDEQSIGLKDSLLAHSSDPVEMRRLNYQTPGMRDHPPIPITDLADNIERLKANDGLKFSQEYESIDPGQQFTWENSNLEVNKPKNRYANVIAYDHSRVILTSIDGVPGSDYINANYIDGYRKQNAYIATQGPLPETMGDFWRMVWEQRTATVVMMTRLEEKSRVKCDQYWPARGTETCGLIQVTLLDTVELATYTVRTFALHKSGSSEKRELRQFQFMAWPDHGVPEYPTPILAFLRRVKACNPLDAGPMVVHCSAGVGRTGCFIVIDAMLERMKHEKTVDIYGHVTCMRSQRNYMVQTEDQYVFIHEALLEAATCGHTEVPARNLYAHIQKLGQVPPGESVTAMELEFKLLASSKAHTSRFISANLPCNKFKNRLVNIMPYELTRVCLQPIRGVEGSDYINASFLDGYRQQKAYIATQGPLAESTEDFWRMLWEHNSTIIVMLTKLREMGREKCHQYWPAERSARYQYFVVDPMAEYNMPQYILREFKVTDARDGQSRTIRQFQFTDWPEQGVPKTGEGFIDFIGQVHKTKEQFGQDGPITVHCSAGVGRTGVFITLSIVLERMRYEGVVDMFQTVKTLRTQRPAMVQTEDQYQLCYRAALEYLGSFDHYAT

SEQ ID NO: 7732 - protein, 567 aa, Homo sapiens
MEEKTQIKTFLGSKLPKYGTKSVRSTLQPMPNGTPVNLLGTSKNSNVKSYIKNNGSDCPSSHSFNWRKANKYQLCAQGVEEPNNTQNSHDKIIDPEKRVPTQGMFDKNGIKGGLKSVSLFTSKLAKPSTMFVSSTEELNQKSFSGPSNLGKFTKGTLLGRTSYSSINTPKSQLNGFYGNRSAGSMQRPRANSCATRSSSGESLAQSPDSSKSINCEKMVRSQSFSHSIQNSFLPPSSITRSHSFNRAVDLTKPYQNQQLSIRVPLRSSMLTRNSRQPEVLNGNEHLGYGFNRPYAAGGKKLALPNGPGVTSTLGYRMVHPSLLKSSRSPFSGTMTVDGNKNSPADTCVEEDATVLAKDRAANKDQELIENESYRTKNNQTMKHDAKMRYLSDDVDDISLSSLSSSDKNDLSEDFSDDFIDIEDSNRTRITPEEMSLKEEKHENGPPQDMFDSPKENEKAFSKTDEWIDISVSDRSECTKHTSGNNLVSPDTDYRAGSSFELSPSDSSDGTYMWDEEGLEPIGNVHPVGSYESSEMNSIVCMDLYTLGIFCLPYYRETCDMIDFVKNL

SEQ ID NO: 7733 - protein, 389 aa, Homo sapiens
MQGAQEASASEMLPLLLPLLWAGALAQERRFQLEGPESLTVQEGLCVLVPCRLPTTLPASYYGYGYWFLEGADVPVATNDPDEEVQEETRGRFHLLWDPRRKNCSLSIRDARRRDNAAYFFRLKSKWMKYGYTSSKLSVRVMALTHRPNISIPGTLESGHPSNLTCSVPWVCEQGTPPIFSWMSAAPTSLGPRTTQSSVLTITPRPQDHSTNLTCQVTFPGAGVTMERTIQLNVSWMLRRPPLSTPDAPQKVAISIFQGNSAAFKILQNTSSLPVLEGQALRLLCDADGNPPAHLSWFQGFPALNATPISNTGVLELPQVGSAEEGDFTCRAQHPLGSLQISLSLFVHWKPEGRAGGVLGAVWGASITTLVFLCVCFIFRVISTSSRQA

SEQ ID NO: 7734 - protein, 221 aa, Homo sapiens
MSYGRPPPDVEGMTSLKVDNLTYRTSPDTLRRVFEKYGRVGDVYIPRDRYTKESRGFAFVRFHDKRDAEDAMDAMDGAVLDGRELRVQMARYGRPPDSHHSRRGPPPRRYGGGGYGRRSRSPRRRRRSRSRSRSRSRSRSRSRYSRSKSRSRTRSRSRSTSKSRSARRSKSKSSSVSRSRSRSRSRSRSRSPPPVSKRESKSRSRSKSPPKSPEEEGAVSS

SEQ ID NO: 7735 - protein, 1176 aa, Homo sapiens
MALARPGTPDPQALASVLLLLLWAPALSLLAGTVPSEPPSACASDPCAPGTECQATESGGYTCGPMEPRGCATQPCHHGALCVPQGPDPTGFRCYCVPGFQGPRCELDIDECASRPCHHGATCRNLADRYECHCPLGYAGVTCEMEVDECASAPCLHGGSCLDGVGSFRCVCAPGYGGTRCQLDLDECQSQPCAHGGTCHDLVNGFRCDCAGTGYEGTHCEREVLECASAPCEHNASCLEGLGSFRCLCWPGYSGELCEVDEDECASSPCQHGGRCLQRSDPALYGGVQAAFPGAFSFRHAAGFLCHCPPGFEGADCGVEVDECASRPCLNGGHCQDLPNGFQCHCPDGYAGPTCEEDVDECLSDPCLHGGTCSDTVAGYICRCPETWGGRDCSVQLTGCQGHTCPLAATCIPIFESGVHSYVCHCPPGTHGPFCGQNTTFSVMAGSPIQASVPAGGPLGLALRFRTTLPAGTLATRNDTKESLELALVAATLQATLWSYSTTVLVLRLPDLALNDGHWHQVEVVLHLATLELRLWHEGCPARLCVASGPVALASTASATPLPAGISSAQLGDATFAGCLQDVRVDGHLLLPEDLGENVLLGCERREQCRPLPCVHGGSCVDLWTHFRCDCARPHRGPTCADEIPAATFGLGGAPSSASFLLQELPGPNLTVSFLLRTRESAGLLLQFANDSAAGLTVFLSEGRIRAEVPGSPAVVLPGRWDDGLRHLVMLSFGPDQLQDLGQHVHVGGRLLAADSQPWGGPFRGCLQDLRLDGCHLPFFPLPLDNSSQPSELGGRQSWNLTAGCVSEDMCSPDPCFNGGTCLVTWNDFHCTCPANFTGPTCAQQLWCPGQPCLPPATCEEVPDGFVCVAEATFREGPPAAFSGHNASSGRLLGGLSLAFRTRDSEAWLLRAAAGALEGVWLAVRNGSLAGGVRGGHGLPGAVLPIPGPRVADGAWHRVRLAMERPAATTSRWLLWLDGAATPVALRGLASDLGFLQGPGAVRILLAENFTGCLGRVALGGLPLPLARPRPGAAPGAREHFASWPGTPAPILGCRGAPVCAPSPCLHDGACRDLFDAFACACGPGWEGPRCEAHVDPCHSAPCARGRCHTHPDGRFECRCPPGFGGPRCRWDGWAGGWAANAPWGYGGAEKSARSVDESLPFPGPHVLICDMRRTV

SEQ ID NO: 7736 - protein, 117 aa, Homo sapiens
MQKSCEENEGKPQNMPKAEEDRPLEDVPQEAEGNPQPSEEGVSQEAEGNPRGGPNQPGQGFKEDTPVRHLDPEEMIRGVDELERLREEIRRVRNKFVMMHWKQRHSRSRPYPVCFRP

SEQ ID NO: 7737 - protein, 355 aa, Homo sapiens
MASRWGPLIGLAPCCLWLLGAVLLMDASARPANHSSTRERVANREENEILPPDHLNGVKLEMDGHLNRGFHQEVFLGKDLGGFDEDAEPRRSRRKLMVIFSKVDVNTDRKISAKEMQRWIMEKTAEHFQEAMEESKTHFRAVDPDGDGHVSWDEYKVKFLASKGHSEKEVADAIRLNEELKVDEETQEVLENLKDRWYQADSPPADLLLTEEEFLSFLHPEHSRGMLRFMVKEIVRDLDQDGDKQLSVPEFISLPVGTVENQQGQDIDDNWVKDRKKEFEELIDSNHDGIVTAEELESYMDPMNEYNALNEAKQMIAVADENQNHHLEPEEVLKYSEFFTGSKLVDYARSVHEEF

SEQ ID NO: 7738 - protein, 266 aa, Homo sapiens
MVCLKLPGGSCMTALTVTLMVLSSPLALSGDTRPRFLWQPKRECHFFNGTERVRFLDRYFYNQEESVRFDSDVGEFRAVTELGRPDAEYWNSQKDILEQARAAVDTYCRHNYGVVESFTVQRRVQPKVTVYPSKTQPLQHHNLLVCSVSGFYPGSIEVRWFLNGQEEKAGMVSTGLIQNGDWTFQTLVMLETVPRSGEVYTCQVEHPSVTSPLTVEWRARSESAQSKMLSGVGGFVLGLLFLGAGLFIYFRNQKGHSGLQPTGFLS

SEQ ID NO: 7739 - protein, 1169 aa, Homo sapiens
MARQPPPPWVHAAFLLCLLSLGGAIEIPMDLTQPPTITKQSAKDHIVDPRDNILIECEAKGNPAPSFHWTRNSRFFNIAKDPRVSMRRRSGTLVIDFRSGGRPEEYEGEYQCFARNKFGTALSNRIRLQVSKSPLWPKENLDPVVVQEGAPLTLQCNPPPGLPSPVIFWMSSSMEPITQDKRVSQGHNGDLYFSNVMLQDMQTDYSCNARFHFTHTIQQKNPFTLKVLTNHPYNDSSLRNHPDMYSARGVAERTPSFMYPQGTASSQMVLRGMDLLLECIASGVPTPDIAWYKKGGDLPSDKAKFENFNKALRITNVSEEDSGEYFCLASNKMGSIRHTISVRVKAAPYWLDEPKNLILAPGEDGRLVCRANGNPKPTVQWMVNGEPLQSAPPNPNREVAGDTIIFRDTQISSRAVYQCNTSNEHGYLLANAFVSVLDVPPRMLSPRNQLIRVILYNRTRLDCPFFGSPIPTLRWFKNGQGSNLDGGNYHVYENGSLEIKMIRKEDQGIYTCVATNILGKAENQVRLEVKDPTRIYRMPEDQVARRGTTVQLECRVKHDPSLKLTVSWLKDDEPLYIGNRMKKEDDSLTIFGVAERDQGSYTCVASTELDQDLAKAYLTVLGRPDRPRDLELTDLAERSVRLTWIPGDANNSPITDYVVQFEEDQFQPGVWHDHSKYPGSVNSAVLRLSPYVNYQFRVIAINEVGSSHPSLPSERYRTSGAPPESNPGDVKGEGTRKNNMEITWTPMNATSAFGPNLRYIVKWRRRETREAWNNVTVWGSRYVVGQTPVYVPYEIRVQAENDFGKGPEPESVIGYSGEDYPRAAPTEVKVRVMNSTAISLQWNRVYSDTVQGQLREYRAYYWRESSLLKNLWVSQKRQQASFPGDRLRGVVSRLFPYSNYKLEMVVVNGRGDGPRSETKEFTTPEGVPSAPRRFRVRQPNLETINLEWDHPEHPNGIMIGYTLKYVAFNGTKVGKQIVENFSPNQTKFTVQRTDPVSRYRFTLSARTQVGSGEAVTEESPAPPNEAYTNNQADIATQGWFIGLMCAIALLVLILLIVCFIKRSRGGKYPVREKKDVPLGPEDPKEEDGSFDYSDEDNKPLQGSQTSLDGTIKQQESDDSLVDYGEGGEGQFNEDGSFIGQYTVKKDKEETEGNESSEATSPVNAIYSLA

SEQ ID NO: 7740 - protein, 361 aa, Homo sapiens
MSKQQPTQFINPETPGYVGFANLPNQVHRKSVKKGFEFTLMVVGESGLGKSTLINSLFLTDLYPERVIPGAAEKIERTVQIEASTVEIEERGVKLRLTVVDTPGYGDAINCRDCFKTIISYIDEQFERYLHDESGLNRRHIIDNRVHCCFYFISPFGHGLKPLDVAFMKAIHNKVNIVPVIAKADTLTLKERERLKKRILDEIEEHNIKIYHLPDAESDEDEDFKEQTRLLKASIPFSVVGSNQLIEAKGKKVRGRLYPWGVVEVENPEHNDFLKLRTMLITHMQDLQEVTQDLHYENFRSERLKRGGRKVENEDMNKDQILLEKEAELRRMQEMIARMQAQMQMQMQGGDGDGGALGHHV

SEQ ID NO: 7741 - protein, 737 aa, Homo sapiens
MGGCTVKPQLLLLALVLHPWNPCLGADSEKPSSIPTDKLLVITVATKESDGFHRFMQSAKYFNYTVKVLGQGEEWRGGDGINSIGGGQKVRLMKEVMEHYADQDDLVVMFTECFDVIFAGGPEEVLKKFQKANHKVVFAADGILWPDKRLADKYPVVHIGKRYLNSGGFIGYAPYVNRIVQQWNLQDNDDDQLFYTKVYIDPLKREAINITLDHKCKIFQTLNGAVDEVVLKFENGKARAKNTFYETLPVAINGNGPTKILLNYFGNYVPNSWTQDNGCTLCEFDTVDLSAVDVHPNVSIGVFIEQPTPFLPRFLDILLTLDYPKEALKLFIHNKEVYHEKDIKVFFDKAKHEIKTIKIVGPEENLSQAEARNMGMDFCRQDEKCDYYFSVDADVVLTNPRTLKILIEQNRKIIAPLVTRHGKLWSNFWGALSPDGYYARSEDYVDIVQGNRVGVWNVPYMANVYLIKGKTLRSEMNERNYFVRDKLDPDMALCRNAREMGVFMYISNRHEFGRLLSTANYNTSHYNNDLWQIFENPVDWKEKYINRDYSKIFTENIVEQPCPDVFWFPIFSEKACDELVEEMEHYGKWSGGKHHDSRISGGYENVPTDDIHMKQVDLENVWLHFIREFIAPVTLKVFAGYYTKGFALLNFVVKYSPERQRSLRPHHDASTFTINIALNNVGEDFQGGGCKFLRYNCSIESPRKGWSFMHPGRLTHLHEGLPVKNGTRYIAVSFIDP

SEQ ID NO: 7742 - protein, 97 aa, Homo sapiens
MVFVRRPWPALTTVLLALLVCLGALVDAYPIKPEAPREDASPEELNRYYASLRHYLNLVTRQRYGKRDGPDTLLSKTFFPDGEDRPVRSRSEGPDLW

SEQ ID NO: 7743 - protein, 760 aa, Homo sapiens
MMDQARSAFSNLFGGEPLSYTRFSLARQVDGDNSHVEMKLAVDEEENADNNTKANVTKPKRCSGSICYGTIAVIVFFLIGFMIGYLGYCKGVEPKTECERLAGTESPVREEPGEDFPAARRLYWDDLKRKLSEKLDSTDFTGTIKLLNENSYVPREAGSQKDENLALYVENQFREFKLSKVWRDQHFVKIQVKDSAQNSVIIVDKNGRLVYLVENPGGYVAYSKAATVTGKLVHANFGTKKDFEDLYTPVNGSIVIVRAGKITFAEKVANAESLNAIGVLIYMDQTKFPIVNAELSFFGHAHLGTGDPYTPGFPSFNHTQFPPSRSSGLPNIPVQTISRAAAEKLFGNMEGDCPSDWKTDSTCRMVTSESKNVKLTVSNVLKEIKILNIFGVIKGFVEPDHYVVVGAQRDAWGPGAAKSGVGTALLLKLAQMFSDMVLKDGFQPSRSIIFASWSAGDFGSVGATEWLEGYLSSLHLKAFTYINLDKAVLGTSNFKVSASPLLYTLIEKTMQNVKHPVTGQFLYQDSNWASKVEKLTLDNAAFPFLAYSGIPAVSFCFCEDTDYPYLGTTMDTYKELIERIPELNKVARAAAEVAGQFVIKLTHDVELNLDYERYNSQLLSFVRDLNQYRADIKEMGLSLQWLYSARGDFFRATSRLTTDFGNAEKTDRFVMKKLNDRVMRVEYHFLSPYVSPKESPFRHVFWGSGSHTLPALLENLKLRKQNNGAFNETLFRNQLALATWTIQGAANALSGDVWDIDNEF

SEQ ID NO: 7744 - protein, 400 aa, Homo sapiens
MATLLLLLGVLVVSPDALGSTTAVQTPTSGEPLVSTSEPLSSKMYTTSITSDPKADSTGDQTSALPPSTSINEGSPLWTSIGASTGSPLPEPTTYQEVSIKMSSVPQETPHATSHPAVPITANSLGSHTVTGGTITTNSPETSSRTSGAPVTTAASSLETSRGTSGPPLTMATVSLETSKGTSGPPVTMATDSLETSTGTTGPPVTMTTGSLEPSSGASGPQVSSVKLSTMMSPTTSTNASTVPFRNPDENSRGMLPVAVLVALLAVIVLVALLLLWRRRQKRRTGALVLSRGGKRNGVVDAWAGPAQVPEEGAVTVTVGGSGGDKGSGFPDGEGSSRRPTLTTFFGRRKSRQGSLAMEELKSGSGPSLKGEEEPLVASEDGAVDAPAPDEPEGGDGAAP

SEQ ID NO: 7745 - protein, 180 aa, Homo sapiens
LRRRFGDVFSLQLAWTPVVVLNGLAAVREALVTHGEDTADRPPVPITQILGFGPRSQGRPFRPNGLLDKAVSNVIASLTCGRRFEYDDPRFLRLLDLAQEGLKEESGFLREVLNAVPVLLHIPALAGKVLRFQKAFLTQLDELLTEHRMTWDPAQPPRDLTEAFLAEMEKWWLTCSLPGW

SEQ ID NO: 7746 - protein, 300 aa, Homo sapiens
MQSDDVIWDTLGNKQFCSFKIRTKTQSFCRNEYSLTGLCNRSSCPLANSQYATIKEEKGQCYLYMKVIERAAFPRRLWERVRLSKNYEKALEQIDENLIYWPRFIRHKCKQRFTKITQYLIRIRKLTLKRQRKLVPLSKKVERREKRREEKALIAAQLDNAIEKELLERLKQDTYGDIYNFPIHAFDKALEQQEAESDSSDTEEKDDDDDDEEDVGKREFVEDGEVDESDISDFEDMDKLDASSDEDQDGKSSSEEEEEKALSAKHKGKMPLRGPLQRKRAYVEIEYEQETEPVAKAKTT

SEQ ID NO: 7747 - protein, 299 aa, Homo sapiens
MWLPWALLLLWVPGCFALSKCRTVAGPVGGSLSVQCPYEKEHRTLNKYWCRPPQIFLCDKIVETKGSAGKRNGRVSIRDSPANLSFTVTLENLTEEDAGTYWCGVDTPWLRDFHDPVVEVEVSVFPASTSMTPASITAAKTSTITTAFPPVSSTTLFAVGATHSASIQEETEEVVNSQLPLLLSLLALLLLLLVGASLLAWRMFQKWIKAGDHSELSQNPKQAATQSELHYANLELLMWPLQEKPAPPREVEVEYSTVASPREELHYASVVFDSNTNRIAAQRPREEEPDSDYSVIRKT

SEQ ID NO: 7748 - protein, 680 aa, Homo sapiens
MVSWGRFICLVVVTMATLSLARPSFSLVEDTTLEPEDAISSGDDEDDTDGAEDFVSENSNNKRAPYWTNTEKMEKRLHAVPAANTVKFRCPAGGNPMPTMRWLKNGKEFKQEHRIGGYKVRNQHWSLIMESVVPSDKGNYTCVVENEYGSINHTYHLDVVERSPHRPILQAGLPANASTVVGGDVEFVCKVYSDAQPHIQWIKHVEKNGSKYGPDGLPYLKVLKHSGINSSNAEVLALFNVTEADAGEYICKVSNYIGQANQSAWLTVLPKQQAPGREKEITASPDYLEIAIYCIGVFLIACMVVTVILCRMKNTTKKPDFSSQPAVHKLTKRIPLRRQVTVSAESSSSMNSNTPLVRITTRLSSTADTPMLAGVSEYELPEDPKWEFPRDKLTLGKPLGEGCFGQVVMAEAVGIDKDKPKEAVTVAVKMLKDDATEKDLSDLVSEMEMMKMIGKHKNIINLLGACTQDGPLYVIVEYASKGNLREYLRARRPPGMEYSYDINRVPEEQMTFKDLVSCTYQLARGMEYLASQKCIHRDLAARNVLVTENNVMKIADFGLARDINNIDYYKKTTNGRLPVKWMAPEALFDRVYTHQSDVWSFGVLMWEIFTLGGSPYPGIPVEELFKLLKEGHRMDKPANCTNELYMMMRDCWHAVPSQRPTFKQLVEDLDRILTLTTNEI

SEQ ID NO: 7749 - protein, 377 aa, Homo sapiens
MRRLNRKKTLSLVKELDAFPKVPESYVETSASGGTVSLIAFTTMALLTIMEFSVYQDTWMKYEYEVDKDFSSKLRINIDITVAMKCQYVGADVLDLAETMVASADGLVYEPTVFDLSPQQKEWQRMLQLIQSRLQEEHSLQDVIFKSAFKSTSTALPPREDDSSQSPNACRIHGHLYVNKVAGNFHITVGKAIPHPRGHAHLAALVNHESYNFSHRIDHLSFGELVPAIINPLDGTEKIAIDHNQMFQYFITVVPTKLHTYKISADTHQFSVTERERIINHAAGSHGVSGIFMKYDLSSLMVTVTEEHMPFWQFFVRLCGIVGGIFSTTGMLHGIGKFIVEIICCRFRLGSYKPVNSVPFEDGHTDNHLPLLENNTH

SEQ ID NO: 7750 - protein, 641 aa, Homo sapiens
MIQSQISFEDVAVDFTLEEWQLLNPTQKNLYRDVMLENYSNLVFLEVWLDNPKMWLRDNQDNLKSMERGHKYDVFGKIFNSSINIVHVGLRSHKCGTGEKSLKCPFDLLIPKNNCERKKIDELNKKLLFCIKPGRTHGGIKYCDCSTCRKSSNEEPWLTANHITHTGVYLCMECGRFFNKKSQLVIHQRTHTGEKPYQCSECGKAFSQKSLLTVHQRTHSGEKPHGCSECQKAFSRKSLLILHQRIHTGEKPYGCSECGKAFSRKSQLKRHQITHTIEKPYSCSECGKAFSQKLKLITHQRAHTGEKPYPCSHCGKAFFWKSQLITHQRTHTGKKPYGCGECQKAFSRNSLLIRHQRIHTGEKPYECNECGEAFIRKPQLIKHQITHTGEKNYRCSDCEEAFFKKSELIRHQKIHLGEKPYGCIQCGKTFFGKSQLLTHHRTHTGEKPYECSECGKAFTQKSSLISHQRTHTGEKPYECSECRKTFSEKSSLIHHQRTHTGEKPFECSECRKAFAWKPQLLRHQRIHTGEKPYECSECGKAFVQKVQLIKHQRNHTGEKTYGCSDCAKAFFEKAQLIIHQRIHTGERPYKCGECGKSFTRKSHLMRHQRIHTGDKYYGCNECGTTFNRKSQLMIHQRNHII

SEQ ID NO: 7751 - protein, 708 aa, Homo sapiens
MLRMRVPALLVLLFCFRGRAGPSPHFLQQPEDLVVLLGEEARLPCALGAYWGLVQWTKSGLALGGQRDLPGWSRYWISGNAANGQHDLHIRPVELEDEASYECQATQAGLRSRPAQLHVLVPPEAPQVLGGPSVSLVAGVPANLTCRSRGDARPTPELLWFRDGVLLDGATFHQTLLKEGTPGSVESTLTLTPFSHDDGATFVCRARSQALPTGRDTAITLSLQYPPEVTLSASPHTVQEGEKVIFLCQATAQPPVTGYRWAKGGSPVLGARGPRLEVVADASFLTEPVSCEVSNAVGSANRSTALDVLFGPILQAKPEPVSVDVGEDASFSCAWRGNPLPRVTWTRRGGAQVLGSGATLRLPSVGPEDAGDYVCRAEAGLSGLRGGAAEARLTVNAPPVVTALHSAPAFLRGPARLQCLVFASPAPDAVVWSWDEGFLEAGSQGRFLVETFPAPESRGGLGPGLISVLHISGTQESDFSRSFNCSARNRLGEGGAQASLGRRDLLPTVRIVAGVAAATTTLLMVITGVALCCWRHSKASASFSEQKNLMRIPGSSDGSSSRGPEEEETGSREDRGPIVHTDHSDLVLEEEGTLETKDPTNGYYKVRGVSVSLSLGEAPGGGLFLPPPSPLGPPGTPTFYDFNPHLGMVPPCRLYRARAGYLTTPHPRAFTSYIKPTSFGPPDLAPGTPPFPYAAFPTPSHPRLQTHV

SEQ ID NO: 7752 - protein, 355 aa, Homo sapiens
MEPPGRRECPFPSWRFPGLLLAAMVLLLYSFSDACEEPPTFEAMELIGKPKPYYEIGERVDYKCKKGYFYIPPLATHTICDRNHTWLPVSDDACYRETCPYIRDPLNGQAVPANGTYEFGYQMHFICNEGYYLIGEEILYCELKGSVAIWSGKPPICEKVLCTPPPKIKNGKHTFSEVEVFEYLDAVTYSCDPAPGPDPFSLIGESTIYCGDNSVWSRAAPECKVVKCRFPVVENGKQISGFGKKFYYKATVMFECDKGFYLDGSDTIVCDSNSTWDPPVPKCLKGYPKPEEGILDSLDVWVIAVIVIAIVVGVAVICVVPYRYLQRRKKKGKADGGAEYATYQTKSTTPAEQRG

SEQ ID NO: 7753 - protein, 469 aa, Homo sapiens
MNDFGIKNMDQVAPVANSYRGTLKRQPAFDTFDGSLFAVFPSLNEEQTLQEVPTGLDSISHDSANCELPLLTPCSKAVMSQALKATFSGFKKEQRRLGIPKNPWLWSEQQVCQWLLWATNEFSLVNVNLQRFGMNGQMLCNLGKERFLELAPDFVGDILWEHLEQMIKENQEKTEDQYEENSHLTSVPHWINSNTLGFGTEQAPYGMQTQNYPKGGLLDSMCPASTPSVLSSEQEFQMFPKSRLSSVSVTYCSVSQDFPGSNLNLLTNNSGTPKDHDSPENGADSFESSDSLLQSWNSQSSLLDVQRVPSFESFEDDCSQSLCLNKPTMSFKDYIQERSDPVEQGKPVIPAAVLAGFTGSGPIQLWQFLLELLSDKSCQSFISWTGDGWEFKLADPDEVARRWGKRKNKPKMNYEKLSRGLRYYYDKNIIHKTSGKRYVYRFVCDLQNLLGFTPEELHAILGVQPDTED

SEQ ID NO: 7754 - protein, 363 aa, Homo sapiens
MKTLLLLLLVLLELGEAQGSLHRVPLRRHPSLKKKLRARSQLSEFWKSHNLDMIQFTESCSMDQSAKEPLINYLDMEYFGTISIGSPPQNFTVIFDTGSSNLWVPSVYCTSPACKTHSRFQPSQSSTYSQPGQSFSIQYGTGSLSGIIGADQVSVEGLTVVGQQFGESVTEPGQTFVDAEFDGILGLGYPSLAVGGVTPVFDNMMAQNLVDLPMFSVYMSSNPEGGAGSELIFGGYDHSHFSGSLNWVPVTKQAYWQIALDNMLWSVPTLTSCRMSPSPLTESPIPSAQLPTPYWTSWMECSSAAVAFKDLTSTLQLGPSGSWGMSSFDSFTQSLTVGITVWDWPQQSPKEGPCVCACLSDRP

SEQ ID NO: 7755 - protein, 525 aa, Homo sapiens
MEFCVEDSTDVHVLIEDHRIVFSCKNADGVELYNEIEFYAKVNSKDSQDKRSSRSITCFVRKWKEKVAWPRLTKEDIKPVWLSVDFDNWRDWEGDEEMELAHVEHYAELLKKVSTKRPPPAMDDLDFTTTVVSCCPAELQTEGSNGKKEVLSGFQVVLEDTVLFPEGGGQPDDRGTINDISVLRVTRRGEQADHFTQTPLDPGSQVLVRVDWERRFDHMQQHSGQHLITAVADHLFKLKTTSWELGRFRSAIELDTPSMTAEQVAAIEQSVNEKIRDRLPVNVRELSLDDPEVEQVSGRGLPDDHAGPIRVVNIEGVDSNMCCGTHVSNLSDLQVIKILGTEKGKKNRTNLIFLSGNRVLKWMERSHGTEKALTALLKCGAEDHVEAVKKLQNSTKILQKNNLNLLRDLAVHIAHSLRNSPDWGGVVILHRKEGDSEFMNIIANEIGSEETLLFLTVGDEKGGGLFLLAGPPASVETLGPRVAEVLEGKGAGKKGRFQGKATKMSRRMEAQALLQDYISTQSAKE

SEQ ID NO: 7756 - protein, 1152 aa, Homo sapiens
MADLSLADALTEPSPDIEGEIKRDFIATLEAEAFDDVVGETVGKTDYIPLLDVDEKTGNSESKKKPCSETSQIEDTPSSKPTLLANGGHGVEGSDTTGSPTEFLEEKMAYQEYPNSQNWPEDTNFCFQPEQVVDPIQTDPFKMYHDDDLADLVFPSSATADTSIFAGQNDPLKDSYGMSPCNTAVVPQGWSVEALNSPHSESFVSPEAVAEPPQPTAVPLELAKEIEMASEERPPAQALEIMMGLKTTDMAPSKETEMALAKDMALATKTEVALAKDMESPTKLDVTLAKDMQPSMESDMALVKDMELPTEKEVALVKDVRWPTETDVSSAKNVVLPTETEVAPAKDVTLLKETERASPIKMDLAPSKDMGPPKENKKETERASPIKMDLAPSKDMGPPKENKIVPAKDLVLLSEIEVAQANDIISSTEISSAEKVALSSETEVALARDMTLPPETNVILTKDKALPLEAEVAPVKDMAQLPETEIAPAKDVAPSTVKEVGLLKDMSPLSETEMALGKDVTPPPETEVVLIKNVCLPPEMEVALTEDQVPALKTEAPLAKDGVLTLANNVTPAKDVPPLSETEATPVPIKDMEIAQTQKGISEDSHLESLQDVGQSAAPTFMISPETVTGTGKKCSLPAEEDSVLEKLGERKPCNSQPSELSSETSGIARPEEGRPVVSGTGNDITTPPNKELPPSPEKKTKPLATTQPAKTSTSKAKTQPTSLPKQPAPTTIGGLNKKPMSLASGLVPAAPPKRPAVASARPSILPSKDVKPKPIADAKAPEKRASPSKPASAPASRSGSKSTQTVAKTTTAAAVASTGPSSRSPSTLLPKKPTAIKTEGKPAEVKKMTAKSVPADLSRPKSTSTSSMKKTTTLSGTAPAAGVVPSRVKATPMPSRPSTTPFIDKKPTSAKPSSTTPRLSRLATNTSAPDLKNVRSKVGSTENIKHQPGGGRAKVEKKTEAAATTRKPESNAVTKTAGPIASAQKQPAGKVQIVSKKVSYSHIQSKCGSKDNIKHVPGGGNVQIQNKKVDISKVSSKCGSKANIKHKPGGGDVKIESQKLNFKEKAQAKVGSLDNVGHLPAGGAVKTEGGGSEAPLCPGPPAGEEPAISEAAPEAGAPTSASGLNGHPTLSGGGDQREAQTLDSQIQETSI

SEQ ID NO: 7757 - protein, 513 aa, Homo sapiens
MNLDSIHRLIEETQIFQMQQSSIKSRGDMVAPASPPRDTCNTCFPLHGLQSHAAHNFCAHSYNTNKWDICEELRLRELEEVKARAAQMEKTMRWWSDCTANWREKWSKVRAERNSAREEGRQLRIKLEMAMKELSTLKKKQSLPPQKEALEAKVTQDLKLPGFVEESCEHTDQFQLSSQMHESIREYLVKRQFSTKEDTNNKEQGVVIDSLKLSEEMKPNLDGVDLFNNGGSGNGETKTGLRLKAINLPLENEVTEISALQVHLDEFQKILWKEREMRTALEKEIERLESALSLWKWKYEELKESKPKNVKEFDILLGQHNDEMQELSGNIKEESKSQNSKDRVICELRAELERLQAENTSEWDKREILEREKQGLERENRRLKIQVKEMEELLDKKNRLSANSQSPDFKMSQIDLQEKNQELLNLQHAYYKLNRQYQANIAELTHANNRVDQNEAEVKKLRLRVEELKQGLNQKEDELDDSLNQIRKLQRSLDEEKERNENLETELRHLQNW

SEQ ID NO: 7758 - protein, 247 aa, Homo sapiens
MGAAVFFGCTFVAFGPAFALFLITVAGDPLRVIILVAGAFFWLVSLLLASVVWFILVHVTDRSDARLQYGLLIFGAAVSVLLQEVFRFAYYKLLKKADEGLASLSEDGRSPISIRQMAYVSGLSFGIISGVFSVINILADALGPGVVGIHGDSPYYFLTSAFLTAAIILLHTFWGVVFFDACERRRYWALGLVVGSHLLTSGLTFLNPWYEASLLPIYAVTVSMGLWAFITAGGSLRSIQRSLLCKD

SEQ ID NO: 7759 - protein, 162 aa, Homo sapiens
MRFTFTSRCLALFLLLNHPTPILPAFSNQTYPTIEPKPFLYVVGRKKMMDAQYKCYDRMQQLPAYQGEGPYCNRTWDGWLCWDDTPAGVLSYQFCPDYFPDFDPSEKVTKYCDEKGVWFKHPENNRTWSNYTMCNAFTPEKLKNAYVLYYLAIVGHSCQFSP

SEQ ID NO: 7760 - protein, 464 aa, Homo sapiens
MPKKAKPTGSGKEEGPAPCKQMKLEAAGGPSALNFDSPSSLFESLISPIKTETFFKEFWEQKPLLIQRDDPALATYYGSLFKLTDLKSLCSRGMYYGRDVNVCRCVNGKKKVLNKDGKAHFLQLRKDFDQKRATIQFHQPQRFKDELWRIQEKLECYFGSLVGSNVYITPAGSQGLPPHYDDVEVFILQLEGEKHWRLYHPTVPLAREYSVEAEERIGRPVHEFMLKPGDLLYFPRGTIHQADTPAGLAHSTHVTISTYQNNSWGDFLLDTISGLVFDTAKEDVELRTGIPRQLLLVESTTVATRRLSGFLRTLADRLEGTKELLSSDMKKDFIMHRLPPYSAGDGAELSTPGGKLPRLDSVVRLQFKDHIVLTVLPDQDQSDEAQEKMVYIYHSLKNSRETHMMGNEEETEFHGLRFPLSHLDALKQIWNSPAISVKDLKLTTDEEKESLVLSLWTECLIQVV

SEQ ID NO: 7761 - protein, 1516 aa, Homo sapiens
MAANVGSMFQYWKRFDLQQLQRELDATATVLANRQDESEQSRKRLIEQSREFKKNTPEDLRKQVAPLLKSFQGEIDALSKRSKEAEAAFLNVYKRLIDVPDPVPALDLGQQLQLKVQRLHDIETENQKLRETLEEYNKEFAEVKNQEVTIKALKEKIREYEQTLKNQAETIALEKEQKLQNDFAEKERKLQETQMSTTSKLEEAEHKVQSLQTALEKTRTELFDLKTKYDEETTAKADEIEMIMTDLERANQRAEVAQREAETLREQLSSANHSLQLASQIQKAPDVEQAIEVLTRSSLEVELAAKEREIAQLVEDVQRLQASLTKLRENSASQISQLEQQLSAKNSTLKQLEEKLKGQADYEEVKKELNILKSMEFAPSEGAGTQDAAKPLEVLLLEKNRSLQSENAALRISNSDLSGSARRKGKDQPESRRPGSLPAPPPSQLPRNPGEQASNTNGTHQFSPAGLSQDFFSSSLASPSLPLASTGKFALNSLLQRQLMQSFYSKAMQEAGSTSMIFSTGPYSTNSISSQSPLQQSPDVNGMAPSPSQSESAGSVSEGEEMDTAEIARQVKEQLIKHNIGQRIFGHYVLGLSQGSVSEILARPKPWNKLTVRGKEPFHKMKQFLSDEQNILALRSIQGRQRENPGQSLNRLFQEVPKRRNGSEGNITTRIRASETGSDEAIKSILEQAKRELQVQKTAEPAQPSSASGSGNSDDAIRSILQQARREMEAQQAALDPALKQAPLSQSDITILTPKLLSTSPMPTVSSYPPLAISLKKPSAAPEAGASALPNPPALKKEAQDAPGLDPQGAADCAQGVLRQVKNEVGRSGAWKDHWWSAVQPERRNAASSEEAKAEETGGGKEKGSGGSGGGSQPRAERSQLQGPSSSEYWKEWPSAESPYSQSSELSLTGASRSETPQNSPLPSSPIVPMSKPTKPSVPPLTPEQYEVYMYQEVDTIELTRQVKEKLAKNGICQRIFGEKVLGLSQGSVSDMLSRPKPWSKLTQKGREPFIRMQLWLNGELGQGVLPVQGQQQGPVLHSVTSLQDPLQQGCVSSESTPKTSASCSPAPESPMSSSESVKSLTELVQQPCPPIEASKDSKPPEPSDPPASDSQPTTPLPLSGHSALSIQELVAMSPELDTYGITKRVKEVLTDNNLGQRLFGETILGLTQGSVSDLLARPKPWHKLSLKGREPFVRMQLWLNDPNNVEKLMDMKRMEKKAYMKRRHSSVSDSQPCEPPSVGTEYSQGASPQPQHQLKKPRVVLAPEEKEALKRAYQQKPYPSPKTIEDLATQLNLKTSTVINWFHNYRSRIRRELFIEEIQAGSQGQAGASDSPSARSGRAAPSSEGDSCDGVEATEGPGSADTEEPKSQGEAEREEVPRPAEQTEPPPSGTPGPDDARDDDHEGGPVEGPGPLPSPASATATAAPAAPEDAATSAAAAPGEGPAAPSSAPPPSNSSSSSAPRRPSSLQSLFGLPEAAGARDSRDNPLRKKKAANLNSIIHRLEKAASREEPIEWEF

SEQ ID NO: 7762 - protein, 577 aa, Homo sapiens
MPKTISVRVTTMDAELEFAIQPNTTGKQLFDQVVKTIGLREVWFFGLQYQDTKGFSTWLKLNKKVTAQDVRKESPLLFKFRAKFYPEDVSEELIQDITQRLFFLQVKEGILNDDIYCPPETAVLLASYAVQSKYGDFNKEVHKSGYLAGDKLLPQRVLEQHKLNKDQWEERIQVWHEEHRGMLREDAVLEYLKIAQDLEMYGVNYFSIKNKKGSELWLGVDALGLNIYEQNDRLTPKIGFPWSEIRNISFNDKKFVIKPIDKKAPDFVFYAPRLRINKRILALCMGNHELYMRRRKPDTIEVQQMKAQAREEKHQKQMERAMLENEKKKREMAEKEKEKIEREKEELMERLKQIEEQTKKAQQELEEQTRRALELEQERKRAQSEAEKLAKERQEAEEAKEALLQASRDQKKTQEQLALEMAELTARISQLEMARQKKESEAVEWQQKAQMVQEDLEKTRAELKTAMSTPHVAEPAENEQDEQDENGAEASADLRADAMAKDRSEEERTTEAEKNERVQKHLKALTSELANARDESKKTANDMIHAENMRLGRDKYKTLRQIRQGNTKQRIDEFESM

SEQ ID NO: 7763 - protein, 381 aa, Homo sapiens
MASPPACPSEEDESLKGCELYVQLHGIQQVLKDCIVHLCISKPERPMKFLREHFEKLEKEENRQILARQKSNSQSDSHDEEVSPTPPNPVVKARRRRGGVSAEVYTEEDAVSYVRKVIPKDYKTMTALAKAISKNVLFAHLDDNERSDIFDAMFPVTHIAGETVIQQGNEGDNFYVVDQGEVDVYVNGEWVTNISEGGSFGELALIYGTPRAATVKAKTDLKLWGIDRDSYRRILMGSTLRKRKMYEEFLSKVSILESLEKWERLTVADALEPVQFEDGEKIVVQGEPGDDFYIITEGTASVLQRRSPNEEYVEVGRLGPSDYFGEIALLLNRPRAATVVARGPLKCVKLDRPRFERVLGPCSEILKRNIQRYNSFISLTV

SEQ ID NO: 7764 - protein, 3174 aa, Homo sapiens
MVFESVVVDVLNRFLGDYVVDLDTSQLSLGIWKGAVALKNLQIKENALSQLDVPFKVKVGHIGNLKLIIPWKNLYTQPVEAVLEEIYLLIVPSSRIKYDPLKEEKQLMEAKQQELKRIEEAKQKVVDQEQHLPEKQDTFAEKLVTQIIKNLQVKISSIHIRYEDDITNRDKPLSFGISLQNLSMQTTDQYWVPCLHDETEKLVRKLIRLDNLFAYWNVKSQMFYLSDYDNSLDDLKNGIVNENIVPEGYDFVFRPISANAKLVMNRRSDFDFSAPKINLEIELHNIAIEFNKPQYFSIMELLESVDMMAQNLPYRKFKPDVPLHHHAREWWAYAIHGVLEVNVCPRLWMWSWKHIRKHRQKVKQYKELYKKKLTSKKPPGELLVSLEELEKTLDVFNITIARQTAEVEVKKAGYKIYKEGVKDPEDNKGWFSWLWSWSEQNTNEQQPDVQPETLEEMLTPEEKALLYEAIGYSETAVDPTLLKTFEALKFFVHLKSMSIVLRENHQKPELVDIVIEEFSTLIVQRPGAQAIKFETKIDSFHITGLPDNSEKPRLLSSLDDAMSLFQITFEINPLDETVSQRCIIEAEPLEIIYDARTVNSIVEFFRPPKEVHLAQLTAATLTKLEEFRSKTATGLLYIIETQKVLDLKINLKASYIIVPQDGIFSPTSNLLLLDLGHLKVTSKSRSELPDVKQGEANLKEIMDRAYDSFDIQLTSVQLLYSRVGDNWREARKLSVSTQHILVPMHFNLELSKAMVFMDVRMPKFKIYGKLPLISLRISDKKLQGIMELIESIPKPEPVTEVSAPVKSFQIQTSTSLGTSQISQKIIPLLELPSVSEDDSEEEFFDAPCSPLEEPLQFPTGVKSIRTRKLQKQDCSVNMTTFKIRFEVPKVLIEFYHLVGDCELSVVEILVLGLGAEIEIRTYDLKANAFLKEFCLKCPEYLDENKKPVYLVTTLDNTMEDLLTLEYVKAEKNVPDLKSTYNNVLQLIKVNFSSLDIHLHTEALLNTINYLHNILPQSEEKSAPVSTTETEDKGDVIKKLALKLSTNEDIITLQILAELSCLQIFIQDQKCNISEIKIEGLDSEMIMRPSETEINAKLRNIIVLDSDITAIYKKAVYITGKEVFSFKMVSYMDATAGSAYTDMNVVDIQVNLIVGCIEVVFVTKFLYSILAFIDNFQAAKQALAEATVQAAGMAATGVKELAQRSSRMALDINIKAPVVVIPQSPVSENVFVADFGLITMTNTFHMITESQSSPPPVIDLITIKLSEMRLYRSRFINDAYQEVLDLLLPLNLEVVVERNLCWEWYQEVPCFNVNAQLKPMEFILSQEDITTIFKTLHGNIWYEKDGSASPAVTKDQYSATSGVTTNASHHSGGATVVTAAVVEVHSRALLVKTTLNISFKTDDLTMVLYSPGPKQASFTDVRDPSLKLAEFKLENIISTLKMYTDGSTFSSFSLKNCILDDKRPHVKKATPRMIGLTVGFDKKDMMDIKYRKVRDGCVTDAVFQEMYICASVEFLQTVANVFLEAYTTGTAVETSVQTWTAKEEVPTQESVKWEINVIIKNPEIVFVADMTKNDAPALVITTQCEICYKGNLENSTMTAAIKDLQVRACPFLPVKRKGKITTVLQPCDLFYQTTQKGTDPQVIDMSVKSLTLKVSPVIINTMITITSALYTTKETIPEETASSTAHLWEKKDTKTLKMWFLEESNETEKIAPTTELVPKGEMIKMNIDSIFIVLEAGIGHRTVPMLLAKSRFSGEGKNWSSLINLHCQLELEVHYYNEMFGVWEPLLEPLEIDQTEDFRPWNLGIKMKKKAKMAIVESDPEEENYKVPEYKTVISFHSKDQLNITLSKCGLVMLNNLVKAFTEAATGSSADFVKDLAPFMILNSLGLTISVSPSDSFSVLNIPMAKSYVLKNGESLSMDYIRTKDNDHFNAMTSLSSKLFFILLTPVNHSTADKIPLTKVGRRLYTVRHRESGVERSIVCQIDTVEGSKKVTIRSPVQIRNHFSVPLSVYEGDTLLGTASPENEFNIPLGSYRSFIFLKPEDENYQMCEGIDFEEIIKNDGALLKKKCRSKNPSKESFLINIVPEKDNLTSLSVYSEDGWDLPYIMHLWPPILLRNLLPYKIAYYIEGIENSVFTLSEGHSAQICTAQLGKARLHLKLLDYLNHDWKSEYHIKPNQQDISFVSFTCVTEMEKTDLDIAVHMTYNTGQTVVAFHSPYWMVNKTGRMLQYKADGIHRKHPPNYKKPVLFSFQPNHFFNNNKVQLMVTDSELSNQFSIDTVGSHGAVKCKGLKMDYQVGVTIDLSSFNITRIVTFTPFYMIKNKSKYHISVAEEGNDKWLSLDLEQCIPFWPEYASSKLLIQVERSEDPPKRIYFNKQENCILLRLDNELGGIIAEVNLAEHSTVITFLDYHDGAATFLLINHTKNELVQYNQSSLSEIEDSLPPGKAVFYTWADPVGSRRLKWRCRKSHGEVTQKDDMMMPIDLGEKTIYLVSFFEGLQRIILFTEDPRVFKVTYESEKAELAEQEIAVALQDVGISLVNNYTKQEVAYIGITSSDVVWETKPKKKARWKPMSVKHTEKLEREFKEYTESSPSEDKVIQLDTNVPVRLTPTGHNMKILQPHVIALRRNYLPALKVEYNTSAHQSSFRIQIYRIQIQNQIHGAVFPFVFYPVKPPKSVTMDSAPKPFTDVSIVMRSAGHSQISRIKYFKVLIQEMDLRLDLGFIYALTDLMTEAEVTENTEVELFHKDIEAFKEEYKTASLVDQSQVSLYEYFHISPIKLHLSVSLSSGREEAKDSKQNGGLIPVHSLNLLLKSIGATLTDVQDVVFKLAFFELNYQFHTTSDLQSEVIRHYSKQAIKQMYVLILGLDVLGNPFGLIREFSEGVEAFFYEPYQGAIQGPEEFVEGMALGLKALVGGAVGGLAGAASKITGAMAKGVAAMTMDEDYQQKRREAMNKQPAGFREGITRGGKGLVSGFVSGITGIVTKPIKGAQKGGAAGFFKGVGKGLVGAVARPTGGIIDMASSTFQGIKRATETSEVESLRPPRFFNEDGVIRPYRLRDGTGNQMLQVMENGRFAKYKYFTHVMINKTDMLMITRRGVLFVTKGTFGQLTCEWQYSFDEFTKEPFIVHGRRLRIEAKERVKSVFHAREFGKIINFKTPEDARWILTKLQEAREPSPSL

SEQ ID NO: 7765 - protein, 993 aa, Homo sapiens
MRPVALLLLPSLLALLAHGLSLEAPTVGKGQAPGIEETDGELTAAPTPEQPERGVHFVTTAPTLKLLNHHPLLEEFLQEGLEKGDEELRPALPFQPDPPAPFTPSPLPRLANQDSRPVFTSPTPAMAAVPTQPQSKEGPWSPESESPMLRITAPLPPGPSMAVPTLGPGEIASTTPPSRAWTPTQEGPGDMGRPWVAEVVSQGAGIGIQGTITSSTASGDDEETTTTTTIITTTITTVQTPGPCSWNFSGPEGSLDSPTDLSSPTDVGLDCFFYISVYPGYGVEIKVQNISLREGETVTVEGLGGPDPLPLANQSFLLRGQVIRSPTHQAALRFQSLPPPAGPGTFHFHYQAYLLSCHFPRRPAYGDVTVTSLHPGGSARFHCATGYQLKGARHLTCLNATQPFWDSKEPVCIAACGGVIRNATTGRIVSPGFPGNYSNNLTCHWLLEAPEGQRLHLHFEKVSLAEDDDRLIIRNGDNVEAPPVYDSYEVEYLPIEGLLSSGKHFFVELSTDSSGAAAGMALRYEAFQQGHCYEPFVKYGNFSSSTPTYPVGTTVEFSCDPGYTLEQGSIIIECVDPHDPQWNETEPACRAVCSGEITDSAGVVLSPNWPEPYGRGQDCIWGVHVEEDKRIMLDIRVLRIGPGDVLTFYDGDDLTARVLGQYSGPRSHFKLFTSMADVTIQFQSDPGTSVLGYQQGFVIHFFEVPRNDTCPELPEIPNGWKSPSQPELVHGTVVTYQCYPGYQVVGSSVLMCQWDLTWSEDLPSCQRVTSCHDPGDVEHSRRLISSPKFPVGATVQYICDQGFVLMGSSILTCHDRQAGSPKWSDRAPKCLLEQLKPCHGLSAPENGARSPEKQLHPAGATIHFSCAPGYVLKGQASIKCVPGHPSHWSDPPPICRAASLDGFYNSRSLDVAKAPAASSTLDAAHIAAAIFLPLVAMVLLVGGVYFYFSRLQGKSSLQLPRPRPRPYNRITIESAFDNPTYETGETREYEVSI

SEQ ID NO: 7766 - protein, 215 aa, Homo sapiens
MTSRSTARPNGQPQASKICQFKLVLLGESAVGKSSLVLRFVKGQFHEYQESTIGAAFLTQSVCLDDTTVKFEIWDTAGQERYHSLAPMYYRGAQAAIVVYDITNQETFARAKTWVKELQRQASPSIVIALAGNKADLANKRMVEYEEAQAYADDNSLLFMETSAKTAMNVNDLFLAIAKKLPKSEPQNLGGAAGRSRGVDLHEQSQQNKSQCCSN

SEQ ID NO: 7767 - protein, 1914 aa, Homo sapiens
MGDVKLVASSHISKTSLSVDPSRVDSMPLTEAPAFILPPRNLCIKEGATAKFEGRVRGYPEPQVTWHRNGQPITSGGRFLLDCGIRGTFSLVIHAVHEEDRGKYTCEATNGSGARQVTVELTVEGSFAKQLGQPVVSKTLGDRFSAPAVETRPSIWGECPPKFATKLGRVVVKEGQMGRFSCKITGRPQPQVTWLKGNVPLQPSARVSVSEKNGMQVLEIHGVNQDDVGVYTCLVVNGSGKASMSAELSIQGLDSANRSFVRETKATNSDVRKEVTNVISKESKLDSLEAAAKSKNCSSPQRGGSPPWAANSQPQPPRESKLESCKDSPRTAPQTPVLQKTSSSITLQAARVQPEPRAPGLGVLSPSGEERKRPAPPRPATFPTRQPGLGSQDVVSKAANRRIPMEGQRDSAFPKFESKPQSQEVKENQTVKFRCEVSGIPKPEVAWFLEGTPVRRQEGSIEVYEDAGSHYLCLLKARTRDSGTYSCTASNAQGQLSCSWTLQVERLAVMEVAPSFSSVLKDCAVIEGQDFVLQCSVRGTPVPRITWLLNGQPIQYARSTCEAGVAELHIQDALPEDHGTYTCLAENALGQVSCSAWVTVHEKKSSRKSEYLLPVAPSKPTAPIFLQGLSDLKVMDGSQVTMTVQVSGNPPPEVIWLHNGNEIQESEDFHFEQRGTQHSLCIQEVFPEDTGTYTCEAWNSAGEVRTQAVLTVQEPHDGTQPWFISKPRSVTASLGQSVLISCAIAGDPFPTVHWLRDGKALCKDTGHFEVLQNEDVFTLVLKKVQPWHAGQYEILLKNRVGECSCQVSLMLQNSSARALPRGREPASCEDLCGGGVGADGGGSDRYGSLRPGWPARGQGWLEEEDGEDVRGVLKRRVETRQHTEEAIRQQEVEQLDFRDLLGKKVSTKTLSEDDLKEIPAEQMDFRANLQRQVKPKTVSEEERKVHSPQQVDFRSVLAKKGTSKTPVPEKVPPPKPATPDFRSVLGGKKKLPAENGSSSAETLNAKAVESSKPLSNAQPSGPLKPVGNAKPAETLKPMGNAKPAETLKPMGNAKPDENLKSASKEELKKDVKNDVNCKRGHAGTTDNEKRSESQGTAPAFKQKLQDVHVAEGKKLLLQCQVSSDPPATIIWTLNGKTLKTTKFIILSQEGSLCSVSIEKALPEDRGLYKCVAKNDAGQAECSCQVTVDDAPASENTKAPEMKSRRPKSSLPPVLGTESDATVKKKPAPKTPPKAAMPPQIIQFPEDQKVRAGESVELFGKVTGTQPITCTWMKFRKQIQESEHMKVENSENGSKLTILAARQEHCGCYTLLVENKLGSRQAQVNLTVVDKPDPPAGTPCASDIRSSSLTLSWYGSSYDGGSAVQSYSIEIWDSANKTWKELATCRSTSFNVQDLLPDHEYKFRVRAINVYGTSEPSQESELTTVGEKPEEPKDEVEVSDDDEKEPEVDYRTVTINTEQKVSDFYDIEERLGSGKFGQVFRLVEKKTRKVWAGKFFKAYSAKEKENIRQEISIMNCLHHPKLVQCVDAFEEKANIVMVLEIVSGGELFERIIDEDFELTERECIKYMRQISEGVEYIHKQGIVHLDLKPENIMCVNKTGTRIKLIDFGLARRLENAGSLKVLFGTPEFVAPEVINYEPIGYATDMWSIGVICYILVSGLSPFMGDNDNETLANVTSATWDFDDEAFDEISDDAKDFISNLLKKDMKNRLDCTQCLQHPWLMKDTKNMEAKKLSKDRMKKYMARRKWQKTGNAVRAIGRLSSMAMISGLSGRKSSTGSPTSPLNAEKLESEEDVSQAFLEAVAEEKPHVKPYFSKTIRDLEVVEGSAARFDCKIEGYPDPEVVWFKDDQSIRESRHFQIDYDEDGNCSLIISDVCGDDDAKYTCKAVNSLGEATCTAELIVETMEEGEGEGEEEEE

SEQ ID NO: 7768 - protein, 2639 aa, Homo sapiens
MSSSHSRAGQSAAGAAPGGGVDTRDAEMPATEKDLAEDAPWKKIQQNTFTRWCNEHLKCVSKRIANLQTDLSDGLRLIALLEVLSQKKMHRKHNQRPTFRQMQLENVSVALEFLDRESIKLVSIDSKAIVDGNLKLILGLIWTLILHYSISMPMWDEEEDEEAKKQTPKQRLLGWIQNKLPQLPITNFSRDWQSGRALGALVDSCAPGLCPDWDSWDASKPVTNAREAMQQADDWLGIPQVITPEEIVDPNVDEHSVMTYLSQFPKAKLKPGAPLRPKLNPKKARAYGPGIEPTGNMVKKRAEFTVETRSAGQGEVLVYVEDPAGHQEEAKVTANNDKNRTFSVWYVPEVTGTHKVTVLFAGQHIAKSPFEVYVDKSQGDASKVTAQGPGLEPSGNIANKTTYFEIFTAGAGTGEVEVVIQDPMGQKGTVEPQLEARGDSTYRCSYQPTMEGVHTVHVTFAGVPIPRSPYTVTVGQACNPSACRAVGRGLQPKGVRVKETADFKVYTKGAGSGELKVTVKGPKGEERVKQKDLGDGVYGFEYYPMVPGTYIVTITWGGQNIGRSPFEVKVGTECGNQKVRAWGPGLEGGVVGKSADFVVEAIGDDVGTLGFSVEGPSQAKIECDDKGDGSCDVRYWPQEAGEYAVHVLCNSEDIRLSPFMADIRDAPQDFHPDRVKARGPGLEKTGVAVNKPAEFTVDAKHGGKAPLRVQVQDNEGCPVEALVKDNGNGTYSCSYVPRKPVKHTAMVSWGGVSIPNSPFRVNVGAGSHPNKVKVYGPGVAKTGLKAHEPTYFTVDCAEAGQGDVSIGIKCAPGVVGPAEADIDFDIIRNDNDTFTVKYTPRGAGSYTIMVLFADQATPTSPIRVKVEPSHDASKVKAEGPGLSRTGVELGKPTHFTVNAKAAGKGKLDVQFSGLTKGDAVRDVDIIDHHDNTYTVKYTPVQQGPVGVNVTYGGDPIPKSPFSVAVSPSLDLSKIKVSGLGEKVDVGKDQEFTVKSKGAGGQGKVASKIVGPSGAAVPCKVEPGLGADNSVVRFLPREEGPYEVEVTYDGVPVPGSPFPLEAVAPTKPSKVKAFGPGLQGGSAGSPARFTIDTKGAGTGGLGLTVEGPCEAQLECLDNGDGTCSVSYVPTEPGDYNINILFADTHIPGSPFKAHVVPCFDASKVKCSGPGLERATAGEVGQFQVDCSSAGSAELTIEICSEAGLPAEVYIQDHGDGTHTITYIPLCPGAYTVTIKYGGQPVPNFPSKLQVEPAVDTSGVQCYGPGIEGQGVFREATTEFSVDARALTQTGGPHVKARVANPSGNLTETYVQDRGDGMYKVEYTPYEEGLHSVDVTYDGSPVPSSPFQVPVTEGCDPSRVRVHGPGIQSGTTNKPNKFTVETRGAGTGGLGLAVEGPSEAKMSCMDNKDGSCSVEYIPYEAGTYSLNVTYGGHQVPGSPFKVPVHDVTDASKVKCSGPGLSPGMVRANLPQSFQVDTSKAGVAPLQVKVQGPKGLVEPVDVVDNADGTQTVNYVPSREGPYSISVLYGDEEVPRSPFKVKVLPTHDASKVKASGPGLNTTGVPASLPVEFTIDAKDAGEGLLAVQITDPEGKPKKTHIQDNHDGTYTVAYVPDVTGRYTILIKYGGDEIPFSPYRVRAVPTGDASKCTVTGAGIGPTIQIGEETVITVDTKAAGKGKVTCTVCTPDGSEVDVDVVENEDGTFDIFYTAPQPGKYVICVRFGGEHVPNSPFQVTALAGDQPSVQPPLRSQQLAPQYTYAQGGQQTWAPERPLVGVNGLDVTSLRPFDLVIPFTIKKGEITGEVRMPSGKVAQPTITDNKDGTVTVRYAPSEAGLHEMDIRYDNMHIPGSPLQFYVDYVNCGHVTAYGPGLTHGVVNKPATFTVNTKDAGEGGLSLAIEGPSKAEISCTDNQDGTCSVSYLPVLPGDYSILVKYNEQHVPGSPFTARVTGDDSMRMSHLKVGSAADIPINISETDLSLLTATVVPPSGREEPCLLKRLRNGHVGISFVPKETGEHLVHVKKNGQHVASSPIPVVISQSEIGDASRVRVSGQGLHEGHTFEPAEFIIDTRDAGYGGLSLSIEGPSKVDINTEDLEDGTCRVTYCPTEPGNYIINIKFADQHVPGSPFSVKVTGEGRVKESITRRRRAPSVANVGSHCDLSLKIPEISIQDMTAQVTSPSGKTHEAEIVEGENHTYCIRFVPAEMGTHTVSVKYKGQHVPGSPFQFTVGPLGEGGAHKVRAGGPGLERAEAGVPAEFSIWTREAGAGGLAIAVEGPSKAEISFEDRKDGSCGVAYVVQEPGDYEVSVKFNEEHIPDSPFVVPVASPSGDARRLTVSSLQESGLKVNQPASFAVSLNGAKGAIDAKVHSPSGALEECYVTEIDQDKYAVRFIPRENGVYLIDVKFNGTHIPGSPFKIRVGEPGHGGDPGLVSAYGAGLEGGVTGNPAEFVVNTSNAGAGALSVTIDGPSKVKMDCQECPEGYRVTYTPMAPGSYLISIKYGGPYHIGGSPFKAKVTGPRLVSNHSLHETSSVFVDSLTKATCAPQHGAPGPGPADASKVVAKGLGLSKAYVGQKSSFTVDCSKAGNNMLLVGVHGPRTPCEEILVKHVGSRLYSVSYLLKDKGEYTLVVKWGDEHIPGSPYRVVVP

SEQ ID NO: 7769 - protein, 338 aa, Homo sapiens
MVVMAPRTLFLLLSGALTLTETWAGSHSMRYFSAAVSRPGRGEPRFIAMGYVDDTQFVRFDSDSACPRMEPRAPWVEQEGPEYWEEETRNTKAHAQTDRMNLQTLRGYYNQSEASSHTLQWMIGCDLGSDGRLLRGYEQYAYDGKDYLALNEDLRSWTAADTAAQISKRKCEAANVAEQRRAYLEGTCVEWLHRYLENGKEMLQRADPPKTHVTHHPVFDYEATLRCWALGFYPAEIILTWQRDGEDQTQDVELVETRPAGDGTFQKWAAVVVPSGEEQRYTCHVQHEGLPEPLMLRWKQSSLPTIPIMGIVAGLVVLAAVVTGAAVAAVLWRKKSSD

SEQ ID NO: 7770 - protein, 1134 aa, Homo sapiens
MGKEQELLEAARTGHLPAVEKLLSGKRLSSGFGGGGGGGSGGGGGGSGGGGGGLGSSSHPLSSLLSMWRGPNVNCVDSTGYTPLHHAALNGHKDVVEVLLRNDALTNVADSKGCYPLHLAAWKGDAQIVRLLIHQGPSHTRVNEQNNDNETALHCAAQYGHTEVVKVLLEELTDPTMRNNKFETPLDLAALYGRLEVVKMLLNAHPNLLSCNTKKHTPLHLAARNGHKAVVQVLLDAGMDSNYQTEMGSALHEAALFGKTDVVQILLAAGTDVNIKDNHGLTALDTVRELPSQKSQQIAALIEDHMTGKRSTKEVDKTPPPQPPLISSMDSISQKSQGDVEKAVTELIIDFDANAEEEGPYEALYNAISCHSLDSMASGRSSDQDSTNKEAEAAGVKPAGVRPRERPPPPAKPPPDEEEEDHIDKKYFPLTASEVLSMRPRIHGSAAREEDEHPYELLLTAETKKVVLVDGKTKDHRRSSSSRSQDSAEGQDGQVPEQFSGLLHGSSPVCEVGQDPFQLLCTAGQSHPDGSPQQGACHKASMQLEETGVHAPGASQPSALDQSKRVGYLTGLPTTNSRSHPETLTHTASPHPGGAEEGDRSGARSRAPPTSKPKAELKLSRSLSKSDSDLLTCSPTEDATMGSRSESLSNCSIGKKRLEKSPSFASEWDEIEKIMSSIGEGIDFSQERQKISGLRTLEQSVGEWLESIGLQQYESKLLLNGFDDVHFLGSNVMEEQDLRDIGISDPQHRRKLLQAARSLPKVKALGYDGNSPPSVPSWLDSLGLQDYVHSFLSSGYSSIDTVKNLWELELVNVLKVQLLGHRKRIIASLADRPYEEPPQKPPRFSQLRCQDLLSQTSSPLSQNDSCTGRSADLLLPPGDTGRRRHDSLHDPAAPSRAERFRIQEEHREAKLTLRPPSLAAPYAPVQSWQHQPEKLIFESCGYEANYLGSMLIKDLRGTESTQDACAKMRKSTEHMKKIPTIILSITYKGVKFIDASNKNVIAEHEIRNISCAAQDPEDLCTFAYITKDLQTSHHYCHVFSTVDVNLTYEIILTLGQAFEVAYQLALQAQKSRATGASAAEMIETKSSKPVPKPRVGVRKSALEPPDMDQDAQSHASVSWVVDPKPDSKRSLSTN

SEQ ID NO: 7771 - protein, 487 aa, Homo sapiens
MDGTETRQRRLDSCGKPGELGLPHPLSTGGLPVASEDGALRAPESQSVTPKPLETEPSRETTWSIGLQVTVPFMFAGLGLSWAGMLLDYFQHWPVFVEVKDLLTLVPPLVGLKGNLEMTLASRLSTAANTGQIDDPQEQHRVISSNLALIQVQATVVGLLAAVAALLLGVVSREEVDVAKVELLCASSVLTAFLAAFALGVLMVCIVIGARKLGVNPDNIATPIAASLGDLITLSILALVSSFFYRHKDSRYLTPLVCLSFAALTPVWVLIAKQSPPIVKILKFGWFPIILAMVISSFGGLILSKTVSKQQYKGMAIFTPVICGVGGNLVAIQTSRISTYLHMWSAPGVLPLQMKKFWPNPCSTFCTSEINSMSARVLLLLVVPGHLIFFYIIYLVEGQSVINSQTFVVLYLLAGLIQVTILLYLAEVMVRLTWHQALDPDNHCIPYLTGLGDLLGTGLLALCFFTDWLLKSKAELGGISELASGPP

SEQ ID NO: 7772 - protein, 1287 aa, Homo sapiens
MEPIYPFARPQMNTRFPSSRMVPFHFPPSKCALWNPTPTGDFIYLHLSYYRNPKLVVTEKTIRLAYRHAKQNKKNSSCFLLGSLTADEDEEGVTLTVDRFDPGREVPECLEITPTASLPGDFLIPCKVHTQELCSREMIVHSVDDFSSALKALQCHICSKDSLDCGKLLSLRVHITSRESLDSVEFDLHWAAVTLANNFKCTPVKPIPIIPTALARNLSSNLNISQVQGTYKYGYLTMDETRKLLLLLESDPKVYSLPLVGIWLSGITHIYSPQVWACCLRYIFNSSVQERVFSESGNFIIVLYSMTHKEPEFYECFPCDGKIPDFRFQLLTSKETLHLFKNVEPPDKNPIRCELSAESQNAETEFFSKASKNFSIKRSSQKLSSGKMPIHDHDSGVEDEDFSPRPIPSPHPVSQKISKIQPSVPELSLVLDGNFIESNPLPTPLEMVNNENPPLINHLEHLKPLQPQLYDEKHSPEVEAGEPSLRGIPNQLNQDKPALLRHCKVRQPPAYKKGNPHTRNSIKPSSHNGPSHDIFEKLQTVSAGNVQNEEYPIRPSTLNSRQSSLAPQSQPHDFVFSPHNSGRPMELQIPTPPLPSYCSTNVCRCCQHHSHIQYSPLNSWQGANTVGSIQDVQSEALQKHSLFHPSGCPALYCNAFCSSSSPIALRPQGDMGSCSPHSNIEPSPVARPPSHMDLCNPQPCTVCMHTPKTESDNGMMGLSPDAYRFLTEQDRQLRLLQAQIQRLLEAQSLMPCSPKTTAVEDTVQAGRQMELVSVEAQSSPGLHMRKGVSIAVSTGASLFWNAAGEDQEPDSQMKQDDTKISSEDMNFSVDINNEVTSLPGSASSLKAVDIPSFEESNIAVEEEFNQPLSVSNSSLVVRKEPDVPVFFPSGQLAESVSMCLQTGPTGGASNNSETSEEPKIEHVMQPLLHQPSDNQKIYQDLLGQVNHLLNSSSKETEQPSTKAVIISHECTRTQNVYHTKKKTHHSRLVDKDCVLNATLKQLRSLGVKIDSPTKVKKNAHNVDHASVLACISPEAVISGLNCMSFANVGMSGLSPNGVDLSMEANAIALKYLNENQLSQLSVTRSNQNNCDPFSLLHINTDRSTVGLSLISPNNMSFATKKYMKRYGLLQSSDNSEDEEEPPDNADSKSEYLLNQNLRSIPEQLGGQKEPSKNDHEIINCSNCESVGTNADTPVLRNITNEVLQTKAKQQLTEKPAFLVKNLKPSPAVNLRTGKAEFTQHPEKENEGDITIFPESLQPSETLKQMNSMNSVGTFLDVKRLRQLPKLF

SEQ ID NO: 7773 - protein, 931 aa, Homo sapiens
MDMFPLTWVFLALYFSRHQVRGQPDPPCGGRLNSKDAGYITSPGYPQDYPSHQNCEWIVYAPEPNQKIVLNFNPHFEIEKHDCKYDFIEIRDGDSESADLLGKHCGNIAPPTIISSGSMLYIKFTSDYARQGAGFSLRYEIFKTGSEDCSKNFTSPNGTIESPGFPEKYPHNLDCTFTILAKPKMEIILQFLIFDLEHDPLQVGEGDCKYDWLDIWDGIPHVGPLIGKYCGTKTPSELRSSTGILSLTFHTDMAVAKDGFSARYYLVHQEPLENFQCNVPLGMESGRIANEQISASSTYSDGRWTPQQSRLHGDDNGWTPNLDSNKEYLQVDLRFLTMLTAIATQGAISRETQNGYYVKSYKLEVSTNGEDWMVYRHGKNHKVFQANNDATEVVLNKLHAPLLTRFVRIRPQTWHSGIALRLELFGCRVTDAPCSNMLGMLSGLIADSQISASSTQEYLWSPSAARLVSSRSGWFPRIPQAQPGEEWLQVDLGTPKTVKGVIIQGARGGDSITAVEARAFVRKFKVSYSLNGKDWEYIQDPRTQQPKLFEGNMHYDTPDIRRFDPIPAQYVRVYPERWSPAGIGMRLEVLGCDWTDSKPTVETLGPTVKSEETTTPYPTEEEATECGENCSFEDDKDLQLPSGFNCNFDFLEEPCGWMYDHAKWLRTTWASSSSPNDRTFPDDRNFLRLQSDSQREGQYARLISPPVHLPRSPVCMEFQYQATGGRGVALQVVREASQESKLLWVIREDQGGEWKHGRIILPSYDMEYQIVFEGVIGKGRSGEIAIDDIRISTDVPLENCMEPISAFAGENFKVDIPEIHEREGYEDEIDDEYEVDWSNSSSATSGSGAPSTDKEKSWLYTLDPILITIIAMSSLGVLLGATCAGLLLYCTCSYSGLSSRSCTTLENYNFELYDGLKHKVKMNHQKCCSEA

SEQ ID NO: 7774 - protein, 444 aa, Homo sapiens
MAVESQGGRPLVLGLLLCVLGPVVSHAGKILLIPVDGSHWLSMLGAIQQLQQRGHEIVVLAPDASLYIRDGAFYTLKTYPVPFQREDVKESFVSLGHNVFENDSFLQRVIKTYKKIKKDSAMLLSGCSHLLHNKELMASLAESSFDVMLTDPFLPCSPIVAQYLSLPTVFFLHALPCSLEFEATQCPNPFSYVPRPLSSHSDHMTFLQRVKNMLIAFSQNFLCDVVYSPYATLASEFLQREVTVQDLLSSASVWLFRSDFVKDYPRPIMPNMVFVGGINCLHQNPLSQEFEAYINASGEHGIVVFSLGSMVSEIPEKKAMAIADALGKIPQTVLWRYTGTRPSNLANNTILVKWLPQNDLLGHPMTRAFITHAGSHGVYESICNGVPMVMMPLFGDQMDNAKRMETKGAGVTLNVLEMTSEDLENALKAVINDKRKKQQSGRQM

SEQ ID NO: 7775 - protein, 896 aa, Homo sapiens
MAAAGPRRSVRGAVCLHLLLTLVIFSRAGEACKKVILNVPSKLEADKIIGRVNLEECFRSADLIRSSDPDFRVLNDGSVYTARAVALSDKKRSFTIWLSDKRKQTQKEVTVLLEHQKKVSKTRHTRETVLRRAKRRWAPIPCSMQENSLGPFPLFLQQVESDAAQNYTVFYSISGRGVDKEPLNLFYIERDTGNLFCTRPVDREEYDVFDLIAYASTADGYSADLPLPLPIRVEDENDNHPVFTEAIYNFEVLESSRPGTTVGVVCATDRDEPDTMHTRLKYSILQQTPRSPGLFSVHPSTGVITTVSHYLDREVVDKYSLIMKVQDMDGQFFGLIGTSTCIITVTDSNDNAPTFRQNAYEAFVEENAFNVEILRIPIEDKDLINTANWRVNFTILKGNENGHFKISTDKETNEGVLSVVKPLNYEENRQVNLEIGVNNEAPFARDIPRVTALNRALVTVHVRDLDEGPECTPAAQYVRIKENLAVGSKINGYKAYDPENRNGNGLRYKKLHDPKGWITIDEISGSIITSKILDREVETPKNELYNITVLAIDKDDRSCTGTLAVNIEDVNDNPPEILQEYVVICKPKMGYTDILAVDPDEPVHGAPFYFSLPNTSPEISRLWSLTKVNDTAARLSYQKNAGFQEYTIPITVKDRAGQAATKLLRVNLCECTHPTQCRATSRSTGVILGKWAILAILLGIALLFSVLLTLVCGVFGATKGKRFPEDLAQQNLIISNTEAPGDDRVCSANGFMTQTTNNSSQGFCGTMGSGMKNGGQETIEMMKGGNQTLESCRGAGHHHTLDSCRGGHTEVDNCRYTYSEWHSFTQPRLGEKLHRCNQNEDRMPSQDYVLTYNYEGRGSPAGSVGCCSEKQEEDGLDFLNNLEPKFITLAEACTKR

SEQ ID NO: 7776 - protein, 153 aa, Homo sapiens
MAAALALVAGVLSGAVLPLWSALPQYKKKITDRCFHHSECYSGCCLMDLDSGGAFCAPRARITMICLPQWLELFKGRDRIIFIYEAPTPSLVSAHNQGSYQHHLPLPDGLDVHIQGLDVFPPVPYDLEEDAGWSLLPWGHRPWLPPTCSKSSS

SEQ ID NO: 7777 - protein, 288 aa, Homo sapiens
MSSRKQGSQPRGQQSAEEENFKKPTRSNMQRSKMRGASSGKKTAGPQQKNLEPALPGRWGGRSAENPPSGSVRKTRKNKQKTPGNGDGGSTSEAPQPPRKKRARADPTVESEEAFKNRMEVKVKIPEELKPWLVEDWDLVTRQKQLFQLPAKKNVDAILEEYANCKKSQGNVDNKEYAVNEVVAGIKEYFNVMLGTQLLYKFERPQYAEILLAHPDAPMSQVYGAPHLLRLFVRIGAMLAYTPLDEKSLALLLGYLHDFLKYLAKNSASLFTASDYKVASAEYHRKAL

SEQ ID NO: 7778 - protein, 1712 aa, Homo sapiens
MGRDQRAVAGPALRRWLLLGTVTVGFLAQSVLAGVKKFDVPCGGRDCSGGCQCYPEKGGRGQPGPVGPQGYNGPPGLQGFPGLQGRKGDKGERGAPGVTGPKGDVGARGVSGFPGADGIPGHPGQGGPRGRPGYDGCNGTQGDSGPQGPPGSEGFTGPPGPQGPKGQKGEPYALPKEERDRYRGEPGEPGLVGFQGPPGRPGHVGQMGPVGAPGRPGPPGPPGPKGQQGNRGLGFYGVKGEKGDVGQPGPNGIPSDTLHPIIAPTGVTFHPDQYKGEKGSEGEPGIRGISLKGEEGIMGFPGLRGYPGLSGEKGSPGQKGSRGLDGYQGPDGPRGPKGEAGDPGPPGLPAYSPHPSLAKGARGDPGFPGAQGEPGSQGEPGDPGLPGPPGLSIGDGDQRRGLPGEMGPKGFIGDPGIPALYGGPPGPDGKRGPPGPPGLPGPPGPDGFLFGLKGAKGRAGFPGLPGSPGARGPKGWKGDAGECRCTEGDEAIKGLPGLPGPKGFAGINGEPGRKGDRGDPGQHGLPGFPGLKGVPGNIGAPGPKGAKGDSRTITTKGERGQPGVPGVPGMKGDDGSPGRDGLDGFPGLPGPPGDGIKGPPGDPGYPGIPGTKGTPGEMGPPGLGLPGLKGQRGFPGDAGLPGPPGFLGPPGPAGTPGQIDCDTDVKRAVGGDRQEAIQPGCIGGPKGLPGLPGPPGPTGAKGLRGIPGFAGADGGPGPRGLPGDAGREGFPGPPGFIGPRGSKGAVGLPGPDGSPGPIGLPGPDGPPGERGLPGEVLGAQPGPRGDAGVPGQPGLKGLPGDRGPPGFRGSQGMPGMPGLKGQPGLPGPSGQPGLYGPPGLHGFPGAPGQEGPLGLPGIPGREGLPGDRGDPGDTGAPGPVGMKGLSGDRGDAGFTGEQGHPGSPGFKGIDGMPGTPGLKGDRGSPGMDGFQGMPGLKGRPGFPGSKGEAGFFGIPGLKGLAGEPGFKGSRGDPGPPGPPPVILPGMKDIKGEKGDEGPMGLKGYLGAKGIQGMPGIPGLSGIPGLPGRPGHIKGVKGDIGVPGIPGLPGFPGVAGPPGITGFPGFIGSRGDKGAPGRAGLYGEIGATGDFGDIGDTINLPGRPGLKGERGTTGIPGLKGFFGEKGTEGDIGFPGITGVTGVQGPPGLKGQTGFPGLTGPPGSQGELGRIGLPGGKGDDGWPGAPGLPGFPGLRGIRGLHGLPGTKGFPGSPGSDIHGDPGFPGPPGERGDPGEANTLPGPVGVPGQKGDQGAPGERGPPGSPGLQGFPGITPPSNISGAPGDKGAPGIFGLKGYRGPPGPPGSAALPGSKGDTGNPGAPGTPGTKGWAGDSGPQGRPGVFGLPGEKGPRGEQGFMGNTGPTGAVGDRGPKGPKGDPGFPGAPGTVGAPGIAGIPQKIAVQPGTVGPQGRRGPPGAPGEMGPQGPPGEPGFRGAPGKAGPQGRGGVSAVPGFRGDEGPIGHQGPIGQEGAPGRPGSPGLPGMPGRSVSIGYLLVKHSQTDQEPMCPVGMNKLWSGYSLLYFEGQEKAHNQDLGLAGSCLARFSTMPFLYCNPGDVCYYASRNDKSYWLSTTAPLPMMPVAEDEIKPYISRCSVCEAPAIAIAVHSQDVSIPHCPAGWRSLWIGYSFLMHTAAGDEGGGQSLVSPGSCLEDFRATPFIECNGGRGTCHYYANKYSFWLTTIPEQSFQGSPSADTLKAGLIRTHISRCQVCMKNL

SEQ ID NO: 7779 - protein, 1150 aa, Homo sapiens
MKLKKQVTVCGAAIFCVAVFSLYLMLDRVQHDPTRHQNGGNFPRSQISVLQNRIEQLEQLLEENHEIISHIKDSVLELTANAEGPPAMLPYYTVNGSWVVPPEPRPSFFSISPQDCQFALGGRGQKPELQMLTVSEELPFDNVDGGVWRQGFDISYDPHDWDAEDLQVFVVPHSHNDPGWIKTFDKYYTEQTQHILNSMVSKLQEDPRRRFLWAEVSFFAKWWDNINVQKRAAVRRLVGNGQLEIATGGWVMPDEANSHYFALIDQLIEGHQWLERNLGATPRSGWAVDPFGYSSTMPYLLRRANLTSMLIQRVHYAIKKHFAATHSLEFMWRQTWDSDSSTDIFCHMMPFYSYDVPHTCGPDPKICCQFDFKRLPGGRINCPWKVPPRAITEANVAERAALLLDQYRKKSQLFRSNVLLVPLGDDFRYDKPQEWDAQFFNYQRLFDFFNSRPNLHVQAQFGTLSDYFDALYKRTGVEPGARPPGFPVLSGDFFSYADREDHYWTGYYTSRPFYKSLDRVLEAHLRGAEVLYSLAAAHARRSGLAGRYPLSDFTLLTEARRTLGLFQHHDAITGTAKEAVVVDYGVRLLRSLVNLKQVIIHAAHYLVLGDKETYHFDPEAPFLQVDDTRLSHDALPERTVIQLDSSPRFVVLFNPLEQERFSMVSLLVNSPRVRVLSEEGQPLAVQISAHWSSATEAVPDVYQVSVPVRLPALGLGVLQLQLGLDGHRTLPSSVRIYLHGRQLSVSRHEAFPLRVIDSGTSDFALSNRYMQVWFSGLTGLLKSIRRVDEEHEQQVDMQVLVYGTRTSKDKSGAYLFLPDGEAKPYVPKEPPVLRVTEGPFFSEVVAYYEHIHQAVRLYNLPGVEGLSLDISSLVDIRDYVNKELALHIHTDIDSQGIFFTDLNGFQVQPRRYLKKLPLQANFYPMPVMAYIQDAQKRLTLHTAQALGVSSLKDGQLEVILDRRLMQDDNRGLGQGLKDNKRTCNRFRLLLERRTVGSEVQDSHSTSYPSLLSHLTSMYLNAPALALPVARMQLPGPGLRSFHPLASSLPCDFHLLNLRTLQAEEDTLPSAETALILHRKGFDCGLEAKNLGFNCTTSQGKVALGSLFHGLDVVFLQPTSLTLLYPLASPSNSTDVYLEPMEIATFRLRLG

SEQ ID NO: 7780 - protein, 130 aa, Homo sapiens
MAEYGTLLQDLTNNITLEDLEQLKSACKEDIPSEKSEEITTGSAWFSFLESHNKLDKDNLSYIEHIFEISRRPDLLTMVVDYRTRVLKISEEDELDTKLTRIPSAKKYKDIIRQPSEEEIIKLAPPPKKA

SEQ ID NO: 7781 - protein, 121 aa, Homo sapiens
MARRAGGARMFGSLLLFALLAAGVAPLSWDLPEPRSRASKIRVHSRGNLWATGHFMGKKSLEPSSPSPLGTAPHTSLRDQRLQLSHDLLGILLLKKALGVSLSRPAPQIQYRRLLVQILQK

SEQ ID NO: 7782 - protein, 633 aa, Homo sapiens
MKAIKKSLTEEEYLYLDFSHQTEGCIFPLHTSVTLFLLSYCDCKIFKICLVVTKEVSRDSSLLRDDLIQDVEIQIISRQELPPIVQNCCLPAVVERSDNFCRAGLAVVLRHIIQKSYEADPLKKELLELLGFKKTCLKACAEVSQWTRLCELTIPLAIENFLRESSDQPPTIPVEILQLEKKLSEPVRVHNDDKLRRQKLKQQKADGVGPPLTKGKAKSKVHTQETSEGLDSSSKSLELKVAFSKLTVQEEPATTNREPSHIRKAKASDLPPLEHVFAEGLYFTLADIVLLPCIHHFLVIISRKFSEKLVEFPLLASWYQRIQEVPGVKTAASKCGIQFLHLPKLLTTSTEQHPNLCEVPGVEEQSDPLFIGGPRPTMAKLMEKGIEVMFSPHPCPTWTLDWNVLPAAVSPKEGKMSSDRALRKQQQLNNLVYVVTNQAKPGDRIVDFCSGGGHVGIVLAHMLPSCQVTLIENKELSLIRAKKRSDELGLSNIWFIQANMEYFTGMFNIGVALHACGVATDMVIEHCIKTRASFVTCPCCYGFIQNTSKFNFPKSEQFKKTLSYKEHMILCRFADQTAVQLPPQRRLIGKQCMCLVDLDRARAAEECGYSVQVISMEPESCSPKNNMIVGVPI

SEQ ID NO: 7783 - protein, 410 aa, Homo sapiens
MDLTGLLLDEEGTFSLAGFQDFTFLPGHQKLSARIRRRLYYGWDWEADCSLEELSSPVADIAVELLQKAAPSPIRRLQKKYVAHVSREACISPCAMMLALVYIERLRHRNPDYLQHVSSSDLFLISMMVASKYLYDEGEEEEVFNDEWGAAGGVAVPTLNALERGFLSAMDWHLYTDPREIFEVLSWLESCVAEQQGRWRGWYTYTDLCVLLEQPTWQLALGSLCQRLVKLSCLLAVAYVSSVALAVASVAVIHQSLGLSCIPTPGPPDLGLTSRCLLEPCIPSVPQCLPSLANVSSCLEGSMGLRSLWGSLLASLTPPPLPPPDPPAPPTLLHNCHLCQKLQRDSPTCHACLHPNRTVPTALSSPWYHTYGLAPPWPWSPVLLSLPQPQQCSLFSVMELARLKSFVFPG

SEQ ID NO: 7784 - protein, 84 aa, Homo sapiens
MSEFWLCFNCCIAEQPQPKRRRRIDRSMIGEPTNFVHTAHVGSGDLFSGMNSVSSIQNQMQSKGGYGGGMPANVQMQLVDTKAG

SEQ ID NO: 7785 - protein, 514 aa, Homo sapiens
MPLELTQSRVQKIWVPVDHRPSLPRSCGPKLTNSPTVIVMVGLPARGKTYISKKLTRYLNWIGVPTKVFNVGEYRREAVKQYSSYNFFRPDNEEAMKVRKQCALAALRDVKSYLAKEGGQIAVFDATNTTRERRHMILHFAKENDFKAFFIESVCDDPTVVASNIMEVKISSPDYKDCNSAEAMDDFMKRISCYEASYQPLDPDKCDRDLSLIKVIDVGRRFLVNRVQDHIQSRIVYYLMNIHVQPRTIYLCRHGENEHNLQGRIGGDSGLSSRGKKFASALSKFVEEQNLKDLRVWTSQLKSTIQTAEALRLPYEQWKALNEIDAGVCEELTYEEIRDTYPEEYALREQDKYYYRYPTGESYQDLVQRLEPVIMELERQENVLVICHQAVLRCLLAYFLDKSAEEMPYLKCPLHTVLKLTPVAYGCRVESIYLNVESVCTHRERSEDAKKGPNPLMRRNSVTPLASPEPTKKPRINSFEEHVASTSAALPSCLPPEVPTQLPGQPLLGQACLT

SEQ ID NO: 7786 - protein, 134 aa, Homo sapiens
MVENSPSPLPERAIYGFVLFLSSQFGFILYLVWAFIPESWLNSLGLTYWPQKYWAVALPVYLLIAIVIGYVLLFGINMMSTSPLDSIHTITDNYAKNQQQKKYQEEAIPALRDISISEVNQMFFLAAKELYTKN

SEQ ID NO: 7787 - protein, 568 aa, Homo sapiens
MWLRAFILATLSASAAWAGHPSSPPVVDTVHGKVLGKFVSLEGFAQPVAIFLGIPFAKPPLGPLRFTPPQPAEPWSFVKNATSYPPMCTQDPKAGQLLSELFTNRKENIPLKLSEDCLYLNIYTPADLTKKNRLPVMVWIHGGGLMVGAASTYDGLALAAHENVVVVTIQYRLGIWGFFSTGDEHSRGNWGHLDQVAALRWVQDNIASFGGNPGSVTIFGESAGGESVSVLVLSPLAKNLFHRAISESGVALTSVLVKKGDVKPLAEQIAITAGCKTTTSAVMVHCLRQKTEEELLETTLKMKFLSLDLQGDPRESQPLLGTVIDGMLLLKTPEELQAERNFHTVPYMVGINKQEFGWLIPMQLMSYPLSEGQLDQKTAMSLLWKSYPLVCIAKELIPEATEKYLGGTDDTVKKKDLFLDLIADVMFGVPSVIVARNHRDAGAPTYMYEFQYRPSFSSDMKPKTVIGDHGDELFSVFGAPFLKEGASEEEIRLSKMVMKFWANFARNGNPNGEGLPHWPEYNQKEGYLQIGANTQAAQKLKDKEVAFWTNLFAKKAVEKPPQTEHIEL

SEQ ID NO: 7788 - protein, 766 aa, Homo sapiens
MKTPWKVLLGLLGAAALVTIITVPVVLLNKGTDDATADSRKTYTLTDYLKNTYRLKLYSLRWISDHEYLYKQENNILVFNAEYGNSSVFLENSTFDEFGHSINDYSISPDGQFILLEYNYVKQWRHSYTASYDIYDLNKRQLITEERIPNNTQWVTWSPVGHKLAYVWNNDIYVKIEPNLPSYRITWTGKEDIIYNGITDWVYEEEVFSAYSALWWSPNGTFLAYAQFNDTEVPLIEYSFYSDESLQYPKTVRVPYPKAGAVNPTVKFFVVNTDSLSSVTNATSIQITAPASMLIGDHYLCDVTWATQERISLQWLRRIQNYSVMDICDYDESSGRWNCLVARQHIEMSTTGWVGRFRPSEPHFTLDGNSFYKIISNEEGYRHICYFQIDKKDCTFITKGTWEVIGIEALTSDYLYYISNEYKGMPGGRNLYKIQLSDYTKVTCLSCELNPERCQYYSVSFSKEAKYYQLRCSGPGLPLYTLHSSVNDKGLRVLEDNSALDKMLQNVQMPSKKLDFIILNETKFWYQMILPPHFDKSKKYPLLLDVYAGPCSQKADTVFRLNWATYLASTENIIVASFDGRGSGYQGDKIMHAINRRLGTFEVEDQIEAARQFSKMGFVDNKRIAIWGWSYGGYVTSMVLGSGSGVFKCGIAVAPVSRWEYYDSVYTERYMGLPTPEDNLDHYRNSTVMSRAENFKQVEYLLIHGTADDNVHFQQSAQISKALVDVGVDFQAMWYTDEDHGIASSTAHQHIYTHMSHFIKQCFSLP

SEQ ID NO: 7789 - protein, 547 aa, Homo sapiens
MTKTDPAPMAPPPRGEEEEEEEEDEPVPEAPSPTQERRQKPVVHPSAPAPLPKDYAFTFFDPNDPACQEILFDPQTTIPELFAIVRQWVPQVQHKIDVIGNEILRRGCHVNDRDGLTDMTLLHYACKAGAHGVGDPAAAVRLSQQLLALGADVTLRSRWTNMNALHYAAYFDVPDLVRVLLKGARPRVVNSTCSDFNHGSALHIAASSLCLGAAKCLLEHGANPALRNRKGQVPAEVVPDPMDMSLDKAEAALVAKELRTLLEEAVPLSCALPKVTLPNYDNVPGNLMLSALGLRLGDRVLLDGQKTGTLRFCGTTEFASGQWVGVELDEPEGKNDGSVGGVRYFICPPKQGLFASVSKISKAVDAPPSSVTSTPRTPRMDFSRVTGKGRREHKGKKKTPSSPSLGSLQQRDGAKAEVGDQVLVAGQKQGIVRFYGKTDFAPGYWYGIELDQPTGKHDGSVFGVRYFTCPPRHGVFAPASRIQRIGGSTDSPGDSVGAKKVHQVTMTQPKRTFTTVRTPKDIASENSISRLLFCCWFPWMLRAEMQS

SEQ ID NO: 7790 - protein, 1045 aa, Homo sapiens
MGSQPPLGSPLSREEGEAPPPAPASEGRRRSRRVRLRGSCRHRPSFLGCRELAASAPARPAPASSEIMASAAKEFKMDNFSPKAGTSKLQQTVPADASPDSKCPICLDRFDNVSYLDRCLHKFCFRCVQEWSKNKAECPLCKQPFDSIFHSVRAEDDFKEYVLRPSYNGSFVTPDRRFRYRTTLTRERNASVYSPSGPVNRRTTTPPDSGVLFEGLGISTRPRDVEIPQFMRQIAVRRPTTADERSLRKIQEQDIINFRRTLYRAGARVRNIEDGGRYRDISAEFFRRNPACLHRLVPWLKRELTVLFGAHGSLVNIVQHIIMSNVTRYDLESQAFVSDLRPFLLNRTEHFIHEFISFARSPFNMAAFDQHANYDCPAPSYEEGSHSDSSVITISPDEAETQELDINVATVSQAPWDDETPGPSYSSSEQVHVTMSSLLNTSDSSDEELVTGGATSQIQGVQTNDDLNNDSDDSSDNCVIVGFVKPLAERTPELVELSSDSEDLGSYEKMETVKTQEQEQSYSSGDSDVSRCSSPHSVLGKDEQINKGHCDSSTRIKSKKEEKRSTSLSSPRNLNSSVRGDRVYSPYNHRHRKRGRSRSSDSRSQSRSGHDQKNHRKHHGKKRMKSKRSRSRESSRPRGRRDKKRSRTRDSSWSRRSQTLSLSSESTSRSRSRSSDHGKRRSRSRNRDRYYLRNNYGSRYKWEYTYYSRNKDRDGYESSYRRRTLSRAHYSRQSSSPEFRVQSFSERTNARKKNNHSERKYYYYERHRSRSLSSNRSRTASTGTDRVRNEKPGGKRKYKTRHLEGTNEVAQPSREFASKAKDSHYQKSSSKLDGNYKNESDTFSDSRSSDRETKHKRRKRKTRSLSVEIVYEGKATDTTKHHKKKKKKHKKKHKKHHGDNASRSPVVITIDSDSDKDSEVKEDTECDNSGPQDPLQNEFLAPSLEPFETKDVVTIEAEFGVLDKECDIATLSNNLNNANKTVDNIPPLAASVEQTLDVREESTFVSDLENQPSNIVSLQTEPSRQLPSPRTSLMSVCLGRDCDMS

SEQ ID NO: 7791 - protein, 357 aa, Homo sapiens
MGGAVSAGEDNDDLIDNLKEAQYIRTERVEQAFRAIDRGDYYLEGYRDNAYKDLAWKHGNIHLSAPCIYSEVMEALKLQPGLSFLNLGSGTGYLSTMVGLILGPFGINHGIELHSDVVEYAKEKLESFIKNSDSFDKFEFCEPAFVVGNCLQIASDSHQYDRIYCGAGVQKDHENYMKILLKVGGILVMPIEDQLTQIMRTGQNTWESKNILAVSFAPLVQPSKNDNGKPDSVGLPPCAVRNLQDLARIYIRRTLRNFINDEMQAKGIPQRAPPKRKRKRVKQRINTYVFVGNQLIPQPLDSEEDEKMEEDNKEEEEKDHNEAMKPEEPPQNLLREKIMKLPLPESLKAYLTYFRDK

SEQ ID NO: 7792 - protein, 437 aa, Homo sapiens
MADDPSAADRNVEIWKIKKLIKSLEAARGNGTSMISLIIPPKDQISRVAKMLADEFGTASNIKSRVNRLSVLGAITSVQQRLKLYNKVPPNGLVVYCGTIVTEEGKEKKVNIDFEPFKPINTSLYLCDNKFHTEALTALLSDDSKFGFIVIDGSGALFGTLQGNTREVLHKFTVDLPKKHGRGGQSALRFARLRMEKRHNYVRKVAETAVQLFISGDKVNVAGLVLAGSADFKTELSQSDMFDQRLQSKVLKLVDISYGGENGFNQAIELSTEVLSNVKFIQEKKLIGRYFDEISQDTGKYCFGVEDTLKALEMGAVEILIVYENLDIMRYVLHCQGTEEEKILYLTPEQEKDKSHFTDKETGQEHELIESMPLLEWFANNYKKFGATLEIVTDKSQEGSQFVKGFGGIGGILRYRVDFQGMEYQGGDDEFFDLDDY

SEQ ID NO: 7793 - protein, 603 aa, Homo sapiens
MRRRAARGPGPPPPGPGLSRLPLPLLLLLALGTRGGCAAPAPAPRAEDLSLGVEWLSRFGYLPPADPTTGQLQTQEELSKAITAMQQFGGLEATGILDEATLALMKTPRCSLPDLPVLTQARRRRQAPAPTKWNKRNLSWRVRTFPRDSPLGHDTVRALMYYALKVWSDIAPLNFHEVAGSAADIQIDFSKADHNDGYPFDGPGGTVAHAFFPGHHHTAGDTHFDDDEAWTFRSSDAHGMDLFAVAVHEFGHAIGLSHVAAAHSIMRPYYQGPVGDPLRYGLPYEDKVRVWQLYGVRESVSPTAQPEEPPLLPEPPDNRSSAPPRKDVPHRCSTHFDAVAQIRGEAFFFKGKYFWRLTRDRHLVSLQPAQMHRFWRGLPLHLDSVDAVYERTSDHKIVFFKGDRYWVFKDNNVEEGYPRPVSDFSLPPGGIDAAFSWAHNDRTYFFKDQLYWRYDDHTRHMDPGYPAQSPLWRGVPSTLDDAMRWSDGASYFFRGQEYWKVLDGELEVAPGYPQSTARDWLVCGDSQADGSVAAGVDAAEGPRAPPGQHDQSRSEDGYEVCSCTSGASSPPGAPGPLVAATMLLLLPPLSPGALWTAAQALTL

SEQ ID NO: 7794 - protein, 1312 aa, Homo sapiens
MEEEDESRGKTEESGEDRGDGPPDRDPTLSPSAFILRAIQQAVGSSLQGDLPNDKDGSRCHGLRWRRCRSPRSEPRSQESGGTDTATVLDMATDSFLAGLVSVLDPPDTWVPSRLDLRPGESEDMLELVAEVRIGDRDPIPLPVPSLLPRLRAWRTGKTVSPQSNSSRPTCARHLTLGTGDGGPAPPPAPSSASSSPSPSPSSSSPSPPPPPPPPAPPAPPAPRFDIYDPFHPTDEAYSPPPAPEQKYDPFEPTGSNPSSSAGTPSPEEEEEEEEEEEEEEEDEEEEEGLSQSISRISETLAGIYDDNSLSQDFPGDESPRPDAQPTQPTPAPGTPPQVDSTRADGAMRRRVFVVGTEAEACREGKVSVEVVTAGGAALPPPLLPPGDSEIEEGEIVQPEEEPRLALSLFRPGGRAARPTPAASATPTAQPLPQPPAPRAPEGDDFLSLHAESDGEGALQVDLGEPAPAPPAADSRWGGLDLRRKILTQRRERYRQRSPSPAPAPAPAAAAGPPTRKKSRRERKRSGEAKEAASSSSGTQPAPPAPASPWDSKKHRSRDRKPGSHASSSARRRSRSRSRSRSTRRRSRSTDRRRGGSRRSRSREKRRRRRRSASPPPATSSSSSSRRERHRGKHRDGGGSKKKKKRSRSRGEKRSGDGSEKAPAPAPPPSGSTSCGDRDSRRRGAVPPSIQDLTDHDLFAIKRTITVGRLDKSDPRGPSPAPASSPKREVLYDSEGLSGEERGGKSSQKDRRRSGAASSSSSSREKGSRRKALDGGDRDRDRDRDRDRDRSSKKARPPKESAPSSGPPPKPPVSSGSGSSSSSSSCSSRKVKLQSKVAVLIREGVSSTTPAKDAASAGLGSIGVKFSRDRESRSPFLKPDERAPTEMAKAAPGSTKPKKTKVKAKAGAKKTKGTKGKTKPSKTRKKVRSGGGSGGSGGQVSLKKSKADSCSQAAGTKGAEETSWSGEERAAKVPSTPPPKAAPPPPALTPDSQTVDSSCKTPEVSFLPEEATEEAGVRGGAEEEEEEEEEEEEEEEEEEQQPATTTATSTAAAAPSTAPSAGSTAGDSGAEDGPASRVSQLPTLPPPMPWNLPAGVDCTTSGVLALTALLFKMEEANLASRAKAQELIQATNQILSHRKPPSSLGMTPAPVPTSLGLPPGPSSYLLPGSLPLGGCGSTPPTPTGLAATSDKREGSSSSEGRGDTDKYLKKLHTQERAVEEVKLAIKPYYQKKDITKEEYKDILRKAVHKICHSKSGEINPVKVSNLVRAYVQRYRYFRKHGRKPGDPPGPPRPPKEPGPPDKGGPGLPLPPL

SEQ ID NO: 7795 - protein, 533 aa, Homo sapiens
MKLWVSALLMAWFGVLSCVQAEFFTSIGHMTDLIYAEKELVQSLKEYILVEEAKLSKIKSWANKMEALTSKSAADAEGYLAHPVNAYKLVKRLNTDWPALEDLVLQDSAAGFIANLSVQRQFFPTDEDEIGAAKALMRLQDTYRLDPGTISRGELPGTKYQAMLSVDDCFGMGRSAYNEGDYYHTVLWMEQVLKQLDAGEEATTTKSQVLDYLSYAVFQLGDLHRALELTRRLLSLDPSHERAGGNLRYFEQLLEEEREKTLTNQTEAELATPEGIYERPVDYLPERDVYESLCRGEGVKLTPRRQKRLFCRYHHGNRAPQLLIAPFKEEDEWDSPHIVRYYDVMSDEEIERIKEIAKPKLARATVRDPKTGVLTVASYRVSKSSWLEEDDDPVVARVNRRMQHITGLTVKTAELLQVANYGVGGQYEPHFDFSRRPFDSGLKTEGNRLATFLNYMSDVEAGGATVFPDLGAAIWPKKGTAVFWYNLLRSGEGDYRTRHAACPVLVGCKWVSNKWFHERGQEFLRPCGSTEVD

SEQ ID NO: 7796 - protein, 186 aa, Homo sapiens
MAGHRLVLVLGDLHIPHRCNSLPAKFKKLLVPGKIQHILCTGNLCTKESYDYLKTLAGDVHIVRGDFDENLNYPEQKVVTVGQFKIGLIHGHQVIPWGDMASLALLQRQFDVDILISGHTHKFEAFEHENKFYINPGSATGAYNALETNIIPSFVLMDIQASTVVTYVYQLIGDDVKVERIEYKKP

SEQ ID NO: 7797 - protein, 1129 aa, Homo sapiens
MPATRKPMRYGHTEGHTEVCFDDSGSFIVTCGSDGDVRIWEDLDDDDPKFINVGEKAYSCALKSGKLVTAVSNNTIQVHTFPEGVPDGILTRFTTNANHVVFNGDGTKIAAGSSDFLVKIVDVMDSSQQKTFRGHDAPVLSLSFDPKDIFLASASCDGSVRVWQISDQTCAISWPLLQKCNDVINAKSICRLAWQPKSGKLLAIPVEKSVKLYRRESWSHQFDLSDNFISQTLNIVTWSPCGQYLAAGSINGLIIVWNVETKDCMERVKHEKGYAICGLAWHPTCGRISYTDAEGNLGLLENVCDPSGKTSSSKVSSRVEKDYNDLFDGDDMSNAGDFLNDNAVEIPSFSKGIINDDEDDEDLMMASGRPRQRSHILEDDENSVDISMLKTGSSLLKEEEEDGQEGSIHNLPLVTSQRPFYDGPMPTPRQKPFQSGSTPLHLTHRFMVWNSIGIIRCYNDEQDNAIDVEFHDTSIHHATHLSNTLNYTIADLSHEAILLACESTDELASKLHCLHFSSWDSSKEWIIDLPQNEDIEAICLGQGWAAAATSALLLRLFTIGGVQKEVFSLAGPVVSMAGHGEQLFIVYHRGTGFDGDQCLGVQLLELGKKKKQILHGDPLPLTRKSYLAWIGFSAEGTPCYVDSEGIVRMLNRGLGNTWTPICNTREHCKGKSDHYWVVGIHENPQQLRCIPCKGSRFPPTLPRPAVAILSFKLPYCQIATEKGQMEEQFWRSVIFHNHLDYLAKNGYEYEESTKNQATKEQQELLMKMLALSCKLEREFRCVELADLMTQNAVNLAIKYASRSRKLILAQKLSELAVEKAAELTATQVEEEEEEEDFRKKLNAGYSNTATEWSQPRFRNQVEEDAEDSGEADDEEKPEIHKPGQNSFSKSTNSSDVSAKSGAVTFSSQGRVNPFKVSASSKEPAMSMNSARSTNILDNMGKSSKKSTALSRTTNNEKSPIIKPLIPKPKPKQASAASYFQKRNSQTNKTEEVKEENLKNVLSETPAICPPQNTENQRPKTGFQMWLEENRSNILSDNPDFSDEADIIKEGMIRFRVLSTEERKVWANKAKGETASEGTEAKKRKRVVDESDETENQEEKAKENLNLSKKQKPLDFSTNQKLSAFAFKQE

SEQ ID NO: 7798 - protein, 514 aa, Homo sapiens
MGRKKIQIQRITDERNRQVTFTKRKFGLMKKAYELSVLCDCEIALIIFNHSNKLFQYASTDMDKVLLKYTEYNEPHESRTNADIIETLRKKGFNGCDSPEPDGEDSLEQSPLLEDKYRRASEELDGLFRRYGSTVPAPNFAMPVTVPVSNQSSLQFSNPSGSLVTPSLVTSSLTDPRLLSPQQPALQRNSVSPGLPQRPASAGAMLGGDLNSANGACPSPVGNGYVSARASPGLLPVANGNSLNKVIPAKSPPPPTHSTQLGAPSRKPDLRVITSQAGKGLMHHLNNAQRLGVSQSTHSLTTPVVSVATPSLLSQGLPFSSMPTAYNTDYQLTSAELSSLPAFSSPGGLSLGNVTAWQQPQQPQQPQQPQPPQQQPPQPQQPQPQQPQQPQQPPQQQSHLVPVSLSNLIPGSPLPHVGAALTVTTHPHISIKSEPVSPSRERSPAPPPPAVFPAARPEPGDGLSSPAGGSYETGDRDDGRGDFGPTLGLLRPAPEPEAEGSAVKRMRLDTWTLK

SEQ ID NO: 7799 - protein, 701 aa, Homo sapiens [sequence omitted]

SEQ ID NO: 7800 - protein, 540 aa, Homo sapiens
MRGLLCWPVLLLLLQPWETQLQLTGPRCHTGPLDLVFVIDSSRSVRPFEFETMRQFLMGLLRGLNVGPNATRVGVIQYSSQVQSVFPLRAFSRREDMERAIRDLVPLAQGTMTGLAIQYAMNVAFSVAEGARPPEERVPRVAVIVTDGRPQDRVAEVAAQARARGIEIYAVGVQRADVGSLRAMASPPLDEHVFLVESFDLIQEFGLQFQSRLCAIDYCSFGNHSCQHECVSTPGGPRCHCREGHDLQPDGRSCQVRDLCNGVDHGCEFQCVSEGLSYRCLCPEGRQLQADGKSCNRCREGHVDLVLLVDGSKSVRPQNFELVKRFVNQIVDFLDVSPEGTRVGLVQFSSRVRTEFPLGRYGTAAEVKQAVLAVEYMERGTMTGLALRHMVEHSFSEAQGARPRALNVPRVGLVFTDGRSQDDISVWAARAKEEGIVMYAVGVGKAVEAELREIASEPAELHVSYAPDFGTMTHLLENLRGSICPEEGISAGTELRSPCECESLVEFQGRTLGALESLTLNLAQLTARLEDLENQLANQK

SEQ ID NO: 7801 - protein, 326 aa, Homo sapiens
MLLSKFGSLAHLCGPGGVDHLPVKILQPAKADKESFEKAYQVGAVLGSGGFGTVYAGSRIADGLPVAVKHVVKERVTEWGSLGGATVPLEVVLLRKVGAAGGARGVIRLLDWFERPDGFLLVLERPEPAQDLFDFITERGALDEPLARRFFAQVLAAVRHCHSCGVVHRDIKDENLLVDLRSGELKLIDFGSGALLKDTVYTDFDGTRVYSPPEWIRYHRYHGRSATVWSLGVLLYDMVCGDIPFEQDEEILRGRLLFRRRVSPECQQLIRWCLSLRPSERPSLDQIAAHPWMLGADGGVPESCDLRLCTLDPDDVASTTSSSESL

SEQ ID NO: 7802 - protein, 959 aa, Homo sapiens
MAASTGYVRLWGAARCWVLRRPMLAAAGGRVPTAAGAWLLRGQRTCDASPPWALWGRGPAIGGQWRGFWEASSRGGGAFSGGEDASEGGAEEGAGGAGGSAGAGEGPVITALTPMTIPDVFPHLPLIAITRNPVFPRFIKIIEVKNKKLVELLRRKVRLAQPYVGVFLKRDDSNESDVVESLDEIYHTGTFAQIHEMQDLGDKLRMIVMGHRRVHISRQLEVEPEEPEAENKHKPRRKSKRGKKEAEDELSARHPAELAMEPTPELPAEVLMVEVENVVHEDFQVTEEVKALTAEIVKTIRDIIALNPLYRESVLQMMQAGQRVVDNPIYLSDMGAALTGAESHELQDVLEETNIPKRLYKALSLLKKEFELSKLQQRLGREVEEKIKQTHRKYLLQEQLKIIKKELGLEKDDKDAIEEKFRERLKELVVPKHVMDVVDEELSKLGLLDNHSSEFNVTRNYLDWLTSIPWGKYSNENLDLARAQAVLEEDHYGMEDVKKRILEFIAVSQLRGSTQGKILCFYGPPGVGKTSIARSIARALNREYFRFSVGGMTDVAEIKGHRRTYVGAMPGKIIQCLKKTKTENPLILIDEVDKIGRGYQGDPSSALLELLDPEQNANFLDHYLDVPVDLSKVLFICTANVTDTIPEPLRDRMEMINVSGYVAQEKLAIAERYLVPQARALCGLDESKAKLSSDVLTLLIKQYCRESGVRNLQKQVEKVLRKSAYKIVSGEAESVEVTPENLQDFVGKPVFTVERMYDVTPPGVVMGLAWTAMGGSTLFVETSLRRPQDKDAKGDKDGSLEVTGQLGEVMKESARIAYTFARAFLMQHAPANDYLVTSHIHLHVPEGATPKDGPSAGCTIVTALLSLAMGRPVRQNLAMTGEVSLTGKILPVGGIKEKTIAAKRAGVTCIVLPAENKKDFYDLAAFITEGLEVHFVEHYREIFDIAFPDEQAEALAVER

SEQ ID NO: 7803 - protein, 238 aa, Homo sapiens
MWVPVVFLTLSVTWIGAAPLILSRIVGGWECEKHSQPWQVLVASRGRAVCGGVLVHPQWVLTAAHCIRNKSVILLGRHSLFHPEDTGQVFQVSHSFPHPLYDMSLLKNRFLRPGDDSSHDLMLLRLSEPAELTDAVKVMDLPTQEPALGTTCYASGWGSIEPEEFLTPKKLQCVDLHVISNDVCAQVHPQKVTKFMLCAGRWTGGKSTCSWVILITELTMPALPMVLHGSLVPWRGGV

SEQ ID NO: 7804 - protein, 935 aa, Homo sapiens
MELRVLLCWASLAAALEETLLNTKLETADLKWVTFPQVDGQWEELSGLDEEQHSVRTYEVCDVQRAPGQAHWLRTGWVPRRGAVHVYATLRFTMLECLSLPRAGRSCKETFTVFYYESDADTATALTPAWMENPYIKVDTVAAEHLTRKRPGAEATGKVNVKTLRLGPLSKAGFYLAFQDQGACMALLSLHLFYKKCAQLTVNLTRFPETVPRELVVPVAGSCVVDAVPAPGPSPSLYCREDGQWAEQPVTGCSCAPGFEAAEGNTKCRACAQGTFKPLSGEGSCQPCPANSHSNTIGSAVCQCRVGYFRARTDPRGAPCTTPPSAPRSVVSRLNGSSLHLEWSAPLESGGREDLTYALRCRECRPGGSCAPCGGDLTFDPGPRDLVEPWVVVRGLRPDFTYTFEVTALNGVSSLATGPVPFEPVNVTTDREVPPAVSDIRVTRSSPSSLSLAWAVPRAPSGAVLDYEVKYHEKGAEGPSSVRFLKTSENRAELRGLKRGASYLVQVRARSEAGYGPFGQEHHSQTQLDESEGWREQLALIAGTAVVGVVLVLVVIVVAVLCLRKQSNGREAEYSDKHGQYLIGHGTKVYIDPFTYEDPNEAVREFAKEIDVSYVKIEEVIGAGEFGEVCRGRLKAPGKKESCVAIKTLKGGYTERQRREFLSEASIMGQFEHPNIIRLEGVVTNSMPVMILTEFMENGALDSFLRLNDGQFTVIQLVGMLRGIASGMRYLAEMSYVHRDLAARNILVNSNLVCKVSDFGLSRFLEENSSDPTYTSSLGGKIPIRWTAPEAIAFRKFTSASDAWSYGIVMWEVMSFGERPYWDMSNQDVINAIEQDYRLPPPPDCPTSLHQLMLDCWQKDRNARPRFPQVVSALDKMIRNPASLKIVARENGGDLLRIGVTLAGHQKKILASVQHMKSQAKPGTPGGTGGPAPQY

SEQ ID NO: 7805 - protein, 740 aa, Homo sapiens
MSFGRDMELEHFDERDKAQRYSRGSRVNGLPSPTHSAHCSFYRTRTLQTLSSEKKAKKVRFYRNGDRYFKGIVYAISPDRFRSFEALLADLTRTLSDNVNLPQGVRTIYTIDGLKKISSLDQLVEGESYVCGSIEPFKKLEYTKNVNPNWSVNVKTTSASRAVSSLATAKGSPSEVRENKDFIRPKLVTIIRSGVKPRKAVRILLNKKTAHSFEQVLTDITDAIKLDSGVVKRLYTLDGKQVMCLQDFFGDDDIFIACGPEKFRYQDDFLLDESECRVVKSTSYTKIASSSRRSTTKSPGPSRRSKSPASTSSVNGTPGSQLSTPRSGKSPSPSPTSPGSLRKQRSSQHGGSSTSLASTKVCSSMDENDGPGEEVSEEGFQIPATITERYKVGRTIGDGNFAVVKECVERSTAREYALKIIKKSKCRGKEHMIQNEVSILRRVKHPNIVLLIEEMDVPTELYLVMELVKGGDLFDAITSTNKYTERDASGMLYNLASAIKYLHSLNIVHRDIKPENLLVYEHQDGSKSLKLGDFGLATIVDGPLYTVCGTPTYVAPEIIAETGYGLKVDIWAAGVITYILLCGFPPFRGSGDDQEVLFDQILMGQVDFPSPYWDNVSDSAKELITMMLLVDVDQRFSAVQVLEHPWVNDDGLPENEHQLSVAGKIKKHFNTGPKPNSTAAGVSVIATTALDKERQVFRRRRNQDVRSRYKAQPAPPELNSESEDYSPSSSETVRSPNSPF

SEQ ID NO: 7806 - protein, 400 aa, Homo sapiens
MNPASAPPPLPPPGQQVIHVTQDLDTDLEALFNSVMNPKPSSWRKKILPESFFKEPDSGSHSRQSSTDSSGGHPGPRLAGGAQHVRSHSSPASLQLGTGAGAAGSPAQQHAHLRQQSYDVTDELPLPPGWEMTFTATGQRYFLNHIEKITTWQDPRKAMNQPLNHMNLHPAVSSTPVPQRSMAVSQPNLVMNHQHQQQMAPSTLSQQNHPTQNPPAGLMSMPNALTTQQQQQQKLRLQRIQMERERIRMRQEELMRQEAALCRQLPMEAETLAPVQAAVNPPTMTPDMRSITNNSSDPFLNGGPYHSREQSTDSGLGLGCYSVPTTPEDFLSNVDEMDTGENAGQTPMNINPQQTRFPDFLDCLPGTNVDLGTLESEDLIPLFNDVESALNKSEPFLTWL

SEQ ID NO: 7807 - protein, 1047 aa, Homo sapiens
MAEKRPLRTLGPVMYGKLPRLETDSGLEHSLPHSVGNQDPCTYKGSYFSCPMAGTPKAESEQLASWTPYPPLYSTGMAGPPLQADNLLTNCLFYRSPAEGPEKMQDSSPVELLPFSPQAHSYPGPPLAAPKPVYRNPLCYGLSTCLGEGAVKRPLDVDWTLATGPLLPSADPPCSLAPAPSKGQTLDGTFLRGVPAEGSSKDSSGSFSPCQPFLEKYQTIHSTGFLASRYTGPYPRNSKQAMSEGPSSPWTQLAQPLGPPCQDTGPTHYPPPHHPPPHPPQALPCPPACRHPEKQGSYSPALPLQPLGGHKGTGYQAGGLGSPYLRQQAAQAPYIPPLGLDAYPYPSAPLPAPSPGLKLEPPLTPRCPLDFAPQTLSFPYARDDLSLYGASPGLGGTPPSQNNVRAVPQPGAFQRACQPLPASQPCSEPVRPAQEAEEKTWLPSCRKEKLQPRLSEHSGPPIVIRDSPVPCTPPALPPCARECQSLPQKEGARPPSSPPMPVIDNVFSLAPYRDYLDVPAPEATTEPDSATAEPDSAPATSEGQDKGCRGTLPAQEGPSGSKPLRGSLKEEVALDLSVRKPTAEASPVKASRSVEHAKPTAAMDVPDVGNMVSDLPGLKKIDTEAPGLPGVPVTTDAMPRTNFHSSVAFMFRKFKILRPAPLPAAVVPSTPTSAPAPTQPAPTPTSGPIGLRILAQQPLSVTCFSLALPSPPAVAVASPAPAPAPSPAPARAQAPASARDPAPAPAPVAGPAPASTSAPGDSLEQHFTGLHASLCDAISGSVAHSPPEKLREWLETAGPWGQAAWQDCQGVQGLLAKLLSQLQRFDRTHRCPFPHVVRAGAIFVPIHLVKERLFPRLPPASVDHVLQEHRVELRPTTLSEERALRELALPGCTSRMLKLLALRQLPDIYPDLLGLQWRDCVRRQLGDFDTEAGAVSSSEPTVARGEPESLALAQKSPAPKVRKPGRKPPTPGPEKAEAAAGEESCGASPTPATSASPPGPTLKARFRSLLETAWLNGLALPTWGHKSSRPDQPSPCPQLLDSQSHHL

SEQ ID NO: 7808 - protein, 794 aa, Homo sapiens
MNIDDKLEGLFLKCGGIDEMQSSRTMVVMGGVSGQSTVSGELQDSVLQDRSMPHQEILAADEVLQESEMRQQDMISHDELMVHEETVKNDEEQMETHERLPQGLQYALNVPISVKQEITFTDVSEQLMRDKKQIREPVDLQKKKKRKQRSPAKILTINEDGSLGLKTPKSHVCEHCNAAFRTNYHLQRHVFIHTGEKPFQCSQCDMRFIQKYLLQRHEKIHTGEKPFRCDECGMRFIQKYHMERHKRTHSGEKPYQCEYCLQYFSRTDRVLKHKRMCHENHDKKLNRCAIKGGLLTSEEDSGFSTSPKDNSLPKKKRQKTEKKSSGMDKESALDKSDLKKDKNDYLPLYSSSTKVKDEYMVAEYAVEMPHSSVGGSHLEDASGEIHPPKLVLKKINSKRSLKQPLEQNQTISPLSTYEESKVSKYAFELVDKQALLDSEGNADIDQVDNLQEGPSKPVHSSTNYDDAMQFLKKKRYLQAASNNSREYALNVGTIASQPSVTQAAVASVIDESTTASILESQALNVEIKSNHDKNVIPDEVLQTLLDHYSHKANGQHEISFSVADTEVTSSISINSSEVPEVTPSENVGSSSQASSSDKANMLQEYSKFLQQALDRTSQNDAYLNSPSLNFVTDNQTLPNQPAFSSIDKQVYATMPINSFRSGMNSPLRTTPDKSHFGLIVGDSQHSFPFSGDETNHASATSTQDFLDQVTSQKKAEAQPVHQAYQMSSFEQPFRAPYHGSRAGIATQFSTANGQVNLRGPGTSAEFSEFPLVNVNDNRAGMTSSPDATTGQTFG

SEQ ID NO: 7809 - protein, 2365 aa, Homo sapiens
MESVSESSQQQKRKPVIHGLEDQKRIYTDWANHYLAKSGHKRLIRDLQQDVTDGVLLAQIIQVVANEKIEDINGCPKNRSQMIENIDACLNFLAAKGINIQGLSAEEIRNGNLKAILGLFFSLSRYKQQQQQPQKQHLSSPLPPAVSQVAGAPSQCQAGTPQQQVPVTPQAPCQPHQPAPHQQSKAQAEMQSRLPGPTARVSAAGSEAKTRGGSTTANNRRSQSFNNYDKSKPVTSPPPPPSSHEKEPLASSASSHPGMSDNAPASLESGSSSTPTNCSTSSAIPQPGAATKPWRSKSLSVKHSATVSMLSVKPPGPEAPRPTPEAMKPAPNNQKSMLEKLKLFNSKGGSKAGEGPGSRDTSCERLETLPSFEESEELEAASRMLTTVGPASSSPKIALKGIAQRTFSRALTNKKSSLKGNEKEKEKQQREKDKEKSKDLAKRASVTERLDLKEEPKEDPSGAAVPEMPKKSSKIASFIPKGGKLNSAKKEPMAPSHSGIPKPGMKSMPGKSPSAPAPSKEGERSRSGKLSSGLPQQKPQLDGRHSSSSSSLASSEGKGPGGTTLNHSISSQTVSGSVGTTQTTGSNTVSVQLPQPQQQYNHPNTATVAPFLYRSQTDTEGNVTAESSSTGVSVEPSHFTKTGQPALEELTGEDPEARRLRTVKNIADLRQNLEETMSSLRGTQVTHSTLETTFDTNVTTEMSGRSILSLTGRPTPLSWRLGQSSPRLQAGDAPSMGNGYPPRANASRFINTESGRYVYSAPLRRQLASRGSSVCHVDVSDKAGDEMDLEGISMDAPGYMSDGDVLSKNIRTDDITSGYMTDGGLGLYTRRLNRLPDGMAVVRETLQRNTSLGLGDADSWDDSSSVSSGISDTIDNLSTDDINTSSSISSYANTPASSRKNLDVQTDAEKHSQVERNSLWSGDDVKKSDGGSDSGIKMEPGSKWRRNPSDVSDESDKSTSGKKNPVISQTGSWRRGMTAQVGITMPRTKPSAPAGALKTPGTGKTDDAKVSEKGRLSPKASQVKRSPSDAGRSSGDESKKPLPSSSRTPTANANSFGFKKQSGSAAGLAMITASGVTVTSRSATLGKIPKSSALVSRSAGRKSSMDGAQNQDDGYLALSSRTNLQYRSLPRPSKSNSRNGAGNRSSTSSIDSNISSKSAGLPVPKLREPSKTALGSSLPGLVNQTDKEKGISSDNESVASCNSVKVNPAAQPVSSPAQTSLQPGAKYPDVASPTLRRLFGGKPTKQVPIATAENMKNSVVISNPHATMTQQGNLDSPSGSGVLSSGSSSPLYSKNVDLNQSPLASSPSSAHSAPSNSLTWGTNASSSSAVSKDGLGFQSVSSLHTSCESIDISLSSGGVPSHNSSTGLIASSKDDSLTPFVRTNSVKTTLSESPLSSPAASPKFCRSTLPRKQDSDPHLDRNTLPKKGLRYTPTSQLRTQEDAKEWLRSHSAGGLQDTAANSPFSSGSSVTSPSGTRFNFSQLASPTTVTQMSLSNPTMLRTHSLSNADGQYDPYTDSRFRNSSMSLDEKSRTMSRSGSFRDGFEEVHGSSLSLVSSTSSVYSTPEEKCQSEIRKLRRELDASQEKVSALTTQLTANAHLVAAFEQSLGNMTIRLQSLTMTAEQKDSELNELRKTIELLKKQNAAAQAAINGVINTPELNCKGNGTAQSADLRIRRQHSSDSVSSINSATSHSSVGSNIESDSKKKKRKNWLRSSFKQAFGKKKSPKSASSHSDIEEMTDSSLPSSPKLPHNGSTGSTPLLRNSHSNSLISECMDSEAETVMQLRNELRDKEMKLTDIRLEALSSAHQLDQLREAMNRMQSEIEKLKAENDRLKSESQGSGCSRAPSQVSISASPRQSMGLSQHSLNLTESTSLDMLLDDTGECSARKEGGRHVKIVVSFQEEMKWKEDSRPHLFLIGCIGVSGKTKWDVLDGVVRRLFKEYIIHVDPVSQLGLNSDSVLGYSIGEIKRSNTSETPELLPCGYLVGENTTISVTVKGLAENSLDSLVFESLIPKPILQRYVSLLIEHRRIILSGPSGTGKTYLANRLSEYIVLREGRELTDGVIATFNVDHKSSKELRQYLSNLADQCNSENNAVDMPLVIILDNLHHVSSLGEIFNGLLNCKYHKCPYIIGTMNQATSSTPNLQLHHNFRWVLCANHTEPVKGFLGRFLRRKLMETEISGRVRNMELVKIIDWIPKVWHHLNRFLEAHSSSDVTIGPRLFLSCPIDVDGSRVWFTDLWNYSIIPYLLEAVREGLQLYGRRAPWEDPAKWVMDTYPWAASPQQHEWPPLLQLRPEDVGFDGYSMPREGSTSKQMPPSDAEGDPLMNMLMRLQEAANYSSPQSYDSDSNSNSHHDDILDSSLESTL

SEQ ID NO: 7810 - protein, 1032 aa, Homo sapiens
MGFCRSALHPLSLLVQAIMLAMTLALGTLPAFLPCELQPHGLVNCNWLFLKSVPHFSMAAPRGNVTSLSLSSNRIHHLHDSDFAHLPSLRHLNLKWNCPPVGLSPMHFPCHMTIEPSTFLAVPTLEELNLSYNNIMTVPALPKSLISLSLSHTNILMLDSASLAGLHALRFLFMDGNCYYKNPCRQALEVAPGALLGLGNLTHLSLKYNNLTVVPRNLPSSLEYLLLSYNRIVKLAPEDLANLTALRVLDVGGNCRRCDHAPNPCMECPRHFPQLHPDTFSHLSRLEGLVLKDSSLSWLNASWFRGLGNLRVLDLSENFLYKCITKTKAFQGLTQLRKLNLSFNYQKRVSFAHLSLAPSFGSLVALKELDMHGIFFRSLDETTLRPLARLPMLQTLRLQMNFINQAQLGIFRAFPGLRYVDLSDNRISGASELTATMGEADGGEKVWLQPGDLAPAPVDTPSSEDFRPNCSTLNFTLDLSRNNLVTVQPEMFAQLSHLQCLRLSHNCISQAVNGSQFLPLTGLQVLDLSHNKLDLYHEHSFTELPRLEALDLSYNSQPFGMQGVGHNFSFVAHLRTLRHLSLAHNNIHSQVSQQLCSTSLRALDFSGNALGHMWAEGDLYLHFFQGLSGLIWLDLSQNRLHTLLPQTLRNLPKSLQVLRLRDNYLAFFKWWSLHFLPKLEVLDLAGNQLKALTNGSLPAGTRLRRLDVSCNSISFVAPGFFSKAKELRELNLSANALKTVDHSWFGPLASALQILDVSANPLHCACGAAFMDFLLEVQAAVPGLPSRVKCGSPGQLQGLSIFAQDLRLCLDEALSWDCFALSLLAVALGLGVPMLHHLCGWDLWYCFHLCLAWLPWRGRQSGRDEDALPYDAFVVFDKTQSAVADWVYNELRGQLEECRGRWALRLCLEERDWLPGKTLFENLWASVYGSRKTLFVLAHTDRVSGLLRASFLLAQQRLLEDRKDVVVLVILSPDGRRSRYVRLRQRLCRQSVLLWPHQPSGQRSFWAQLGMALTRDNHHFYNRNFCQGPTAE

SEQ ID NO: 7811 - protein, 524 aa, Homo sapiens
MAAPEPARAAPPPPPPPPPPPGADRVVKAVPFPPTHRLTSEEVFDLDGIPRVDVLKNHLVKEGRVDEEIALRIINEGAAILRREKTMIEVEAPITVCGDIHGQFFDLMKLFEVGGSPANTRYLFLGDYVDRGYFSIECVLYLWVLKILYPSTLFLLRGNHECRHLTEYFTFKQECKIKYSERVYEACMEAFDSLPLAALLNQQFLCVHGGLSPEIHTLDDIRRLDRFKEPPAFGPMCDLLWSDPSEDFGNEKSQEHFSHNTVRGCSYFYNYPAVCEFLQNNNLLSIIRAHEAQDAGYRMYRKSQTTGFPSLITIFSAPNYLDVYNNKAAVLKYENNVMNIRQFNCSPHPYWLPNFMDVFTWSLPFVGEKVTEMLVNVLSICSDDELMTEGEDQFDGSAAARKEIIRNKIRAIGKMARVFSVLREESESVLTLKGLTPTGMLPSGVLAGGRQTLQSATVEAIEAEKAIRGFSPPHRICSFEEAKGLDRINERMPPRKDAVQQDGFNSLNTAHATENHGTGNHTAQ

SEQ ID NO: 7812 - protein, 121 aa, Homo sapiens
MPSDRPFKQRRSFADRCKEVQQIRDQHPSKIPVIIERYKGEKQLPVLDKTKFLVPDHVNMSELVKIIRRRLQLNPTQAFFLLVNQHSMVSVSTPIADIYEQEKDEDGFLYMVYASQETFGF

SEQ ID NO: 7813 - protein, 772 aa, Homo sapiens
MRLALLWALGLLGAGSPLPSWPLPNIGGTEEQQAESEKAPREPLEPQVLQDDLPISLKKVLQTSLPEPLRIKLELDGDSHILELLQNRELVPGRPTLVWYQPDGTRVVSEGHTLENCCYQGRVRGYAGSWVSICTCSGLRGLVVLTPERSYTLEQGPGDLQGPPIISRIQDLHLPGHTCALSWRESVHTQKPPEHPLGQRHIRRRRDVVTETKTVELVIVADHSEAQKYRDFQHLLNRTLEVALLLDTFFRPLNVRVALVGLEAWTQRDLVEISPNPAVTLENFLHWRRAHLLPRLPHDSAQLVTGTSFSGPTVGMAIQNSICSPDFSGGVNMDHSTSILGVASSIAHELGHSLGLDHDLPGNSCPCPGPAPAKTCIMEASTDFLPGLNFSNCSRRALEKALLDGMGSCLFERLPSLPPMAAFCGNMFVEPGEQCDCGFLDDCVDPCCDSLTCQLRPGAQCASDGPCCQNCQLRPSGWQCRPTRGDCDLPEFCPGDSSQCPPDVSLGDGEPCAGGQAVCMHGRCASYAQQCQSLWGPGAQPAAPLCLQTANTRGNAFGSCGRNPSGSYVSCTPRDAICGQLQCQTGRTQPLLGSIRDLLWETIDVNGTELNCSWVHLDLGSDVAQPLLTLPGTACGPGLVCIDHRCQRVDLLGAQECRSKCHGHGVCDSNRHCYCEEGWAPPDCTTQLKATSSLTTGLLLSLLVLLVLVMLGASYWYRARLHQRLCQLKGPTCQYSLRGQPSPHPQGSHCLPTPRAGAHRVTCPAQGLESRP

SEQ ID NO: 7814 - protein, 455 aa, Homo sapiens
MENKKKDKDKSDDRMARPSGRSGHNTRGTGSSSSGVLMVGPNFRVGKKIGCGNFGELRLGKNLYTNEYVAIKLEPMKSRAPQLHLEYRFYKQLGSGDGIPQVYYFGPCGKYNAMVLELLGPSLEDLFDLCDRTFSLKTVLMIAIQLISRMEYVHSKNLIYRDVKPENFLIGRPGNKTQQVIHIIDFGLAKEYIDPETKKHIPYREHKSLTGTARYMSINTHLGKEQSRRDDLEALGHMFMYFLRGSLPWQGLKADTLKERYQKIGDTKRATPIEVLCENFPEMATYLRYVRRLDFFEKPDYDYLRKLFTDLFDRKGYMFDYEYDWIGKQLPTPVGAVQQDPALSSNREAHQHRDKMQQSKNQSADHRAAWDSQQANPHHLRAHLAADRHGGSVQVVSSTNGELNTDDPTAGRSNAPITAPTEVEVMDETNCQKVLNMWCCCFFKRRKRKTIQRHK

SEQ ID NO: 7815 - protein, 575 aa, Homo sapiens
MRPWTGSWRWIMLILFAWGTLLFYIGGHLVRDNDHPDHSSRELSKILAKLERLKQQNEDLRRMAESLRIPEGPIDQGPAIGRVRVLEEQLVKAKEQIENYKKQTRNGLGKDHEILRRRIENGAKELWFFLQSELKKLKNLEGNELQRHADEFLLDLGHHERSIMTDLYYLSQTDGAGDWREKEAKDLTELVQRRITYLQNPKDCSKAKKLVCNINKGCGYGCQLHHVVYCFMIAYGTQRTLILESQNWRYATGGWETVFRPVSETCTDRSGISTGHWSGEVKDKNVQVVELPIVDSLHPRPPYLPLAVPEDLADRLVRVHGDPAVWWVSQFVKYLIRPQPWLEKEIEEATKKLGFKHPVIGVHVRRTDKVGTEAAFHPIEEYMVHVEEHFQLLARRMQVDKKRVYLATDDPSLLKEAKTKYPNYEFISDNSISWSAGLHNRYTENSLRGVILDIHFLSQADFLVCTFSSQVCRVAYEIMQTLHPDASANFHSLDDIYYFGGQNAHNQIAIYAHQPRTADEIPMEPGDIIGVAGNHWDGYSKGVNRKLGRTGLYPSYKVREKIETVKYPTYPEAEK

SEQ ID NO: 7816 - protein, 741 aa, Homo sapiens
MDIEDEENMSSSSTDVKENRNLDNVSPKDGSTPGPGEGSQLSNGGGGGPGRKRPLEEGSNGHSKYRLKKRRKTPGPVLPKNALMQLNEIKPGLQYTLLSQTGPVHAPLFVMSVEVNGQVFEGSGPTKKKAKLHAAEKALRSFVQFPNASEAHLAMGRTLSVNTDFTSDQADFPDTLFNGFETPDKAEPPFYVGSNGDDSFSSSGDLSLSASPVPASLAQPPLPVLPPFPPPSGKNPVMILNELRPGLKYDFLSESGESHAKSFVMSVVVDGQFFEGSGRNKKLAKARAAQSALAAIFNLHLDQTPSRQPIPSEGLQLHLPQVLADAVSRLVLGKFGDLTDNFSSPHARRKVLAGVVMTTGTDVKDAKVISVSTGTKCINGEYMSDRGLALNDCHAEIISRRSLLRFLYTQLELYLNNKDDQKRSIFQKSERGGFRLKENVQFHLYISTSPCGDARIFSPHEPILEGSRSYTQAGVQWCNHGSLQPRPPGLLSDPSTSTFQGAGTTEPADRHPNRKARGQLRTKIESGEGTIPVRSNASIQTWDGVLQGERLLTMSCSDKIARWNVVGIQGSLLSIFVEPIYFSSIILGSLYHGDHLSRAMYQRISNIEDLPPLYTLNKPLLSGISNAEARQPGKAPNFSVNWTVGDSAIEVINATTGKDELGRASRLCKHALYCRWMRVHGKVPSHLLRSKITKPNVYHESKLAAKEYQAAKARLFTAFIKAGLGAWVEKPTEQDQFSLTP

SEQ ID NO: 7817 - protein, 508 aa, Homo sapiens
MELDSALEAPSQEDSNLSEELSHSAFGQAFSKILHCLARPEARRGNVKDAVLKDLGDLIEATEFDRLFEGTGARLRGMPETLGQVAKALEKYAAPSKEEEGGGDGHSEAAEKAAQVGLLFLKLLGKVETAKNSLVGPAWQTGLHHLAGPVYIFAITHSLEQPWTTPRSREVAREVLTSLLQVTECGSVAGFLHGENEDEKGRLSVILGLLKPDLYKESWKNNPAIKHVFSWTLQQVTRPWLSQHLERVLPASLVISDDYQTENKILGVHCLHHIVLNVPAADLLQYNRAQVLYHAISNHLYTPEHHLIQAVLLCLLDLFPILEKTLHWKGDGARPTTHCDEVLRLILTHMEPEHRLLLRRTYARNLPAFVNRLGILTVRHLKRLERVIIGYLEVYDGPEEEARLKILETLKLLMQHTWPRVSCRLVVLLKALLKLICDVARDPNLTPESVKSALLQEATDCLILLDRCSQGRVKGLLAKIPQSCEDRKVVNYIRKVQQVSEGAPYNGT

SEQ ID NO: 7818 - protein, 489 aa, Homo sapiens
MAELNTHVNVKEKIYAVRSVVPNKSNNEIVLVLQQFDFNVDKAVQAFVDGSAIQVLKEWNMTGKKKNNKRKRSKSKQHQGNKDAKDKVERPEAGPLQPQPPQIQNGPMNGCEKDSSSTDSANEKPALIPREKKISILEEPSKALRGVTGPNIEKSVKDLQRCTVSLTRYRVMIKEEVDSSVKKIKAAFAELHNCIIDKEVSLMAEMDKVKEEAMEILTARQKKAEELKRLTDLASQMAEMQLAELRAEIKHFVSERKYDEELGKAARFSCDIEQLKAQIMLCGEITHPKNNYSSRTPCSSLLPLLNAHAATSGKQSNFSRKSSTHNKPSEGKAANPKMVSSLPSTADPSHQTMPANKQNGSSNQRRRFNPQYHNNRLNGPAKSQGSGNEAEPLGKGNSRHEHRRQPHNGFRPKNKGGAKNQEASLGMKTPEAPAHSEKPRRRQHAADTSEARPFRGSVGRVSQCNLCPTRIEVSTDAAVLSVPAVTLVA

SEQ ID NO: 7819 - protein, 176 aa, Homo sapiens
MAAPVLLRVSVPRWERVARYAVCAAGILLSIYAYHVEREKERDPEHRALCDLGPWVKCSAALASRWGRGFGLLGSIFGKDGVLNQPNSVFGLIFYILQLLLGMTASAVAALILMTSSIMSVVGSLYLAYILYFVLKEFCIICIVTYVLNFLLLIINYKRLVYLNEAWKRQLQPKQD

SEQ ID NO: 7820 - protein, 150 aa, Homo sapiens
MYGKIIFVLLLSEIVSISALSTTEVAMHTSTSSSVTKSYISSQTNDTHKRDTYAATPRAHEVSEISVRTVYPPEEETGERVQLAHHFSEPEITLIIFGVMAGVIGTILLISYGIRRLIKKSPSDVKPLPSPDTDVPLSSVEIENPETSDQ

SEQ ID NO: 7821 - protein, 251 aa, Homo sapiens
MEGGAAAATPTALPYYVAFSQLLGLTLVAMTGAWLGLYRGGIAWESDLQFNAHPLCMVIGLIFLQGNALLVYRVFRNEAKRTTKVLHGLLHIFALVIALVGLVAVFDYHRKKGYADLYSLHSWCGILVFVLYFVQWLVGFSFFLFPGASFSLRSRYRPQHIFFGATIFLLSVGTALLGLKEALLFNLGGKYSAFEPEGVLANVLGLLLACFGGAVLYILTRADWKRPSQAEEQALSMDFKTLTEGDSPGSQ

SEQ ID NO: 7822 - protein, 1119 aa, Homo sapiens
MMTSVSSDHCRGAREKPQISAAQSTQPQKQVVQATAEQMRLAQVIFDKNDSDFEAKVKQLMEVTGKNQDECIVALHDCNGDVNKAINILLEGNSDTTSWETVGCKKKNFAKENSENKENREKKSEKESSRGRGNNNRKGRGGNRGREFRGEENGIDCNQVDKPSDRGKRARGRGFGRGRGRGAGRFSTQGMGTFNPADYSDSTSTDVCGTKLVVWEAAQNGADEGTELASNTHNIAQDLSNKSSYGLKGAWKNSVEEWTTEDWTEDLSETKVFTASSAPAENHILPGQSIDLVALLQKPVPHSQASEANSFETSQQQGFGQALVFTNSQHNNQMAPGTGSSTAVNSCSPQSLSSVLGSGFGELAPPKMANITSSQILDQLKAPSLGQFTTTPSTQQNSTSHPTTTTSWDLKPPTSQSSVLSHLDFKSQPEPSPVLSQLSQRQQHQSQAVTVPPPGLESFPSQAKLRESTPGDSPSTVNKLLQLPSTTIENISVSVHQPQPKHIKLAKRRIPPASKIPASAVEMPGSADVTGLNVQFGALEFGSEPSLSEFGSAPSSENSNQIPISLYSKSLSEPLNTSLSMTSAVQNSTYTTSVITSCSLTSSSLNSASPVAMSSSYDQSSVHNRIPYQSPVSSSESAPGTIMNGHGGGRSQQTLDTPKTTGPPSALPSVSSLPSTTSCTALLPSTSQHTGDLTSSPLSQLSSSLSSHQSSLSAHAALSSSTSHTHASVESASSHQSSATFSTAATSVSSSASSGASLSSSMNTANSLCLGGTPASASSSSSRAAPLVTSGKAPPNLPQGVPPLLHNQYLVGPGGLLPAYPIYGYDELQMLQSRLPVDYYGIPFAAPTALASRDGSLANNPYPGDVTKFGRGDSASPAPATTPAQPQQSQSQTHHTAQQPFVNPALPPGYSYTGLPYYTGMPSAFQYGPTMFVPPASAKQHGVNLSTPTPPFQQASGYGQHGYSTGYDDLTQGTAAGDYSKGGYAGSSQAPNKSAGSGPGKGVSVSSSTTGLPDMTGSVYNKTQTFDKQGFHAGTPPPFSLPSVLGSTGPLASGAAPGYAPPPFLHILPAHQQPHSQLLHHHLPQDAQSGSGQRSQPSSLQPKSQASKPAYGNSPYWTN

SEQ ID NO: 7823 - protein, 634 aa, Homo sapiens
MAHYNFKKITVVPSAKDFIDLTLSKTQRKTPTVIHKHYQIHRIRHFYMRKVKFTQQNYHDRLSQILTDFPKLDDIHPFYADLMNILYDKDHYKLALGQINIAKNLVDNVAKDYVRLMKYGDSLYRCKQLKRAALGRMCTVIKRQKQSLEYLEQVRQHLSRLPTIDPNTRTLLLCGYPNVGKSSFINKVTRADVDVQPYAFTTKSLFVGHMDYKYLRWQVVDTPGILDHPLEDRNTIEMQAITALAHLRAAVLYVMDLSEQCGHGLREQLELFQNIRPLFINKPLIVVANKCDVKRIAELSEDDQKIFTDLQSEGFPVIETSTLTEEGVIKVKTEACDRLLAHRVETKMKGNKVNEVLNRLHLAIPTRRDDKERPPFIPEGVVARRKRMETEESRKKRERDLELEMGDDYILDLQKYWDLMNLSEKHDKIPEIWEGHNIADYIDPAIMKKLEELEKEEELRTAAGEYDSVSESEDEEMLEIRQLAKQIREKKKLKILESKEKNTQGPRMPRTAKKVQRTVLEKEMRSLGVDMDDKDDAHYAVQARRSRSITRKRKREDSAPPSSVARSGSCSRTPRDVSGLRDVKMVKKAKTMMKNAQKKMNRLGKKGEADRHVFDMKPKHLLSGKRKAGKKDRR

SEQ ID NO: 7824 - protein, 287 aa, Homo sapiens
MRIAVICFCLLGITCAIPVKQADSGSSEEKQNAVSSEETNDFKQETLPSKSNESHDHMDDMDDEDDDDHVDSQDSIDSNDSDDVDDTDDSHQSDESHHSDESDELVTDFPTDLPATEVFTPVVPTVDTYDGRGDSVVYGLRSKSKKFRRPDIQYPDATDEDITSHMESEELNGAYKAIPVAQDLNAPSDWDSRGKDSYETSQLDDQSAETHSHKQSRLYKRKANDESNEHSDVIDSQELSKVSREFHSHEFHSHEDMLVVDPKSKEEDKHLKFRISHELDSASSEVN

SEQ ID NO: 7825 - protein, 977 aa, Homo sapiens
MDIYDTQTLGVVVFGGFMVVSAIGIFLVSTFSMKETSYEEALANQRKEMAKTHHQKVEKKKKEKTVEKKGKTKKKEEKPNGKIPDHDPAPNVTVLLREPVRAPAVAVAPTPVQPPIIVAPVATVPAMPQEKLASSPKDKKKKEKKVAKVEPAVSSVVNSIQVLTSKAAILETAPKEGRNTDVAQSPEAPKQEAPAKKKSGSKKKGPPDADGPLYLPYKTLVSTVGSMVFNEGEAQRLIEILSEKAGIIQDTWHKATQKGDPVAILKRQLEEKEKLLATEQEDAAVAKSKLRELNKEMAAEKAKAAAGEAKVKKQLVAREQEITAVQARMQASYREHVKEVQQLQGKIRTLQEQLENGPNTQLARLQQENSILRDALNQATSQVESKQNAELAKLRQELSKVSKELVEKSEAVRQDEQQRKALEAKAAAFEKQVLQLQASHRESEEALQKRLDEVSRELCHTQSSHASLRADAEKAQEQQQQMAELHSKLQSSEAEVRSKCEELSGLHGQLQEARAENSQLTERIRSIEALLEAGQARDAQDVQASQAEADQQQTRLKELESQVSGLEKEAIELREAVEQQKVKNNDLREKNWKAMEALATAEQACKEKLLSLTQAKEESEKQLCLIEAQTMEALLALLPELSVLAQQNYTEWLQDLKEKGPTLLKHPPAPAEPSSDLASKLREAEETQSTLQAECDQYRSILAETEGMLRDLQKSVEEEEQVWRAKVGAAEEELQKSRVTVKHLEEIVEKLKGELESSDQVREHTSHLEAELEKHMAAASAECQNYAKEVAGLRQLLLESQSQLDAAKSEAQKQSDELALVRQQLSEMKSHVEDGDIAGAPASSPEAPPAEQDPVQLKTQLEWTEAILEDEQTQRQKLTAEFEEAQTSACRLQEELEKLRTAGPLESSETEEASQLKERLEKEKKLTSDLGRAATRLQELLKTTQEQLAREKDTVKKLQEQLEKAEDGSSSKEGTSV

SEQ ID NO: 7826 - protein, 349 aa, Homo sapiens
MALLRKINQVLLFLLIVTLCVILYKKVHKGTVPKNDADDESETPEELEEEIPVVICAAAGRMGATMAAINSIYSNTDANILFYVVGLRNTLTRIRKWIEHSKLREINFKIVEFNPMVLKGKIRPDSSRPELLQPLNFVRFYLPLLIHQHEKVIYLDDDVIVQGDIQELYDTTLALGHAAAFSDDCDLPSAQDINRLVGLQNTYMGYLDYRKKAIKDLGISPSTCSFNPGVIVANMTEWKHQRITKQLEKWMQKNVEENLYSSSLGGGVATSPMLIVFHGKYSTINPLWHIRHLGWNPDARYSEHFLQEAKLLHWNGRHKPWDFPSVHNDLWESWFVPDPAGIFKLNHHS

SEQ ID NO: 7827 - protein, 929 aa, Homo sapiens
MESMLNKLKSTVTKVTADVTSAVMGNPVTREFDVGRHIASGGNGLAWKIFNGTKKSTKQEVAVFVFDKKLIDKYQKFEKDQIIDSLKRGVQQLTRLRHPRLLTVQHPLEESRDCLAFCTEPVFASLANVLGNWENLPSPISPDIKDYKLYDVETKYGLLQVSEGLSFLHSSVKMVHGNITPENIILNKSGAWKIMGFDFCVSSTNPSEQEPKFPCKEWDPNLPSLCLPNPEYLAPEYILSVSCETASDMYSLGTVMYAVFNKGKPIFEVNKQDIYKSFSRQLDQLSRLGSSSLTNIPEEVREHVKLLLNVTPTVRPDADQMTKIPFFDDVGAVTLQYFDTLFQRDNLQKSQFFKGLPKVLPKLPKRVIVQRILPCLTSEFVNPDMVPFVLPNVLLIAEECTKEEYVKLILPELGPVFKQQEPIQILLIFLQKMDLLLTKTPPDEIKNSVLPMVYRALEAPSIQIQELCLNIIPTFANLIDYPSMKNALIPRIKNACLQTSSLAVRVNSLVCLGKILEYLDKWFVLDDILPFLQQIPSKEPAVLMGILGIYKCTFTHKKLGITKEQLAGKVLPHLIPLSIENNLNLNQFNSFISVIKEMLNRLESEHKTKLEQLHIMQEQQKSLDIGNQMNVSEEMKVTNIGNQQIDKVFNNIGADLLTGSESENKEDGLQNKHKRASLTLEEKQKLAKEQEQAQKLKSQQPLKPQVHTPVATVKQTKDLTDTLMDNMSSLTSLSVSTPKSSASSTFTSVPSMGIGMMFSTPTDNTKRNLTNGLNANMGFQTSGFNMPVNTNQNFYSSPSTVGVTKMTLGTPPTLPNFNALSVPPAGAKQTQQRPTDMSALNNLFGPQKPKVSMNQLSQQKPNQWLNQFVPPQGSPTMGSSVMGTQMNVIGQSAFGMQGNPFFNPQNFAQPPTTMTNSSSASNDLKDLFG

SEQ ID NO: 7828 - protein, 988 aa, Homo sapiens
MGAAAVRWHLCVLLALGTRGRLAGGSGLPGSVDVDECSEGTDDCHIDAICQNTPKSYKCLCKPGYKGEGKQCEDIDECENDYYNGGCVHECINIPGNYRCTCFDGFMLAHDGHNCLDVDECQDNNGGCQQICVNAMGSYECQCHSGFFLSDNQHTCIHRSNEGMNCMNKDHGCAHICRETPKGGVACDCRPGFDLAQNQKDCTLTCNYGNGGCQHSCEDTDTGPTCGCHQKYALHSDGRTCIETCAVNNGGCDRTCKDTATGVRCSCPVGFTLQPDGKTCKDINECLVNNGGCDHFCRNTVGSFECGCRKGYKLLTDERTCQDIDECSFERTCDHICINSPGSFQCLCHRGYILYGTTHCGDVDECSMSNGSCDQGCVNTKGSYECVCPPGRRLHWNGKDCVETGKCLSRAKTSPRAQLSCSKAGGVESCFLSCPAHTLFVPDSENSYVLSCGVPGPQGKALQKRNGTSSGLGPSCSDAPTTPIKQKARFKIRDAKCHLRPHSQARAKETARQPLLDHCHVTFVTLKCDSSKKRRRGRKSPSKEVSHITAEFEIETKMEEASDTCEADCLRKRAEQSLQAAIKTLRKSIGRQQFYVQVSGTEYEVAQRPAKALEGQGACGAGQVLQDSKCVACGPGTHFGGELGQCVSCMPGTYQDMEGQLSCTPCPSSDGLGLPGARNVSECGGQCSPGFFSADGFKPCQACPVGTYQPEPGRTGCFPCGGGLLTKHEGTTSFQDCEAKVHCSPGHHYNTTTHRCIRCPVGTYQPEFGQNHCITCPGNTSTDFDGSTNVTHCKNQHCGGELGDYTGYIESPNYPGDYPANAECVWHIAPPPKRRILIVVPEIFLPIEDECGDVLVMRKSASPTSITTYETCQTYERPIAFTSRSRKLWIQFKSNEGNSGKGFQVPYVTYDEDYQQLIEDIVRDGRLYASENHQEILKDKKLIKALFDVLAHPQNYFKYTAQESKEMFPRSFIKLLRSKVSRFLRPYK

SEQ ID NO: 7829 - protein, 2542 aa, Homo sapiens
MLTDSGGGGTSFEEDLDSVAPRSAPAGASEPPPPGGVGLGIRTVRLFGEAGPASGVGSSGGGGSGSGTGGGDAALDFKLAAAVLRTGGGGGASGSDEDEVSEVESFILDQEDLDNPVLKTTSEIFLSSTAEGADLRTVDPETQARLEALLEAAGIGKLSTADGKAFADPEVLRRLTSSVSCALDEAAAALTRMKAENSHNAGQVDTRSLAEACSDGDVNAVRKLLDEGRSVNEHTEEGESLLCLACSAGYYELAQVLLAMHANVEDRGNKGDITPLMAASSGGYLDIVKLLLLHDADVNSQSATGNTALTYACAGGFVDIVKVLLNEGANIEDHNENGHTPLMEAASAGHVEVARVLLDHGAGINTHSNEFKESALTLACYKGHLDMVRFLLEAGADQEHKTDEMHTALMEACMDGHVEVARLLLDSGAQVNMPADSFESPLTLAACGGHVELAALLIERGANLEEVNDEGYTPLMEAAREGHEEMVALLLAQGANINAQTEETQETALTLACCGGFSEVADFLIKAGADIELGCSTPLMEASQEGHLELVKYLLASGANVHATTATGDTALTYACENGHTDVADVLLQAGADLEHESEGGRTPLMKAARAGHLCTVQFLISKGANVNRATANNDHTVVSLACAGGHLAVVELLLAHGADPTHRLKDGSTMLIEAAKGGHTNVVSYLLDYPNNVLSVPTTDVSQLPPPSQDQSQVPRVPTHTLAMVVPPQEPDRTSQENSPALLGVQKGTSKQKSSSLQVADQDLLPSFHPYQPLECIVEETEGKLNELGQRISAIEKAQLKSLELIQGEPLNKDKIEELKKNREEQVQKKKKILKELQKVERQLQMKTQQQFTKEYLETKGQKDTVSLHQQCSHRGVFPEGEGDGSLPEDHFSELPQVDTILFKDNDVDDEQQSPPSAEQIDFVPVQPLSSPQCNFSSDLGSNGTNSLELQKVSGNQQIVGQPQIAITGHDQGLLVQEPDGLMVATPAQTLTDTLDDLIAAVSTRVPTGSNSSSQTTECLTPESCSQTTSNVASQSMPPVYPSVDIDAHTESNHDTALTLACAGGHEELVSVLIARDAKIEHRDKKGFTPLILAATAGHVGVVEILLDKGGDIEAQSERTKDTPLSLACSGGRQEVVDLLLARGANKEHRNVSDYTPLSLAASGGYVNIIKILLNAGAEINSRTGSKLGISPLMLAAMNGHVPAVKLLLDMGSDINAQIETNRNTALTLACFQGRAEVVSLLLDRKANVEHRAKTGLTPLMEAASGGYAEVGRVLLDKGADVNAPPVPSSRDTALTIAADKGHYKFCELLIHRGAHIDVRNKKGNTPLWLASNGGHFDVVQLLVQAGADVDAADNRKITPLMSAFRKGHVKVVQYLVKEVNQFPSDIECMRYIATITDKELLKKCHQCVETIVKAKDQQAAEANKNASILLKELDLEKSREESRKQALAAKREKRKEKRKKKKEEQKRKQEEDEENKPKENSELPEDEDEEENDEDVEQEVPIEPPSATTTTTIGISATSATFTNVFGKKRANVVTTPSTNRKNKKNKTKETPPTAHLILPEQHMSLAQQKADKNKINGEPRGGGAGGNSDSDNLDSTDCNSESSSGGKSQELNFVMDVNSSKYPSLLLHSQEEKTSTATSKTQTRLEGEVTPNSLSTSYKTVSLPLSSPNIKLNLTSPKRGQKREEGWKEVVRRSKKLSVPASVVSRIMGRGGCNITAIQDVTGAHIDVDKQKDKNGERMITIRGGTESTRYAVQLINALIQDPAKELEDLIPKNHIRTPASTKSIHANFSSGVGTTAASSKNAFPLGAPTLVTSQATTLSTFQPANKLNKNVPTNVRSSFPVSLPLAYPHPHFALLAAQTMQQIRHPRLPMAQFGGTFSPSPNTWGPFPVRPVNPGNTNSSPKHNNTSRLPNQNGTVLPSESAGLATASCPITVSSVVAASQQLCVTNTRTPSSVRKQLFACVPKTSPPATVISSVTSTCSSLPSVSSAPITSGQAPTTFLPASTSQAQLSSQKMESFSAVPPTKEKVSTQDQPMANLCTPSSTANSCSSSASNTPGAPETHPSSSPTPTSSNTQEEAQPSSVSDLSPMSMPFASNSEPAPLTLTSPRMVAADNQDTSNLPQLAVPAPRVSHRMQPRGSFYSMVPNATIHQDPQSIFVTNPVTLTPPQGPPAAVQLSSAVNIMNGSQMHINPANKSLPPTFGPATLFNHFSSLFDSSQVPANQGWGDGPLSSRVATDASFTVQSAFLGNSVLGHLENMHPDNSKAPGFRPPSQRVSTSPVGLPSIDPSGSSPSSSSAPLASFSGIPGTRVFLQGPAPVGTPSFNRQHFSPHPWTSASNSSTSAPPTLGQPKGVSASQDRKIPPPIGTERLARIRQGGSVAQAPAGTSFVAPVGHSGIWSFGVNAVSEGLSGWSQSVMGNHPMHQQLSDPSTFSQHQPMERDDSGMVAPSNIFHQPMASGFVDFSKGLPISMYGGTIIPSHPQLADVPGGPLFNGLHNPDPAWNPMIKVIQNSTECTDAQQIWPGTWAPHIGNMHLKYVN

SEQ ID NO: 7830 - protein, 423 aa, Homo sapiens [sequence omitted]

SEQ ID NO: 7831 - protein, 396 aa, Homo sapiens
MLPLLLLPLLWGGSLQEKPVYELQVQKSVTVQEGLCVLVPCSFSYPWRSWYSSPPLYVYWFRDGEIPYYAEVVATNNPDRRVKPETQGRFRLLGDVQKKNCSLSIGDARMEDTGSYFFRVERGRDVKYSYQQNKLNLEVTALIEKPDIHFLEPLESGRPTRLSCSLPGSCEAGPPLTFSWTGNALSPLDPETTRSSELTLTPRPEDHGTNLTCQVKRQGAQVTTERTVQLNVSYAPQNLAISIFFRNGTGTALRILSNGMSVPIQEGQSLFLACTVDSNPPASLSWFREGKALNPSQTSMSGTLELPNIGAREGGEFTCRVQHPLGSQHLSFILSVQRSSSSCICVTEKQQGSWPLVLTLIRGALMGAGFLLTYGLTWIYYTRCGGPQQSRAERPG

SEQ ID NO: 7832 - protein, 768 aa, Homo sapiens
MKLLWQAKMSSIQDWGEEVEEGAVYHVTLKRVQIQQAANKGARWLGVEGDQLPPGHTVSQYETCKIRTIKAGTLEKLVENLLTAFGDNDFTYISIFLSTYRGFASTKEVLELLLDRYGNLTSPNCEEDGSQSSSESKMVIRNAIASILRAWLDQCAEDFREPPHFPCLQKLLDYLTRMMPGSDPERRAQNLLEQFQKQEVETDNGLPNTISFSLEEEEELEGGESAEFTCFSEDLVAEQLTYMDAQLFKKVVPHHCLGCIWSRRDKKENKHLAPTIRATISQFNTLTKCVVSTILGGKELKTQQRAKIIEKWINIAHECRLLKNFSSLRAIVSALQSNSIYRLKKTWAAVPRDRMLMFEELSDIFSDHNNHLTSRELLMKEGTSKFANLDSSVKENQKRTQRRLQLQKDMGVMQGTVPYLGTFLTDLTMLDTALQDYIEGGLINFEKRRREFEVIAQIKLLQSACNSYCMTPDQKFIQWFQRQQLLTEEESYALSCEIEAAADASTTSPKPRKSMVKRLSLLFLGSDMITSPTPTKEQPKSTASGSSGESMDSVSVSSCESNHSEAEEGSITPMDTPDEPQKKLSESSSSCSSIHSMDTNSSGMSSLINPLSSPPSCNNNPKIHKRSVSVTSITSTVLPPVYNQQNEDTCIIRISVEDNNGNMYKSIMLTSQDKTPAVIQRAMLKHNLDSDPAEEYELVQVISEDKELVIPDSANVFYAMNSQVNFDFILRKKNSMEEQVKLRSRTSLTLPRTAKRGCWSNRHSKITL

SEQ ID NO: 7833 - protein, 198 aa, Homo sapiens
MADQRQRSLSTSGESLYHVLGLDKNATSDDIKKSYRKLALKYHPDKNPDNPEAADKFKEINNAHAILTDATKRNIYDKYGSLGLYVAEQFGEENVNTYFVLSSWWAKALFVFCGLLTCCYCCCCLCCCFNCCCGKCKPKAPEGEETEFYVSPEDLEAQLQSDEREATDTPIVIQPASATETTQLTADSHPSYHTDGFN

SEQ ID NO: 7834 - protein, 1156 aa, Homo sapiens
MDSKDESSHVWPTSAEHEQNAAQVHFVPDTGTVAQIVYTDDQVRPPQQVVYTADGASYTSVDGPEHTLVYIHPVEAAQTLFTDPGQVAYVQQDATAQQASLPVHNQVLPSIESVDGSDPLATLQTPLGRLEAKEEEDEDEDEDTEEDEEEDGEDTDLDDWEPDPPRPFDPHDLWCEECNNAHASVCPKHGPLHPIPNRPVLTRARASLPLVLYIDRFLGGVFSKRRIPKRTQFGPVEGPLVRGSELKDCYIHLKVSLDKGDRKERDLHEDLWFELSDETLCNWMMFVRPAQNHLEQNLVAYQYGHHVYYTTIKNVEPKQELKVWYAASYAEFVNQKIHDISEEERKVLREQEKNWPCYECNRRFISSEQLQQHLNSHDEKLDVFSRTRGRGRGRGKRRFGPGRRPGRPPKFIRLEITSENGEKSDDGTQDLLHFPTKEQFDEAEPATLNGLDQPEQTTIPIPQLPQETQSSLEHEPETHTLHLQPQHEESVVPTQSTLTADDMRRAKRIRNAALQHLFIRKSFRPFKCLQCGKAFREKDKLDQHLRFHGREGNCPLTCDLCNKGFISSTSLESHMKLHSDQKTYSCIFCPESFDRLDLLKDHVAIHINDGYFTCPTCKKRFPDFIQVKKHVRSFHSEKIYQCTECDKAFCRPDKLRLHMLRHSDRKDFLCSTCGKQFKRKDKLREHMQRMHNPEREAKKADRISRSKTFKPRITSTDYDSFTFKCRLCMMGFRRRGMLVNHLSKRHPDMKIEEVPELTLPIIKPNRDYFCQYCDKVYKSASKRKAHILKNHPGAELPPSIRKLRPAGPGEPDPMLSTHTQLTGTIATPPVCCPHCSKQYSSKTKMVQHIRKKHPEFAQLSNTIHTPLTTAVISATPAVLTTDSATGETVVTTDLLTQAMTELSQTLTTDYRTPQGDYQRIQYIPVSQSASGLQQPQHIQLQVVQVASATSPHQSQQSTVDVGQLHDPQPYPQHAIQVQHIQVSEPTASAPSSAQVSGQPLSPSAQQAQQGLSPSHIQGSSSTQGQALQQQQQQQQNSSVQHTYLPSAWNSFRGYSSEIQMMTLPPGQFVITDSGVATPVTTGQVKAVTSGHYVLSESQSELEEKQTSALSGGVQVEPPAHSDSLDPQTNSQQQTTQYIITTTTNGNGSSEVHITKP

SEQ ID NO: 7835 - protein, 814 aa, Homo sapiens
MQDAENVAVPEAAEERAEPGQQQPAAEPPPAEGLLRPAGPGAPEAAGTEASSEEVGIAEAGPESEVRTEPAAEAEAASGPSESPSPPAAEELPGSHAEPPVPAQGEAPGEQARDERSDSRAQAVSEDAGGNEGRAAEAEPRALENGDADEPSFSDPEDFVDDVSEEELLGDVLKDRPQEADGIDSVIVVDNVPQVGPDRLEKLKNVIHKIFSKFGKITNDFYPEEDGKTKGYIFLEYASPAHAVDAVKNADGYKLDKQHTFRVNLFTDFDKYMTISDEWDIPEKQPFKDLGNLRYWLEEAECRDQYSVIFESGDRTSIFWNDVKDPVSIEERARWTETYVRWSPKGTYLATFHQRGIALWGGEKFKQIQRFSHQGVQLIDFSPCERYLVTFSPLMDTQDDPQAIIIWDILTGHKKRGFHCESSAHWPIFKWSHDGKFFARMTLDTLSIYETPSMGLLDKKSLKISGIKDFSWSPGGNIIAFWVPEDKDIPARVTLMQLPTRQEIRVRNLFNVVDCKLHWQKNGDYLCVKVDRTPKGTQGVVTNFEIFRMREKQVPVDVVEMKETIIAFAWEPNGSKFAVLHGEAPRISVSFYHVKNNGKIELIKMFDKQQANTIFWSPQGQFVVLAGLRSMNGALAFVDTSDCTVMNIAEHYMASDVEWDPTGRYVVTSVSWWSHKVDNAYWLWTFQGRLLQKNNKDRFCQLLWRPRPPTLLSQEQIKQIKKDLKKYSKIFEQKDRLSQSKASKELVERRRTMMEDFRKYRKMAQELYMEQKNERLELRGGVDTDELDSNVDDWEEETIEFFVTEEIIPLGNQE

SEQ ID NO: 7836 - protein, 383 aa, Homo sapiens
MEPRAVGVSKQDIREQIWGYMESQNLADFPRPVHHRIPNFKGSYLACQNIKDLDVFARTQEVKVDPDKPLEGVRLLVLQSKKTLLVPTPRLRTGLFNKITPPPGATKDILRKCATSQGVRNYSVPIGLDSRVLVDLVVVGSVAVSEKGWRIGKGEGYADLEYAMMVSMGAVSKETPVVTIVHDCQVVDIPEELVEEHDITVDYILTPTRVIATGCKRPKPMGITWFKISLEMMEKIPILRSLRAREQQAGKDVTLQGEHQHLPEPGCQQTVPLSVGRRPPDTPGPETNSMEAAPGSPPGEGAPLAADVYVGNLPGDARVSDLKRALRELGSVPLRLTWQGPRRRAFLHYPDSAAAQQAVSCLQGLRLGTDTLRVALARQQRDK

SEQ ID NO: 7837 - protein, 1116 aa, Homo sapiens
MYGSARSVGKVEPSSQSPGRSPRLPRSPRLGHRRTNSTGGSSGSSVGGGSGKTLSMENIQSLNAAYATSGPMYLSDHENVGSETPKSTMTLGRSGGRLPYGVRMTAMGSSPNIASSGVASDTIAFGEHHLPPVSMASTVPHSLRQARDNTIMDLQTQLKEVLRENDLLRKDVEVKESKLSSSMNSIKTFWSPELKKERALRKDEASKITIWKEQYRVVQEENQHMQMTIQALQDELRIQRDLNQLFQQDSSSRTGEPCVAELTEENFQRLHAEHERQAKELFLLRKTLEEMELRIETQKQTLNARDESIKKLLEMLQSKGLSAKATEEDHERTRRLAEAEMHVHHLESLLEQKEKENSMLREEMHRRFENAPDSAKTKALQTVIEMKDSKISSMERGLRDLEEEIQMLKSNGALSTEEREEEMKQMEVYRSHSKFMKNKVEQLKEELSSKEAQWEELKKKAAGLQAEIGQVKQELSRKDTELLALQTKLETLTNQFSDSKQHIEVLKESLTAKEQRAAILQTEVDALRLRLEEKETMLNKKTKQIQDMAEEKGTQAGEIHDLKDMLDVKERKVNVLQKKIENLQEQLRDKEKQMSSLKERVKSLQADTTNTDTALTTLEEALAEKERTIERLKEQRDRDEREKQEEIDNYKKDLKDLKEKVSLLQGDLSEKEASLLDLKEHASSLASSGLKKDSRLKTLEIALEQKKEECLKMESQLKKAHEAALEARASPEMSDRIQHLEREITRYKDESSKAQAEVDRLLEILKEVENEKNDKDKKIAELERQVKDQNKKVANLKHKEQVEKKKSAQMLEEARRREDNLNDSSQQLQDSLRKKDDRIEELEEALRESVQITAEREMVLAQEESARTNAEKQVEELLMAMEKVKQELESMKAKLSSTQQSLAEKETHLTNLRAERRKHLEEVLEMKQEALLAAISEKDANIALLELSSSKKKTQEEVAALKREKDRLVQQLKQQTQNRMKLMADNYEDDHFKSSHSNQTNHKPSPDQIIQPLLELDQNRSKLKLYIGHLTTLCHDRDPLILRGLTPPASYNLDDDQAAWENELQKMTRGQLQDELEKGERDNAELQEFANAILQQIADHCPDILEQVVNALEESS

SEQ ID NO: 7838 - protein, 1068 aa, Homo sapiens
MAPRKRGGRGISFIFCCFRNNDHPEITYRLRNDSNFALQTMEPALPMPPVEELDVMFSELVDELDLTDKHREAMFALPAEKKWQIYCSKKKDQEENKGATSWPEFYIDQLNSMAARKSLLALEKEEEEERSKTIESLKTALRTKPMRFVTRFIDLDGLSCILNFLKTMDYETSESRIHTSLIGCIKALMNNSQGRAHVLAHSESINVIAQSLSTENIKTKVAVLEILGAVCLVPGGHKKVLQAMLHYQKYASERTRFQTLINDLDKSTGRYRDEVSLKTAIMSFINAVLSQGAGVESLDFRLHLRYEFLMLGIQPVIDKLREHENSTLDRHLDFFEMLRNEDELEFAKRFELVHIDTKSATQMFELTRKRLTHSEAYPHFMSILHHCLQMPYKRSGNTVQYWLLLDRIIQQIVIQNDKGQDPDSTPLENFNIKNVVRMLVNENEVKQWKEQAEKMRKEHNELQQKLEKKERECDAKTQEKEEMMQTLNKMKEKLEKETTEHKQVKQQVADLTAQLHELSRRAVCASIPGGPSPGAPGGPFPSSVPGSLLPPPPPPPLPGGMLPPPPPPLPPGGPPPPPGPPPLGAIMPPPGAPMGLALKKKSIPQPTNALKSFNWSKLPENKLEGTVWTEIDDTKVFKILDLEDLERTFSAYQRQQKEADAIDDTLSSKLKVKELSVIDGRRAQNCNILLSRLKLSNDEIKRAILTMDEQEDLPKDMLEQLLKFVPEKSDIDLLEEHKHELDRMAKADRFLFEMSRINHYQQRLQSLYFKKKFAERVAEVKPKVEAIRSGSEEVFRSGALKQLLEVVLAFGNYMNKGQRGNAYGFKISSLNKIADTKSSIDKNITLLHYLITIVENKYPSVLNLNEELRDIPQAAKVNMTELDKEISTLRSGLKAVETELEYQKSQPPQPGDKFVSVVSQFITVASFSFSDVEDLLAEAKDLFTKAVKHFGEEAGKIQPDEFFGIFDQFLQAVSEAKQENENMRKKKEEEERRARMEAQLKEQRERERKMRKAKENSEESGEFDDLVSALRSGEVFDKDLSKLKRNRKRITNQMTDSSRERPITKLNF

SEQ ID NO: 7839 - protein, 949 aa, Homo sapiens
MPAARPPAAGLRGISLFLALLLGSPAAALERDALPEGDASPLGPYLLPSGAPERGSPGKEHPEERVVTAPPSSSQSAEVLGELVLDGTAPSAHHDIPALSPLLPEEARPKHALPPKKKLPSLKQVNSARKQLRPKATSAATVQRAGSQPASQGLDLLSSSTEKPGPPGDPDPIVASEEASEVPLWLDRKESAVPTTPAPLQISPFTSQPYVAHTLPQRPEPGEPGPDMAQEAPQEDTSPMALMDKGENELTGSASEESQETTTSTIITTTVITTEQAPALCSVSFSNPEGYIDSSDYPLLPLNNFLECTYNVTVYTGYGVELQVKSVNLSDGELLSIRGVDGPTLTVLANQTLLVEGQVIRSPTNTISVYFRTFQDDGLGTFQLHYQAFMLSCNFPRRPDSGDVTVMDLHSGGVAHFHCHLGYELQGAKMLTCINASKPHWSSQEPICSAPCGGAVHNATIGRVLSPSYPENTNGSQFCIWTIEAPEGQKLHLHFERLLLHDKDRMTVHSGQTNKSALLYDSLQTESVPFEGLLSEGNTIRIEFTSDQARAASTFNIRFEAFEKGHCYEPYIQNGNFTTSDPTYNIGTIVEFTCDPGHSLEQGPAIIECINVRDPYWNDTEPLCRAMCGGELSAVAGVVLSPNWPEPYVEGEDCIWKIHVGEEKRIFLDIQFLNLSNSDILTIYDGDEVMPHILGQYLGNSGPQKLYSSTPDLTIQFHSDPAGLIFGKGQGFIMNYIEVSRNDSCSDLPEIQNGWKTTSHTELVRGARITYQCDPGYDIVGSDTLTCQWDLSWSSDPPFCEKTEESLACDNPGLPENGYQILYKRLYLPGESLTFMCYEGFELMGEVTIRCILGQPSHWNGPLPVCKVAEAAAETSLEGGNMALAIFIPVLIISLLLGGAYIYITRCRYYSNLRLPLMYSHPYSQITVETEFDNPIYETGETREYEVSI

SEQ ID NO: 7840 - protein, 751 aa, Homo sapiens
MPALGWAVAAILMLQTAMAEPSPGTLPRKAGVFSDLSNQELKAVHSFLWSKKELRLQPSSTTTMAKNTVFLIEMLLPKKYHVLRFLDKGERHPVREARAVIFFGDQEHPNVTEFAVGPLPGPCYMRALSPRPGYQSSWASRPISTAEYALLYHTLQEATKPLHQFFLNTTGFSFQDCHDRCLAFTDVAPRGVASGQRRSWLIIQRYVEGYFLHPTGLELLVDHGSTDAGHWAVEQVWYNGKFYGSPEELARKYADGEVDVVVLEDPLPGGKGHDSTEEPPLFSSHKPRGDFPSPIHVSGPRLVQPHGPRFRLEGNAVLYGGWSFAFRLRSSSGLQVLNVHFGGERIAYEVSVQEAVALYGGHTPAGMQTKYLDVGWGLGSVTHELAPGIDCPETATFLDTFHYYDADDPVHYPRALCLFEMPTGVPLRRHFNSNFKGGFNFYAGLKGQVLVLRTTSTVYNYDYIWDFIFYPNGVMEAKMHATGYVHATFYTPEGLRHGTRLHTHLIGNIHTHLVHYRVDLDVAGTKNSFQTLQMKLENITNPWSPRHRVVQPTLEQTQYSWERQAAFRFKRKLPKYLLFTSPQENPWGHKRTYRLQIHSMADQVLPPGWQEEQAITWARYPLAVTKYRESELCSSSIYHQNDPWHPPVVFEQFLHNNENIENEDLVAWVTVGFLHIPHSEDIPNTATPGNSVGFLLRPFNFFPEDPSLASRDTVIVWPRDNGPNYVQRWIPEDRDCSMPPPFSYNGTYRPV

SEQ ID NO: 7841 - protein, 354 aa, Homo sapiens
MAESPTEEAATAGAGAAGPGASSVAGVVGVSGSGGGFGPPFLPDVWAAAAAAGGAGGPGSGLAPLPGLPPSAAAHGAALLSHWDPTLSSDWDGERTAPQCLLRIKRDIMSIYKEPPPGMFVVPDTVDMTKIHALITGPFDTPYEGGFFLFVFRCPPDYPIHPPRVKLMTTGNNTVRFNPNFYRNGKVCLSILGTWTGPAWSPAQSISSVLISIQSLMTENPYHNEPGFEQERHPGDSKNYNECIRHETIRVAVCDMMEGKCPCPEPLRGVMEKSFLEYYDFYEVACKDRLHLQGQTMQDPFGEKRGHFDYQSLLMRLGLIRQKVLERLHNENAEMDSDSSSSGTETDLHGSLRV

SEQ ID NO: 7842 - protein, 839 aa, Homo sapiens
MDVSLCPAKCSFWRIFLLGSVWLDYVGSVLACPANCVCSKTEINCRRPDDGNLFPLLEGQDSGNSNGNASINITDISRNITSIHIENWRSLHTLNAVDMELYTGLQKLTIKNSGLRSIQPRAFAKNPHLRYINLSSNRLTTLSWQLFQTLSLRELQLEQNFFNCSCDIRWMQLWQEQGEAKLNSQNLYCINADGSQLPLFRMNISQCDLPEISVSHVNLTVREGDNAVITCNGSGSPLPDVDWIVTGLQSINTHQTNLNWTNVHAINLTLVNVTSEDNGFTLTCIAENVVGMSNASVALTVYYPPRVVSLEEPELRLEHCIEFVVRGNPPPTLHWLHNGQPLRESKIIHVEYYQEGEISEGCLLFNKPTHYNNGNYTLIAKNPLGTANQTINGHFLKEPFPESTDNFILFDEVSPTPPITVTHKPEEDTFGVSIAVGLAAFACVLLVVLFVMINKYGRRSKFGMKGPVAVISGEEDSASPLHHINHGITTPSSLDAGPDTVVIGMTRIPVIENPQYFRQGHNCHKPDTYVQHIKRRDIVLKRELGEGAFGKVFLAECYNLSPTKDKMLVAVKALKDPTLAARKDFQREAELLTNLQHEHIVKFYGVCGDGDPLIMVFEYMKHGDLNKFLRAHGPDAMILVDGQPRQAKGELGLSQMLHIASQIASGMVYLASQHFVHRDLATRNCLVGANLLVKIGDFGMSRDVYSTDYYRLFNPSGNDFCIWCEVGGHTMLPIRWMPPESIMYRKFTTESDVWSFGVILWEIFTYGKQPWFQLSNTEVIECITQGRVLERPRVCPKEVYDVMLGCWQREPQQRLNIKEIYKILHALGKATPIYLDILG

SEQ ID NO: 7843 - protein, 828 aa, Homo sapiens
MDSEAFQSARDFLDMNFQSLAMKHMDLKQMELDTAAAKVDELTKQLESLWSDSPAPPGPQAGPPSRPPRYSSSSIPEPFGSRGSPRKAATDGADTPFGRSESAPTLHPYSPLSPKGRPSSPRTPLYLQPDAYGSLDRATSPRPRAFDGAGSSLGRAPSPRPGPGPLRQQGPPTPFDFLGRAGSPRGSPLAEGPQAFFPERGPSPRPPATAYDAPASAFGSSLLGSGGSAFAPPLRAQDDLTLRRRPPKAWNESDLDVAYEKKPSQTASYERLDVFARPASPSLQLLPWRESSLDGLGGTGKDNLTSATLPRNYKVSPLASDRRSDAGSYRRSLGSAGPSGTLPRSWQPVSRIPMPPSSPQPRGAPRQRPIPLSMIFKLQNAFWEHGASRAMLPGSPLFTRAPPPKLQPQPQPQPQPQSQPQPQLPPQPQTQPQTPTPAPQHPQQTWPPVNEGPPKPPTELEPEPEIEGLLTPVLEAGDVDEGPVARPLSPTRLQPALPPEAQSVPELEEVARVLAEIPRPLKRRGSMEQAPAVALPPTHKKQYQQIISRLFHRHGGPGPGGPEPELSPITEGSEARAGPPAPAPPAPIPPPAPSQSSPPEQPQSMEMRSVLRKAGSPRKARRARLNPLVLLLDAALTGELEVVQQAVKEMNDPSQPNEEGITALHNAICGANYSIVDFLITAGANVNSPDSHGWTPLHCAASCNDTVICMALVQHGAAIFATTLSDGATAFEKCDPYREGYADCATYLADVEQSMGLMNSGAVYALWDYSAEFGDELSFREGESVTVLRRDGPEETDWWWAALHGQEGYVPRNYFGLFPRVKPQRSKV

SEQ ID NO: 7844 - protein, 109 aa, Homo sapiens
MAGALVRKAADYVRSKDFRDYLMSTHFWGPVANWGLPIAAINDMKKSPEIISGRMTFALCCYSLTFMRFAYKVQPRNWLLFACHATNEVAQLIQGGRLIKHEMTKTASA

SEQ ID NO: 7845 - protein, 652 aa, Homo sapiens
MPPPLPLLLLTVLVVAAARPGCEFERNPAGECHRPPAADSATCVDLQLRTCSDAAYNHTTFPNLLQHRSWEVVEASSEYILLSVLHQLLEGQCNPDLRLLGCAVLAPRCEGGWVRRPCRHICEGLREVCQPAFDAIDMAWPYFLDCHRYFTREDEGCYDPLEKLRGGLEADEALPSGLPPTFIRFSHHSYAQMVRVLRRTASRCAHVARTYSIGRSFDGRELLVIEFSSRPGQHELMEPEVKLIGNIHGNEVAGREMLIYLAQYLCSEYLLGNPRIQRLLNTTRIHLLPSMNPDGYEVAAAEGAGYNGWTSGRQNAQNLDLNRNFPDLTSEYYRLAETRGARSDHIPIPQHYWWGKVAPETKAIMKWMQTIPFVLSASLHGGDLVVSYPFDFSKHPQEEKMFSPTPDEKMFKLLSRAYADVHPMMMDRSENRCGGNFLKRGSIINGADWYSFTGGMSDFNYLHTNCFEITVELGCVKFPPEEALYILWQHNKESLLNFVETVHRGIKGVVTDKFGKPVKNARISVKGIRHDITTAPDGDYWRLLPPGIHIVIAQAPGYAKVIKKVIIPARMKRAGRVDFILQPLGMGPKNFIHGLRRTGPHDPLGGASSLGEATEPDPLRARRQPSADGSKPWWWSYFTSLSTHRPRWLLKY

SEQ ID NO: 7846 - protein, 144 aa, Homo sapiens
MYSEIQRERADIGGLMARPEYREWNPELIKPKKLLNPVKASRSHQELHRELLMNHRRGLGVDSKPELQRVLEHRRRNQLIKKKKEELEAKRLQCPFEQELLRRQQRLNQLEKPPEKEEDHAPEFIKVRENLRRIATLTSEEREL

SEQ ID NO: 7847 - protein, 128 aa, Homo sapiens
MGFQKFSPFLALSILVLLQAGSLHAAPFRSALESSPADPATLSEDEARLLLAALVQDYVQMKASELEQEQEREGSRIIAQKRACDTATCVTHRLAGLLSRSGGVVKNNFVPTNVGSKAFGRRRRDLQA

SEQ ID NO: 7848 - protein, 263 aa, Homo sapiens
MASLWLLSCFSLVGAAFGCGVPAIHPVLSGLSRIVNGEDAVPGSWPWQVSLQDKTGFHFCGGSLISEDWVVTAAHCGVRTSDVVVAGEFDQGSDEENIQVLKIAKVFKNPKFSILTVNNDITLLKLATPARFSQTVSAVCLPSADDDFPAGTLCATTGWGKTKYNANKTPDKLQQAALPLLSNAECKKSWGRRITDVMICAGASGVSSCMGDSGGPLVCQKDGAWTLVGIVSWGSDTCSTSSPGVYARVTKLIPWVQKILAAN

SEQ ID NO: 7849 - protein, 604 aa, Homo sapiens
MASTWAIQAHMDQDEPLEVKIEEEKYTTRQDWDLRKNNTHSREVFRQYFRQFCYQETSGPREALSRLRELCHQWLRPETHTKEQILELLVLEQFLTILPEELQAWVQEQHPESGEEVVTVLEDLERELDEPGEQVSVHTGEQEMFLQETVRLRKEGEPSMSLQSMKAQPKYESPELESQQEQVLDVETGNEYGNLKQEVSEEMEPHGKTSSKFENDMSKSARCGETREPEEITEEPSACSREDKQPTCDENGVSLTENSDHTEHQRICPGEESYGCDDCGKAFSQHSHLIEHQRIHTGDRPYKCEECGKAFRGRTVLIRHKIIHTGEKPYKCNECGKAFGRWSALNQHQRLHTGEKHYHCNDCGKAFSQKAGLFHHIKIHTRDKPYQCTQCNKSFSRRSILTQHQGVHTGAKPYECNECGKAFVYNSSLVSHQEIHHKEKCYQCKECGKSFSQSGLIQHQRIHTGEKPYKCDVCEKAFIQRTSLTEHQRIHTGERPYKCDKCGKAFTQRSVLTEHQRIHTGERPYKCDECGNAFRGITSLIQHQRIHTGEKPYQCDECGKAFRQRKKTSYKEILLKNHSEPQAGVNLLLSSLIPEWQSCFRRDL

SEQ ID NO: 7850 - protein, 1529 aa, Homo sapiens
MLPCKKRRTTVTESLQHKGNQEENNVDLESAVKPESDQVKDLSSVSLSWDPSHGRVAGFEVQSLQDAGNQLGMEDTSLSSGMLTQNTNVPILEGVDVAISQGITLPSLESFHPLNIHIGKGKLHATGSKRGKKMTLRPGPVTQEDRCDHLTLKEPFSGEPSEEVKEEGGKPQMNSEGEIPSLPSGSQSAKPVSQPRKSTQPDVCASPQEKPLRTLFHQPEEEIEDGGLFIPMEEQDNEESEKRRKKKKGTKRKRDGRGQEGTLAYDLKLDDMLDRTLEDGAKQHNLTAVNVRNILHEVITNEHVVAMMKAAISETEDMPMFEPKMTRSKLKEVVEKGVVIPTWNISPIKKANEIKPPQFVDIHLEEDDSSDEEYQPDDEEEDETAEESLLESDVESTASSPRGAKKSRLRQSSEMTETDEESGILSEAEKVTTPAIRHISAEVVPMGPPPPPKPKQTRDSTFMEKLHAVDEELASSPVCMDSFQPMDDSLIAFRTRSKMPLKDVPLGQLEAELQAPDITPDMYDPNTADDEDWKMWLGGLMNDDVGNEDEADDDDDPEYNFLEDLDEPDTEDFRTDRAVRITKKEVNELMEELFETFQDEMGFSNMEDDGPEEEECVAEPRPNFNTPQALRFEEPLANLLNEQHRTVKELFEQLKMKKSSAKQLQEVEKVKPQSEKVHQTLILDPAQRKRLQQQMQQHVQLLTQIHLLATCNPNLNPEATTTRIFLKELGTFAQSSIALHHQYNPKFQTLFQPCNLMGAMQLIEDFSTHVSIDCSPHKTVKKTANEFPCLPKQVAWILATSKVFMYPELLPVCSLKAKNPQDKIVFTKAEDNLLALGLKHFEGTEFPNPLISKYLLTCKTAHQLTVRIKNLNMNRAPDNIIKFYKKTKQLPVLGKCCEEIQPHQWKPPIEREEHRLPFWLKASLPSIQEELRHMADGAREVGNMTGTTEINSDRSLEKDNLELGSESRYPLLLPKGVVLKLKPVATRFPRKAWRQKRSSVLKPLLIQPSPSLQPSFNPGKTPARSTHSEAPPSKMVLRIPHPIQPATVLQTVPGVPPLGVSGGESFESPAALPAVPPEARTSFPLSESQTLLSSAPVPKVMLPSLAPSKFRKPYVRRRPSKRRGVKASPCMKPAPVIHHPASVIFTVPATTVKIVSLGGGCNMIQPVNAAVAQSPQTIPITTLLVNPTSFPCPLNQSLVASSVSPLIVSGNSVNLPIPSTPEDKAHVNVDIACAVADGENAFQGLEPKLEPQELSPLSATVFPKVEHSPGPPLADAECQEGLSENSACRWTVVKTEEGRQALEPLPQGIQESLNNPTPGDLEEIVKMEPEEAREEISGSPERDICDDIKVEHAVELDTGAPSEELSSAGEVTKQTVLQKEEERSQPTKTPSSSQEPPDEGTSGTDVNKGSSKNALSSMDPEVRLSSPPGKPEDSSSVDGQSVGTPVGPETGGEKNGPEEEEEEDFDDLTQDEEDEMSSASEESVLSVPELQVRAGEYSQVFRGLSNMYHLLICHLLACCTMDSPKIICI

SEQ ID NO: 7851 - protein, 499 aa, Homo sapiens
MPLVKRNIEPRHLCRGALPEGITSELECVTNSTLAAIIRQLSSLSKHAEDIFGELFNEANNFYIRANSLQDRIDRLAVKVTQLDSTVEEVSLQDINMKKAFKSSTVQDQQVVSKNSIPNPVADIYNQSDKPPPLNILTPYRDDKKDGLKFYTDPSYFFDLWKEKMLQDTEDKRKEKRRQKREKHKLNPNRNQQVNVRKVRTRKEEWERRKMGIEFMSDAKKLEQAGSAKEDRVPSGSHASDVTDYSYPATPNHSLHPQPVTPSYAAGDVPPHGPASQAAEHEYRPPSASARHMALNRPQQPPPPPPPQAPEGSQASAPMAPADYGMLPAQIIEYYNPSGPPPPPPPPVIPSAQTAFVSPLQMPMQPPFPASASSTHAAPPHPPSTGLLVTAPPPPGPPPPPPGPPGPGSSLSSSPMHGPPVAEAKRQEPAQPPISDARSDLLAAIRMGIQLKKVQEQREQEAKREPVGNDVATILSRRIAVEYSDSDDDSEFDENDWSD

SEQ ID NO: 7852 - protein, 716 aa, Homo sapiens
MNNFRATILFWAAAAWAKSGKPSGEMDEVGVQKCKNALKLPVLEVLPGGGWDNLRNVDMGRVMELTYSNCRTTEDGQYIIPDEIFTIPQKQSNLEMNSEILESWANYQSSTSYSINTELSLFSKVNGKFSTEFQRMKTLQVKDQAITTRVQVRNLVYTVKINPTLELSSGFRKELLDISDRLENNQTRMATYLAELLVLNYGTHVTTSVDAGAALIQEDHLRASFLQDSQSSRSAVTASAGLAFQNTVNFKFEENYTSQNVLTKSYLSNRTNSRVQSIGGVPFYPGITLQAWQQGITNHLVAIDRSGLPLHFFINPNMLPDLPGPLVKKVSKTVETAVKRYYTFNTYPGCTDLNSPNFNFQANTDDGSCEGKMTNFSFGGVYQECTQLSGNRDVLLCQKLEQKNPLTGDFSCPSGYSPVHLLSQIHEEGYNHLECHRKCTLLVFCKTVCEDVFQVAKAEFRAFWCVASSQVPENSGLLFGGLFSSKSINPMTNAQSCPAGYFPLRLFENLKVCVSQDYELGSRFAVPFGGFFSCTVGNPLVDPAISRDLGAPSLKKCPGGFSQHPALISDGCQVSYCVKSGLFTGGSLPPARLPPFTRPPLMSQAATNTVIVTNSENARSWIKDSQTHQWRLGEPIELRRAMNVIHGDGGGLSGGAAAGVTVGVTTILAVVITLAIYGTRKFKKKAYQAIEERQSLVPGTAATGDTTYQEQGQSPA

SEQ ID NO: 7853 - protein, 463 aa, Homo sapiens
MADGEEPEKKRRRIEELLAEKMAVDGGCGDTGDWEGRWNHVKKFLERSGPFTHPDFEPSTESLQFLLDTCKVLVIGAGGLGCELLKNLALSGFRQIHVIDMDTIDVSNLNRQFLFRPKDIGRPKAEVAAEFLNDRVPNCNVVPHFNKIQDFNDTFYRQFHIIVCGLDSIIARRWINGMLISLLNYEDGVLDPSSIVPLIDGGTEGFKGNARVILPGMTACIECTLELYPPQVNFPMCTIASMPRLPEHCIEYVRMLQWPKEQPFGEGVPLDGDDPEHIQWIFQKSLERASQYNIRGVTYRLTQGVVKRIIPAVASTNAVIAAVCATEVFKIATSAYIPLNNYLVFNDVDGLYTYTFEAERKENCPACSQLPQNIQFSPSAKLQEVLDYLTNSASLQMKSPAITATLEGKNRTLYLQSVTSIEERTRPNLSKTLKELGLVDGQELAVADVTTPQTVLFKLHFTS

SEQ ID NO: 7854 - protein, 525 aa, Homo sapiens
MRVFCVGLLLFSVTWAAPTFQPQTEKTKQSCVEEQRQEEKNKDNIGFHHLGKRINQELSSKENIVQERKKDLSLSEASENKGSSKSQNYFTNRQRLNKEYSISNKENTHNGLRMSIYPKSTGNKGFEDGDDAISKLHDQEEYGAALIRNNMQHIMGPVTAIKLLGEENKENTPRNVLNIIPASMNYAKAHSKDKKKPQRDSQAQKSPVKSKSTHRIQHNIDYLKHLSKVKKIPSDFEGSGYTDLQERGDNDISPFSGDGQPFKDIPGKGEATGPDLEGKDIQTGFAGPSEAESTHLDTKKPGYNEIPEREENGGNTIGTRDETAKEADAVDVSLVEGSNDIMGSTNFKELPGREGNRVDAGSQNAHQGKVEFHYPPAPSKEKRKEGSSDAAESTNYNEIPKNGKGSTRKGVDHSNRNQATLNEKQRFPSKGKSQGLPIPSRGLDNEIKNEMDSFNGPSHENIITHGRKYHYVPHRQNNSTRNKGMPQGKGSWGRQPHSNRRFSSRRRDDSSESSDSGSSSESDGD

SEQ ID NO: 7855 - protein, 847 aa, Homo sapiens
MSKSFQQSSLSRDSQGHGRDLSAAGIGLLAAATQSLSMPASLGRMNQGTARLASLMNLGMSSSLNQQGAHSALSSASTSSHNLQSIFNIGSRGPLPLSSQHRGDADQASNILASFGLSARDLDELSRYPEDKITPENLPQILLQLKRRRTEEGPTLSYGRDGRSATREPPYRVPRDDWEEKRHFRRDSFDDRGPSLNPVLDYDHGSRSQESGYYDRMDYEDDRLRDGERCRDDSFFGETSHNYHKFDSEYERMGRGPGPLQERSLFEKKRGAPPSSNIEDFHGLLPKGYPHLCSICDLPVHSNKEWSQHINGASHSRRCQLLLEIYPEWNPDNDTGHTMGDPFMLQQSTNPAPGILGPPPPSFHLGGPAVGPRGNLGAGNGNLQGPRHMQKGRVETSRVVHIMDFQRGKNLRYQLLQLVEPFGVISNHLILNKINEAFIEMATTEDAQAAVDYYTTTPALVFGKPVRVHLSQKYKRIKKPEGKPDQKFDQKQELGRVIHLSNLPHSGYSDSAVLKLAEPYGKIKNYILMRMKSQAFIEMETREDAMAMVDHCLKKALWFQGRCVKVDLSEKYKKLVLRIPNRGIDLLKKDKSRKRSYSPDGKESPSDKKSKTDGSQKTESSTEGKEQEEKSGEDGEKDTKDDQTEQEPNMLLESEDELLVDEEEAAALLESGSSVGDETDLANLGDVASDGKKEPSDKAVKKDGSASAAAKKKLKKVDKIEELDQENEAALENGIKNEENTEPGAESSENADDPNKDTSENADGQSDENKDDYTIPDEYRIGPYQPNVPVGIDYVIPKTGFYCKLCSLFYTNEEVAKNTHCSSLPHYQKLKKFLNKLAEERRQKKET

SEQ ID NO: 7856 - protein, 681 aa, Homo sapiens
MCGIFAYLNYHVPRTRREILETLIKGLQRLEYRGYDSAGVGFDGGNDKDWEANACKIQLIKKKGKVKALDEEVHKQQDMDLDIEFDVHLGIAHTRWATHGEPSPVNSHPQRSDKNNEFIVIHNGIITNYKDLKKFLESKGYDFESETDTETIAKLVKYMYDNRESQDTSFTTLVERVIQQLEGAFALVFKSVHFPGQAVGTRRGSPLLIGVRSEHKLSTDHIPILYRTGKDKKGSCNLSRVDSTTCLFPVEEKAVEYYFASDASAVIEHTNRVIFLEDDDVAAVVDGRLSIHRIKRTAGDHPGRAVQTLQMELQQIMKGNFSSFMQKEIFEQPESVVNTMRGRVNFDDYTVNLGGLKDHIKEIQRCRRLILIACGTSYHAGVATRQVLEELTELPVMVELASDFLDRNTPVFRDDVCFFLSQSGETADTLMGLRYCKERGALTVGITNTVGSSISRETDCGVHINAGPEIGVASTKAYTSQFVSLVMFALMMCDDRISMQERRKEIMLGLKRLPDLIKEVLSMDDEIQKLATELYHQKSVLIMGRGYHYATCLEGALKIKEITYMHSEGILAGELKHGPLALVDKLMPVIMIIMRDHTYAKCQNALQQVVARQGRPVVICDKEDTETIKNTKRTIKVPHSVDCLQGILSVIPLQLLAFHLAVLRGYDVDFPRNLAKSVTVE

SEQ ID NO: 7857 - protein, 1575 aa, Homo sapiens
MAAAALLLGLALLAPRAAGAGMGACYDGAGRPQRCLPVFENAAFGRLAQASHTCGSPPEDFCPHVGAAGAGAHCQRCDAADPQRHHNASYLTDFHSQDESTWWQSPSMAFGVQYPTSVNITLRLGKAYEITYVRLKFHTSRPESFAIYKRSRADGPWEPYQFYSASCQKTYGRPEGQYLRPGEDERVAFCTSEFSDISPLSGGNVAFSTLEGRPSAYNFEESPGLQEWVTSTELLISLDRLNTFGDDIFKDPKVLQSYYYAVSDFSVGGRCKCNGHASECGPDVAGQLACRCQHNTTGTDCERCLPFFQDRPWARGTAEAAHECLPCNCSGRSEECTFDRELFRSTGHGGRCHHCRDHTAGPHCERCQENFYHWDPRMPCQPCDCQSAGSLHLQCDDTGTCACKPTVTGWKCDRCLPGFHSLSEGGCRPCTCNPAGSLDTCDPRSGRCPCKENVEGNLCDRCRPGTFNLQPHNPAGCSSCFCYGHSKVCASTAQFQVHHILSDFHQGAEGWWARSVGGSEHPPQWSPNGVLLSPEDEEELTAPEKFLGDQRFSYGQPLILTFRVPPGDSPLPVQLRLEGTGLALSLRHSSLSGPQDAGHPREVELRFHLQETSEDVAPPLPPFHFQRLLANLTSLRLRVSPGPSPAGPVFLTEVRLTSARPGLSPPASWVEICSCPTGYTGQFCESCAPGYKREMPQGGPYASCVPCTCNQHGTCDPNTGICVCSHHTEGPSCERCLPGFYGNPFAGQADDCQPCPCPGQSACTTIPESREVVCTHCPPGQRGRRCEVCDDGFFGDPLGLFGHPQPCHQCQCSGNVDPNAVGNCDPLSGHCLRCLHNTTGDHCEHCQEGFYGSALAPRPADKCMPCSCHPQGSVSEQMPCDPVTGQCSCLPHVTARDCSRCYPGFFDLQPGRGCRSCKCHPLGSQEDQCHPKTGQCTCRPGVTGQACDRCQLGFFGFSIKGCRACRCSPLGAASAQCHENGTCVCRPGFEGYKCDRCHDNFFLTADGTHCQQCPSCYALVKEEAAKLKARLTLTEGWLQGSDCGSPWGPLDILLGEAPRGDVYQGHHLLPGAREAFLEQMMSLEGAVKAAREQLQRLNKGARCAQAGSQKTCTQLADLEAVLESSEEEILHAAAILASLEIPQEGPSQPTKWSHLATEARALARSHRDTATKIAATAWRALLASNTSYALLWNLLEGRVALETQRDLEDRYQEVQAAQKALRTAVAEVLPEAESVLATVQQVGADTAPYLALLASPGALPQKSRAEDLGLKAKALEKTVASWQHMATEAARTLQTAAQATLRQTEPLTKLHQEARAALTQASSSVQAATVTVMGARTLLADLEGMKLQFPRPKDQAALQRKADSVSDRLLADTRKKTKQAERMLGNAAPLSSSAKKKGREAEVLAKDSAKLAKALLRERKQAHRRASRLTSQTQATLQQASQQVLASEARRQELEEAERVGAGLSEMEQQIRESRISLEKDIETLSELLARLGSLDTHQAPAQALNETQWALERLRLQLGSPGSLQRKLSLLEQESQQQELQIQGFESDLAEIRADKQNLEAILHSLPENCASWQ

SEQ ID NO: 7858 - protein, 774 aa, Homo sapiens
MAHEAMEYDVQVQLNHAEQQPAPAGMASSQGGPALLQPVPADVVSSQGVPSILQPAPAEVISSQATPPLLQPAPQLSVDLTEVEVLGEDTVENINPRTSEQHRQGSDGNHTIPASSLHSMTNFISGLQRLHGMLEFLRPSSSNHSVGPMRTRRRVSASRRARAGGSQRTDSARLRAPLDAYFQVSRTQPDLPATTYDSETRNPVSEELQVSSSSDSDSDSSAEYGGVVDQAEESGAVILEEQLAGVSAEQEVTCIDGGKTLPKQPSPQKSEPLLPSASMDEEEGDTCTICLEQWTNAGDHRLSALRCGHLFGYRCISTWLKGQVRKCPQCNKKARHSDIVVLYARTLRALDTSEQERMKSSLLKEQMLRKQAELESAQCRLQLQVLTDKCTRLQRRVQDLQKLTSHQSQNLQQPRGSQAWVLSCSPSSQGQHKHKYHFQKTFTVSQAGNCRIMAYCDALSCLVISQPSPQASFLPGFGVKMLSTANMKSSQYIPMHGKQIRGLAFSSYLRGLLLSASLDNTIKLTSLETNTVVQTYNAGRPVWSCCWCLDEANYIYAGLANGSILVYDVRNTSSHVQELVAQKARCPLVSLSYMPRAASAAFPYGGVLAGTLEDASFWEQKMDFSHWPHVLPLEPGGCIDFQTENSSRHCLVTYRPDKNHTTIRSVLMEMSYRLDDTGNPICSCQPVHTFFGGPTCKLLTKNAIFQSPENDGNILVCTGDEAANSALLWDAASGSLLQDLQTDQPVLDICPFEVNRNSYLATLTEKMVHIYKWE

SEQ ID NO: 7859 - protein, 1008 aa, Homo sapiens
MSQPIMVQRRSGQGFHGNSEVNAILSPRSESGGLGVSMVEYVLSSSPADKLDSRFRKGNFGTRDAETDGPEKGDQKGKASPFEEDQNRDLKQGDDDDSKINGRGLPNGMDADCKDFNRTPGSRQASPTEVVERLGPNTNPSEGLGPLPNPTANKPLVEEFSNPETQNLDAMEQVGLESLQFDYPGNQVPMDSSGATVGLFDYNSQQQLFQRTNALTVQQLTAAQQQQYALAAAQQPHIAGVFSAGLAPAAFVPNPYIISAAPPGTDPYTAAGLAAAATLAGPAVVPPQYYGVPWGVYPANLFQQQAAAAANNTASQQAASQAQPGQQQVLRAGAGQRPLTPNQGQQGQQAESLAAAAAANPTLAFGQGLATGMPGYQVLAPTAYYDQTGALVVGPGARTGLGAPVRLMAPTPVLISSAAAQAAAAAAAGGTASSLTGSTNGLFRPIGTQPPQQQQQQPSTNLQSNSFYGSSSLTNSSQSSSLFSHGPGQPGSTSLGFGSGNSLGAAIGSALSGFGSSVGSSASSSATRRESLSTSSDLYKRSSSSLAPIGQPFYNSLGFSSSPSPIGMPLPSQTPGHSLTPPPSLSSHGSSSSLHLGGLTNGSGRYISAAPGAEAKYRSASSTSSLFSSSSQLFPPSRLRYNRSDIMPSGRSRLLEDFRNNRFPNLQLRDLIGHIVEFSQDQHGSRFIQQKLERATPAERQMVFNEILQAAYQLMTDVFGNYVIQKFFEFGSLDQKLALATRIRGHVLPLALQMYGCRVIQKALESISSDQQSEMVKELDGHVLKCVKDQNGNHVVQKCIECVQPQSLQFIIDAFKGQVFVLSTHPYGCRVIQRILEHCTAEQTLPILEELHQHTEQLVQDQYGNYVIQHVLEHGRPEDKSKIVSEIRGKVLALSQHKFASNVVEKCVTHASRAERALLIDEVCCQNDGPHSALYTMMKDQYANYVVQKMIDMAEPAQRKIIMHKIRPHITTLRKYTYGKHILAKLEKYYLKNSPDLGPIGGPPNGML

SEQ ID NO: 7860 - protein, 63 aa, Homo sapiens
MSSGTELLWPGAALLVLLGVAASLCVRCSRPGAKRSEKIYQQRSLREDQQSFTGSRTYSLVGQ

SEQ ID NO: 7861 - protein, 199 aa, Homo sapiens
MKTFIIGISGVTNSGKTTLAKNLQKHLPNCSVISQDDFFKPESEIETDKNGFLQYDVLEALNMEKMMSAISCWMESARHSVVSTDQESAEEIPILIIEGFLLFNYKPLDTIWNRSYFLTIPYEECKRRRSTRVYQPPDSPGYFDGHVWPMYLKYRQEMQDITWEVVYLDGTKSEEDLFLQVYEDLIQELAKQKCLQVTA

SEQ ID NO: 7862 - protein, 433 aa, Homo sapiens
MAARVLIIGSGGREHTLAWKLAQSHHVKQVLVAPGNAGTACSEKISNTAISISDHTALAQFCKEKKIEFVVVGPEAPLAAGIVGNLRSAGVQCFGPTAEAAQLESSKRFAKEFMDRHGIPTAQWKAFTKPEEACSFILSADFPALVVKASGLAAGKGVIVAKSKEEACKAVQEIMQEKAFGAAGETIVIEELLDGEEVSCLCFTDGKTVAPMPPAQDHKRLLEGDGGPNTGGMGAYCPAPQVSNDLLLKIKDTVLQRTVDGMQQEGTPYTGILYAGIMLTKNGPKVLEFNCRFGDPECQVILPLLKSDLYEVIQSTLDGLLCTSLPVWLENHTALTVVMASKGYPGDYTKGVEITGFPEAQALGLEVFHAGTALKNGKVVTHGGRVLAVTAIRENLISALEEAKKGLAAIKFEGAIYRKDVGFRAIAFLQQPR

SEQ ID NO: 7863 - protein, 82 aa, Homo sapiens; identical to SEQ ID NO: 3825

SEQ ID NO: 7864 - protein, 461 aa, Homo sapiens
MDSVAFEDVAVNFTLEEWALLDPSQKNLYRDVMRETFRNLASVGKQWEDQNIEDPFKIPRRNISHIPERLCESKEGGQGEETFSQIPDGILNKKTPGVKPCESSVCGEVGMGPSSLNRHIRDHTGREPNEYQEYGKKSYTRNQCGRALSYHRSFPVRERTHPGGKPYDCKECGETFISLVSIRRHMLTHRGGVPYKCKVCGKAFDYPSLFRIHERSHTGEKPYECKQCGKAFSCSSYIRIHERTHTGDKPYECKQCGKAFSCSKYIRIHERTHTGEKPYECKQCGKAFRCASSVRSHERTHTGEKLFECKECGKALTCLASVRRHMIKHTGNGPYKCKVCGKAFDFPSSFRIHERTHTGEKPYDCKQCGKAFSCSSSFRKHERIHTGEKPYKCTKCGKAFSRSSYFRIHERTHTGEKPYECKQCGKAFSRSTYFRVHEKIHTGEKPYENPNPNASVVPVLS

SEQ ID NO: 7865 - protein, 476 aa, Homo sapiens
MFRLNSLSALAELAVGSRWYHGGSQPIQIRRRLMMVAFLGASAVTASTGLLWKRAHAESPPCVDNLKSDIGDKGKNKDEGDVCNHEKKTADLAPHPEEKKKKRSGFRDRKVMEYENRIRAYSTPDKIFRYFATLKVISEPGEAEVFMTPEDFVRSITPNEKQPEHLGLDQYIIKRFDGKKISQEREKFADEGSIFYTLGECGLISFSDYIFLTTVLSTPQRNFEIAFKMFDLNGDGEVDMEEFEQVQSIIRSQTSMGMRHRDRPTTGNTLKSGLCSALTTYFFGADLKGKLTIKNFLEFQRKLQHDVLKLEFERHDPVDGRITERQFGGMLLAYSGVQSKKLTAMQRQLKKHFKEGKGLTFQEVENFFTFLKNINDVDTALSFYHMAGASLDKVTMQQVARTVAKVELSDHVCDVVFALFDCDGNGELSNKEFVSIMKQRLMRGLEKPKDMGFTRLMQAMWKCAQETAWDFALPKQ

SEQ ID NO: 7866 - protein, 127 aa, Homo sapiens
MQQRGLAIVALAVCAALHASEAILPIASSCCTEVSHHISRRLLERVNMCRIQRADGDCDLAAVILHVKRRRICVSPHNHTVKQWMKVQAAKKNGKGNVCHRKKHHGKRNSNRAHQGKHETYGHKTPY

SEQ ID NO: 7867 - protein, 960 aa, Homo sapiens
MWRLRRAAVACEVCQSLVKHSSGIKGSLPLQKLHLVSRSIYHSHHPTLKLQRPQLRTSFQQFSSLTNLPLRKLKFSPIKYGYQPRRNFWPARLATRLLKLRYLILGSAVGGGYTAKKTFDQWKDMIPDLSEYKWIVPDIVWEIDEYIDFEKIRKALPSSEDLVKLAPDFDKIVESLSLLKDFFTSGSPEETAFRATDRGSESDKHFRKVSDKEKIDQLQEELLHTQLKYQRILERLEKENKELRKLVLQKDDKGIHHRKLKKSLIDMYSEVLDVLSDYDASYNTQDHLPRVVVVGDQSAGKTSVLEMIAQARIFPRGSGEMMTRSPVKVTLSEGPHHVALFKDSSREFDLTKEEDLAALRHEIELRMRKNVKEGCTVSPETISLNVKGPGLQRMVLVDLPGVINTVTSGMAPDTKETIFSISKAYMQNPNAIILCIQDGSVDAERSIVTDLVSQMDPHGRRTIFVLTKVDLAEKNVASPSRIQQIIEGKLFPMKALGYFAVVTGKGNSSESIEAIREYEEEFFQNSKLLKTSMLKAHQVTTRNLSLAVSDCFWKMVRESVEQQADSFKATRFNLETEWKNNYPRLRELDRNELFEKAKNEILDEVISLSQVTPKHWEEILQQSLWERVSTHVIENIYLPAAQTMNSGTFNTTVDIKLKQWTDKQLPNKAVEVAWETLQEEFSRFMTEPKGKEHDDIFDKLKEAVKEESIKRHKWNDFAEDSLRVIQHNALEDRSISDKQQWDAAIYFMEEALQARLKDTENAIENMVGPDWKKRWLYWKNRTQEQCVHNETKNELEKMLKCNEEHPAYLASDEITTVRKNLESRGVEVDPSLIKDTWHQVYRRHFLKTALNHCNLCRRGFYYYQRHFVDSELECNDVVLFWRIQRMLAITANTLRQQLTNTEVRRLEKNVKEVLEDFAEDGEKKIKLLTGKRVQLAEDLKKVREIQEKLDAFIEALHQEK

SEQ ID NO: 7868 - protein, 614 aa, Homo sapiens
MSGIKKQKTENQQKSTNVVYQAHHVSRNKRGQVVGTRGGFRGCTVWLTGLSGAGKTTISFALEEYLVSHAIPCYSLDGDNVRHGLNRNLGFSPGDREENIRRIAEVAKLFADAGLVCITSFISPFAKDRENARKIHESAGLPFFEIFVDAPLNICESRDVKGLYKRARAGEIKGFTGIDSDYEKPETPERVLKTNLSTVSDCVHQVVELLQEQNIVPYTIIKDIHELFVPENKLDHVRAEAETLPSLSITKLDLQWVQVLSEGWATPLKGFMREKEYLQVMHFDTLLDDGVINMSIPIVLPVSAEDKTRLEGCSKFVLAHGGRRVAILRDAEFYEHRKEERCSRVWGTTCTKHPHIKMVMESGDWLVGGDLQVLEKIRWNDGLDQYRLTPLELKQKCKEMNADAVFAFQLRNPVHNGHALLMQDTRRRLLERGYKHPVLLLHPLGGWTKDDDVPLDWRMKQHAAVLEEGVLDPKSTIVAIFPSPMLYAGPTEVQWHCRSRMIAGANFYIVGRDPAGMPHPETKKDLYEPTHGGKVLSMAPGLTSVEIIPFRVAAYNKAKKAMDFYDPARHNEFDFISGTRMRKLAREGENPPDGFMAPKAWKVLTDYYRSLEKN

SEQ ID NO: 7869 - protein, 524 aa, Homo sapiens
MADDIDIEAMLEAPYKKDENKLSSANGHEERSKKRKKSKSRSRSHERKRSKSKERKRSRDRERKKSKSRERKRSRSKERRRSRSRSRDRRFRGRYRSPYSGPKFNSAIRGKIGLPHSIKLSRRRSRSKSPFRKDKSPVREPIDNLTPEERDARTVFCMQLAARIRPRDLEEFFSTVGKVRDVRMISDRNSRRSKGIAYVEFVDVSSVPLAIGLTGQRVLGVPIIVQASQAEKNRAAAMANNLQKGSAGPMRLYVGSLHFNITEDMLRGIFEPFGRIESIQLMMDSETGRSKGYGFITFSDSECAKKALEQLNGFELAGRPMKVGHVTERTDASSASSFLDSDELERTGIDLGTTGRLQLMARLAEGTGLQIPPAAQQALQMSGSLAFGAVADLQTRLSQQTEASALAAAASVQPLATQCFQLSNMFNPQTEEEVGWDTEIKDDVIEECNKHGGVIHIYVDKNSAQGNVYVKCPSIAAAIAAVNALHGRWFAGKMITAAYVPLPTYHNLFPDSMTATQLLVPSRR

SEQ ID NO: 7870 - protein, 407 aa, Homo sapiens
MTVRGDVLAPDPASPTTAAASPSVSVIPEGSPTAMEQPVFLMTTAAQAISGFFVWTALLITCHQIYMHLRCYSCPNEQRYIVRILFIVPIYAFDSWLSLLFFTNDQYYVYFGTVRDCYEALVIYNFLSLCYEYLGGESSIMSEIRGKPIESSCMYGTCCLWGKTYSIGFLRFCKQATLQFCVVKPLMAVSTVVLQAFGKYRDGDFDVTSGYLYVTIIYNISVSLALYALFLFYFATRELLSPYSPVLKFFMVKSVIFLSFWQGMLLAILEKCGAIPKIHSARVSVGEGTVAAGYQDFIICVEMFFAALALRHAFTYKVYADKRLDAQGRCAPMKSISSSLKETMNPHDIVQDAIHNFSPAYQQYTQQSTLEPGPTWRGGAHGLSRSHSLSGARDNEKTLLLSSDDEF

SEQ ID NO: 7871 - protein, 584 aa, Homo sapiens
MFAVVFFILSLMTCQPGVTAQEKVNQRVRRAATPAAVTCQLSNWSEWTDCFPCQDKKYRHRSLLQPNKFGGTICSGDIWDQASCSSSTTCVRQAQCGQDFQCKETGRCLKRHLVCNGDQDCLDGSDEDDCEDVRAIDEDCSQYEPIPGSQKAALGYNILTQEDAQSVYDASYYGGQCETVYNGEWRELRYDSTCERLYYGDDEKYFRKPYNFLKYHFEALADTGISSEFYDNANDLLSKVKKDKSDSFGVTIGIGPAGSPLLVGVGVSHSQDTSFLNELNKYNEKKFIFTRIFTKVQTAHFKMRKDDIMLDEGMLQSLMELPDQYNYGMYAKFINDYGTHYITSGSMGGIYEYILVIDKAKMESLGITSRDITTCFGGSLGIQYEDKINVGGGLSGDHCKKFGGGKTERARKAMAVEDIISRVRGGSSGWSGGLAQNRSTITYRSWGRSLKYNPVVIDFEMQPIHEVLRHTSLGPLEAKRQNLRRALDQYLMEFNACRCGPCFNNGVPILEGTSCRCQCRLGSLGAACEQTQTEGAKADGSWSCWSSWSVCRAGIQERRRECDNPAPQNGGASCPGRKVQTQAC

SEQ ID NO: 7872 - protein, 1141 aa, Homo sapiens
MDDSGELGGLETMETLTELGDELTLGDIDEMLQFVSNQVGEFPDLFSEQLCSSFPGSGGSGSSSGSSGSSSSSSNGRGSSSGAVDPSVQRSFTQVTLPSFSPSAASPQAPTLQVKVSPTSVPTTPRATPILQPRPQPQPQPQTQLQQQTVMITPTFSTTPQTRIIQQPLIYQNAATSFQVLQPQVQSLVTSSQVQPVTIQQQVQTVQAQRVLTQTANGTLQTLAPATVQTVAAPQVQQVPVLVQPQIIKTDSLVLTTLKTDGSPVMAAVQNPALTALTTPIQTAALQVPTLVGSSGTILTTMPVMMGQEKVPIKQVPGGVKQLEPPKEGERRTTHNIIEKRYRSSINDKIIELKDLVMGTDAKMHKSGVLRKAIDYIKYLQQVNHKLRQENMVLKLANQKNKLLKGIDLGSLVDNEVDLKIEDFNQNVLLMSPPASDSGSQAGFSPYSIDSEPGSPLLDDAKVKDEPDSPPVALGMVDRSRILLCVLTFLCLSFNPLTSLLQWGGAHDSDQHPHSGSGRSVLSFESGSGGWFDWMMPTLLLWLVNGVIVLSVFVKLLVHGEPVIRPHSRSSVTFWRHRKQADLDLARGDFAAAAGNLQTCLAVLGRALPTSRLDLACSLSWNVIRYSLQKLRLVRWLLKKVFQCRRATPATEAGFEDEAKTSARDAALAYHRLHQLHITGKLPAGSACSDVHMALCAVNLAECAEEKIPPSTLVEIHLTAAMGLKTRCGGKLGFLASYFLSRAQSLCGPEHSAVPDSLRWLCHPLGQKFFMERSWSVKSAAKESLYCAQRNPADPIAQVHQAFCKNLLERAIESLVKPQAKKKAGDQEEESCEFSSALEYLKLLHSFVDSVGVMSPPLSRSSVLKSALGPDIICRWWTSAITVAISWLQGDDAAVRSHFTKVERIPKALEVTESPLVKAIFHACRAMHASLPGKADGQQSSFCHCERASGHLWSSLNVSGATSDPALNHVVQLLTCDLLLSLRTALWQKQASASQAVGETYHASGAELAGFQRDLGSLRRLAHSFRPAYRKVFLHEATVRLMAGASPTRTHQLLEHSLRRRTTQSTKHGEVDAWPGQRERATAILLACRHLPLSFLSSPGQRAVLLAEAARTLEKVGDRRSCNDCQQMIVKLGGGTAIAAS

SEQ ID NO: 7873 - protein, 2230 aa, Homo sapiens
MFKKLKQKISEEQQQLQQALAPAQASSNSSTPTRMRSRTSSFTEQLDEGTPNRESGDTQSFAQKLQLRVPSVESLFRSPIKESLFRSSSKESLVRTSSRESLNRLDLDSSTASFDPPSDMDSEAEDLVGNSDSLNKEQLIQRLRRMERSLSSYRGKYSELVTAYQMLQREKKKLQGILSQSQDKSLRRIAELREELQMDQQAKKHLQEEFDASLEEKDQYISVLQTQVSLLKQRLRNGPMNVDVLKPLPQLEPQAEVFTKEENPESDGEPVVEDGTSVKTLETLQQRVKRQENLLKRCKETIQSHKEQCTLLTSEKEALQEQLDERLQELEKIKDLHMAEKTKLITQLRDAKNLIEQLEQDKGMVIAETKRQMHETLEMKEEEIAQLRSRIKQMTTQGEELREQKEKSERAAFEELEKALSTAQKTEEARRKLKAEMDEQIKTIEKTSEEERISLQQELSRVKQEVVDVMKKSSEEQIAKLQKLHEKELARKEQELTKKLQTREREFQEQMKVALEKSQSEYLKISQEKEQQESLALEELELQKKAILTESENKLRDLQQEAETYRTRILELESSLEKSLQENKNQSKDLAVHLEAEKNKHNKEITVMVEKHKTELESLKHQQDALWTEKLQVLKQQYQTEMEKLREKCEQEKETLLKDKEIIFQAHIEEMNEKTLEKLDVKQTELESLSSELSEVLKARHKLEEELSVLKDQTDKMKQELEAKMDEQKNHHQQQVDSIIKEHEVSIQRTEKALKDQINQLELLLKERDKHLKEHQAHVENLEADIKRSEGELQQASAKLDVFQSYQSATHEQTKAYEEQLAQLQQKLLDLETERILLTKQVAEVEAQKKDVCTELDAHKIQVQDLMQQLEKQNSEMEQKVKSLTQVYESKLEDGNKEQEQTKQILVEKENMILQMREGQKKEIEILTQKLSAKEDSIHILNEEYETKFKNQEKKMEKVKQKAKEMQETLKKKLLDQEAKLKKELENTALELSQKEKQFNAKMLEMAQANSAGISDAVSRLETNQKEQIESLTEVHRRELNDVISIWEKKLNQQAEELQEIHEIQLQEKEQEVAELKQKILLFGCEKEEMNKEITWLKEEGVKQDTTLNELQEQLKQKSAHVNSLAQDETKLKAHLEKLEVDLNKSLKENTFLQEQLVELKMLAEEDKRKVSELTSKLKTTDEEFQSLKSSHEKSNKSLEDKSLEFKKLSEELAIQLDICCKKTEALLEAKTNELINISSSKTNAILSRISHCQHRTTKVKEALLIKTCTVSELEAQLRQLTEEQNTLNISFQQATHQLEEKENQIKSMKADIESLVTEKEALQKEGGNQQQAASEKESCITQLKKELSENINAVTLMKEELKEKKVEISSLSKQLTDLNVQLQNSISLSEKEAAISSLRKQYDEEKCELLDQVQDLSFKVDTLSKEKISALEQVDDWSNKFSEWKKKAQSRFTQHQNTVKELQIQLELKSKEAYEKDEQINLLKEELDQQNKRFDCLKGEMEDDKSKMEKKESNLETELKSQTARIMELEDHITQKTIEIESLNEVLKNYNQQKDIEHKELVQKLQHFQELGEEKDNRVKEAEEKILTLENQVYSMKAELETKKKELEHVNLSVKSKEEELKALEDRLESESAAKLAELKRKAEQKIAAIKKQLLSQMEEKEEQYKKGTESHLSELNTKLQEREREVHILEEKLKSVESSQSETLIVPRSAKNVAAYTEQEEADSQGCVQKTYEEKISVLQRNLTEKEKLLQRVGQEKEETVSSHFEMRCQYQERLIKLEHAEAKQHEDQSMIGHLQEELEEKNKKYSLIVAQHVEKEGGKNNIQAKQNLENVFDDVQKTLQEKELTCQILEQKIKELDSCLVRQKEVHRVEMEELTSKYEKLQALQQMDGRNKPTELLEENTEEKSKSHLVQPKLLSNMEAQHNDLEFKLAGAEREKQKLGKEIVRLQKDLRMLRKEHQQELEILKKEYDQEREEKIKQEQEDLELKHNSTLKQLMREFNTQLAQKEQELEMTIKETINKAQEVEAELLESHQEETNQLLKKIAEKDDDLKRTAKRYEEILDAREEEMTAKVRDLQTQLEELQKKYQQKLEQEENPGNDNVTIMELQTQLAQKTTLISDSKLKEQEFREQIHNLEDRLKKYEKNVYATTVGTPYKGGNLYHTDVSLFGEPTEFEYLRKVLFEYMMGRETKTMAKVITTVLKFPDDQTQKILEREDARLMFTSPRSGIF

SEQ ID NO: 7874 - protein, 450 aa, Homo sapiens
MAASKTQGAVARMQEDRDGSCSTVGGVGYGDSKDCILEPLSLPESPGGTTTLEGSPSVPCIFCEEHFPVAEQDKLLKHMIIEHKIVIADVKLVADFQRYILYWRKRFTEQPITDFCSVIRINSTAPFEEQENYFLLCDVLPEDRILREELQKQRLREILEQQQQERNDTNFHGVCMFCNEEFLGNRSVILNHMAREHAFNIGLPDNIVNCNEFLCTLQKKLDNLQCLYCEKTFRDKNTLKDHMRKKQHRKINPKNREYDRFYVINYLELGKSWEEVQLEDDRELLDHQEDDWSDWEEHPASAVCLFCEKQAETIEKLYVHMEDAHEFDLLKIKSELGLNFYQQVKLVNFIRRQVHQCRCYGCHVKFKSKADLRTHMEETKHTSLLPDRKTWDQLEYYFPTYENDTLLCTLSDSESDLTAQEQNENVPIISEDTSKLYALKQSSILNQLLL

SEQ ID NO: 7875 - protein, 1685 aa, Homo sapiens
MKLRGVSLAAGLFLLALSLWGQPAEAAACYGCSPGSKCDCSGIKGEKGERGFPGLEGHPGLPGFPGPEGPPGPRGQKGDDGIPGPPGPKGIRGPPGLPGFPGTPGLPGMPGHDGAPGPQGIPGCNGTKGERGFPGSPGFPGLQGPPGPPGIPGMKGEPGSIIMSSLPGPKGNPGYPGPPGIQGLPGPTGIPGPIGPPGPPGLMGPPGPPGLPGPKGNMGLNFQGPKGEKGEQGLQGPPGPPGQISEQKRPIDVEFQKGDQGLPGDRGPPGPPGIRGPPGPPGGEKGEKGEQGEPGKRGKPGKDGENGQPGIPGLPGDPGYPGEPGRDGEKGQKGDTGPPGPPGLVIPRPGTGITIGEKGNIGLPGLPGEKGERGFPGIQGPPGLPGPPGAAVMGPPGPPGFPGERGQKGDEGPPGISIPGPPGLDGQPGAPGLPGPPGPAGPHIPPSDEICEPGPPGPPGSPGDKGLQGEQGVKGDKGDTCFNCIGTGISGPPGQPGLPGLPGPPGSLGFPGQKGEKGQAGATGPKGLPGIPGAPGAPGFPGSKGEPGDILTFPGMKGDKGELGSPGAPGLPGLPGTPGQDGLPGLPGPKGEPGGITFKGERGPPGNPGLPGLPGNIGPMGPPGFGPPGPVGEKGIQGVAGNPGQPGIPGPKGDPGQTITQPGKPGLPGNPGRDGDVGLPGDPGLPGQPGLPGIPGSKGEPGIPGIGLPGPPGPKGFPGIPGPPGAPGTPGRIGLEGPPGPPGFPGPKGEPGFALPGPPGPPGLPGFKGALGPKGDRGFPGPPGPPGRTGLDGLPGPKGDVGPNGQPGPMGPPGLPGIGVQGPPGPPGIPGPIGQPGLHGIPGEKGDPGPPGLDVPGPPGERGSPGIPGAPGPIGPPGSPGLPGKAGASGFPGTKGEMGMMGPPGPPGPLGIPGRSGVPGLKGDDGLQGQPGLPGPTGEKGSKGEPGLPGPPGPMDPNLLGSKGEKGEPGLPGIPGVSGPKGYQGLPGDPGQPGLSGQPGLPGPPGPKGNPGLPGQPGLIGPPGLKGTIGDMGFPGPQGVEGPPGPSGVPGQPGSPGLPGQKGDKGDPGISSIGLPGLPGPKGEPGLPGYPGNPGIKGSVGDPGLPGLPGTPGAKGQPGLPGFPGTPGPPGPKGISGPPGNPGLPGEPGPVGGGGHPGQPGPPGEKGKPGQDGIPGPAGQKGEPGQPGFGNPGPPGLPGLSGQKGDGGLPGIPGNPGLPGPKGEPGFHGFPGVQGPPGPPGSPGPALEGPKGNPGPQGPPGRPGLPGPEGPPGLPGNGGIKGEKGNPGQPGLPGLPGLKGDQGPPGLQGNPGRPGLNGMKGDPGLPGVPGFPGMKGPSGVPGSAGPEGEPGLIGPPGPPGLPGPSGQSIIIKGDAGPPGIPGQPGLKGLPGPQGPQGLPGPTGPPGDPGRNGLPGFDGAGGRKGDPGLPGQPGTRGLDGPPGPDGLQGPPGPPGTSSVAHGFLITRHSQTTDAPQCPQGTLQVYEGFSLLYVQGNKRAHGQDLGTAGSCLRRFSTMPFMFCNINNVCNFASRNDYSYWLSTPEPMPMSMQPLKGQSIQPFISRCAVCEAPAVVIAVHSQTIQIPHCPQGWDSLWIGYSFMMHTSAGAEGSGQALASPGSCLEEFRSAPFIECHGRGTCNYYANSYSFWLATVDVSDMFSKPQSETLKAGDLRTRISRCQVCMKRT

SEQ ID NO: 7876 - protein, 7461 aa, Homo sapiens
MAGYLSPAAYLYVEEQEYLQAYEDVLERYKDERDKVQKKTFTKWINQHLMKVRKHVNDLYEDLRDGHNLISLLEVLSGDTLPREKGRMRFHRLQNVQIALDYLKRRQVKLVNIRNDDITDGNPKLTLGLIWTIILHFQISDIHVTGESEDMSAKERLLLWTQQATEGYAGIRCENFTTCWRDGKLFNAIIHKYRPDLIDMNTVAVQSNLANLEHAFYVAEKIGVIRLLDPEDVDVSSPDEKSVITYVSSLYDAFPKVPEGGEGIGANDVEVKWIEYQNMVNYLIQWIRHHVTTMSERTFPNNPVELKALYNQYLQFKETEIPPKETEKSKIKRLYKLLEIWIEFGRIKLLQGYHPNDIEKEWGKLIIAMLEREKALRPEVERLEMLQQIANRVQRDSVICEDKLILAGNALQSDSKRLESGVQFQNEAEIAGYILECENLLRQHVIDVQILIDGKYYQADQLVQRVAKLRDEIMALRNECSSVYSKGRILTTEQTKLMISGITQSLNSGFAQTLHPSLTSGLTQSLTPSLTSSSMTSGLSSGMTSRLTPSVTPAYTPGFPSGLVPNFSSGVEPNSLQTLKLMQIRKPLLKSSLLDQNLTEEEINMKFVQDLLNWVDEMQVQLDRTEWGSDLPSVESHLENHKNVHRAIEEFESSLKEAKISEIQMTAPLKLTYAEKLHRLESQYAKLLNTSRNQERHLDTLHNFVSRATNELIWLNEKEEEEVAYDWSERNTNIARKKDYHAELMRELDQKEENIKSVQEIAEQLLLENHPARLTIEAYRAAMQTQWSWILQLCQCVEQHIKENTAYFEFFNDAKEATDYLRNLKDAIQRKYSCDRSSSIHKLEDLVQESMEEKEELLQYKSTIANLMGKAKTIIQLKPRNSDCPLKTSIPIKAICDYRQIEITIYKDDECVLANNSHRAKWKVISPTGNEAMVPSVCFTVPPPNKEAVDLANRIEQQYQNVLTLWHESHINMKSVVSWHYLINEIDRIRASNVASIKTMLPGEHQQVLSNLQSRFEDFLEDSQESQVFSGSDITQLEKEVNVCKQYYQELLKSAEREEQEESVYNLYISEVRNIRLRLENCEDRLIRQIRTPLERDDLHESVFRITEQEKLKKELERLKDDLGTITNKCEEFFSQAAASSSVPTLRSELNVVLQNMNQVYSMSSTYIDKLKTVNLVLKNTQAAEALVKLYETKLCEEEAVIADKNNIENLISTLKQWRSEVDEKRQVFHALEDELQKAKAISDEMFKTYKERDLDFDWHKEKADQLVERWQNVHVQIDNRLRDLEGIGKSLKYYRDTYHPLDDWIQQVETTQRKIQENQPENSKTLATQLNQQKMLVSEIEMKQSKMDECQKYAEQYSATVKDYELQTMTYRAMVDSQQKSPVKRRRMQSSADLIIQEFMDLRTRYTALVTLMTQYIKFAGDSLKRLEEEEKSLEEEKKEHVEKAKELQKWVSNISKTLKDAEKAGKPPFSKQKISSEEISTKKEQLSEALQTIQLFLAKHGDKMTDEERNELEKQVKTLQESYNLLFSESLKQLQESQTSGDVKVEEKLDKVIAGTIDQTTGEVLSVFQAVLRGLIDYDTGIRLLETQLMISGLISPELRKCFDLKDAKSHGLIDEQILCQLKELSKAKEIISAASPTTIPVLDALAQSMITESMAIKVLEILLSTGSLVIPATGEQLTLQKAFQQNLVSSALFSKVLERQNMCKDLIDPCTSEKVSLIDMVQRSTLQENTGMWLLPVRPQEGGRITLKCGRNISILRAAHEGLIDRETMFRLLSAQLLSGGLINSNSGQRMTVEEAVREGVIDRDTASSILTYQVQTGGIIQSNPAKRLTVDEAVQCDLITSSSALLVLEAQRGYVGLIWPHSGEIFPTSSSLQQELITNELAYKILNGRQKIAALYIPESSQVIGLDAAKQLGIIDNNTASILKNITLPDKMPDLGDLEACKNARRWLSFCKFQPSTVHDYRQEEDVFDGEEPVTTQTSEETKKLFLSYLMINSYMDANTGQRLLLYDGDLDEAVGMLLEGCHAEFDGNTAIKECLDVLSSSGVFLNNASGREKDECTATPSSFNKCHCGEPEHEETPENRKCAIDEEFNEMRNTVINSEFSQSGKLASTISIDPKVNSSPSVCVPSLISYLTQTELADISMLRSDSENILTNYENQSRVETNERANECSHSKNIQNFPSDLIENPIMKSKMSKFCGVNETENEDNTNRDSPIFDYSPRLSALLSHDKLMHSQGSFNDTHTPESNGNKCEAPALSFSDKTMLSGQRIGEKFQDQFLGIAAINISLPGEQYGQKSLNMISSNPQVQYHNDKYISNTSGEDEKTHPGFQQMPEDKEDESEIEEYSCAVTPGGDTDNAIVSLTCATPLLDETISASDYETSLLNDQQNNTGTDTDSDDDFYDTPLFEDDDHDSLLLDGDDRDCLHPEDYDTLQEENDETASPADVFYDVSKENENSMVPQGAPVGSLSVKNKAHCLQDFLMDVEKDELDSGEKIHLNPVGSDKVNGQSLETGSERECTNILEGDESDSLTDYDIVGGKESFTASLKFDDSGSWRGRKEEYVTGQEFHSDTDHLDSMQSEESYGDYIYDSNDQDDDDDDGIDEEGGGIRDENGKPRCQNVAEDMDIQLCASILNENSDENENINTMILLDKMHSCSSLEKQQRVNVVQLASPSENNLVTEKSNLPEYTTEIAGKSKENLLNHEMVLKDVLPPIIKDTESEKTFGPASISHDNNNISSTSELGTDLANTKVKLIQGSELPELTDSVKGKDEYFKNMTPKVDSSLDHIICTEPDLIGKPAEESHLSLIASVTDKDPQGNGSDLIKGRDGKSDILIEDETSIQKMYLGEGEVLVEGLVEEENRHLKLLPGKNTRDSFKLINSQFPFPQITNNEELNQKGSLKKATVTLKDEPNNLQIIVSKSPVQFENLEEIFDTSVSKEISDDITSDITSWEGNTHFEESFTDGPEKELDLFTYLKHCAKNIKAKDVAKPNEDVPSHVLITAPPMKEHLQLGVNNTKEKSTSTQKDSPLNDMIQSNDLCSKESISGGGTEISQFTPESIEATLSILSRKHVEDVGKNDFLQSERCANGLGNDNSSNTLNTDYSFLEINNKKERIEQQLPKEQALSPRSQEKEVQIPELSQVFVEDVKDILKSRLKEGHMNPQEVEEPSACADTKILIQNLIKRITTSQLVNEASTVPSDSQMSDSSGVSPMTNSSELKPESRDDPFCIGNLKSELLLNILKQDQHSQKITGVFELMRELTHMEYDLEKRGITSKVLPLQLENIFYKLLADGYSEKIEHVGDFNQKACSTSEMMEEKPHILGDIKSKEGNYYSPNLETVKEIGLESSTVWASTLPRDEKLKDLCNDFPSHLECTSGSKEMASGDSSTEQFSSELQQCLQHTEKMHEYLTLLQDMKPPLDNQESLDNNLEALKNQLRQLETFELGLAPIAVILRKDMKLAEEFLKSLPSDFPRGHVEELSISHQSLKTAFSSLSNVSSERTKQIMLAIDSEMSKLAVSHEEFLHKLKSFSDWVSEKSKSVKDIEIVNVQDSEYVKKRLEFLKNVLKDLGHTKMQLETTAFDVQFFISEYAQDLSPNQSKQLLRLLNTTQKCFLDVQESVTTQVERLETQLHLEQDLDDQKIVAERQQEYKEKLQGICDLLTQTENRLIGHQEAFMIGDGTVELKKYQSKQEELQKDMQGSAQALAEVVKNTENFLKENGEKLSQEDKALIEQKLNEAKIKCEQLNLKAEQSKKELDKVVTTAIKEETEKVAAVKQLEESKTKIENLLDWLSNVDKDSERAGTKHKQVIEQNGTHFQEGDGKSAIGEEDEVNGNLLETDVDGQVGTTQENLNQQYQKVKAQHEKIISQHQAVIIATQSAQVLLEKQGQYLSPEEKEKLQKNMKELKVHYETALAESEKKMKLTHSLQEELEKFDADYTEFEHWLQQSEQELENLEAGADDINGLMTKLKRQKSFSEDVISHKGDLRYITISGNRVLEAAKSCSKRDGGKVDTSATHREVQRKLDHATDRFRSLYSKCNVLGNNLKDLVDKYQHYEDASCGLLAGLQACEATASKHLSEPIAVDPKNLQRQLEETKALQGQISSQQVAVEKLKKTAEVLLDARGSLLPAKNDIQKTLDDIVGRYEDLSKSVNERNEKLQITLTRSLSVQDGLDEMLDWMGNVESSLKEQGQVPLNSTALQDIISKNIMLEQDIAGRQSSINAMNEKVKKFMETTDPSTASSLQAKMKDLSARFSEASHKHKETLAKMEELKTKVELFENLSEKLQTFLETKTQALTEVDVPGKDVTELSQYMQESTSEFLEHKKHLEVLHSLLKEISSHGLPSDKALVLEKTNNLSKKFKEMEDTIKEKKEAVTSCQEQLDAFQVLVKSLKSWIKETTKKVPIVQPSFGAEDLGKSLEDTKKLQEKWSLKTPEIQKVNNSGISLCNLISAVTTPAKAIAAVKSGGAVLNGEGTATNTEEFWANKGLTSIKKDMTDISHGYEDLGLLLKDKIAELNTKLSKLQKAQEESSAMMQWLQKMNKTATKWQQTPAPTDTEAVKTQVEQNKSFEAELKQNVNKVQELKDKLTELLEENPDTPEAPRWKQMLTEIDSKWQELNQLTIDRQQKLEESSNNLTQFQTVEAQLKQWLVEKELMVSVLGPLSIDPNMLNTQRQQVQILLQEFATRKPQYEQLTAAGQGILSRPGEDPSLRGIVKEQLAAVTQKWDSLTGQLSDRCDWIDQAIVKSTQYQSLLRSLSDKLSDLDNKLSSSLAVSTHPDAMNQQLETAQKMKQEIQQEKKQIKVAQALCEDLSALVKEEYLKAELSRQLEGILKSFKDVEQKAENHVQHLQSACASSHQFQQMSRDFQAWLDTKKEEQNKSHPISAKLDVLESLIKDHKDFSKTLTAQSHMYEKTIAEGENLLLKTQGSEKAALQLQLNTIKTNWDTFNKQVKERENKLKESLEKALKYKEQVETLWPWIDKCQNNLEEIKFCLDPAEGENSIAKLKSLQKEMDQHFGMVELLNNTANSLLSVCEIDKEVVTDENKSLIQKVDMVTEQLHSKKFCLENMTQKFKEFQEVSKESKRQLQCAKEQLDIHDSLGSQAYSNKYLTMLQTQQKSLQALKHQVDLAKRLAQDLVVEASDSKGTSDVLLQVETIAQEHSTLSQQVDEKCSFLETKLQGIGHFQNTIREMFSQFAEFDDELDSMAPVGRDAETLQKQKETIKAFLKKLEALMASNDNANKTCKMMLATEETSPDLVGIKRDLEALSKQCNKLLDRAQAREEQVEGTIKRLEEFYSKLKEFSILLQKAEEHEESQGPVGMETETINQQLNMFKVFQKEEIEPLQGKQQDVNWLGQGLIQSAAKSTSTQGLEHDLDDVNARWKTLNKKVAQRAAQLQEALLHCGRFQDALESLLSWMVDTEELVANQKPPSAEFKVVKAQIQEQKLLQRLLDDRKSTVEVIKREGEKIATTAEPADKVKILKQLSLLDSRWEALLNKAETRNRQLEGISVVAQQFHETLEPLNEWLTTIEKRLVNCEPIGTQASKLEEQIAQHKVLQEDILLRKQNVDQALLNGLELLKQTTGDEVLIIQDKLEAIKARYKDITKLSTDVAKTLEQALQLARRLHSTHEELCTWLDKVEVELLSYETQVLKGEEASQAQMRPKELKKEAKNNKALLDSLNEVSSALLELVPWRAREGLEKMVAEDNERYRLVSDTITQKVEEIDAAILRSQQFDQAADAELSWITETEKKLMSLGDIRLEQDQTSAQLQVQKTFTMEILRHKDIIDDLVKSGHKIMTACSEEEKQSMKKKLDKVLKNYDTICQINSERYLQLERAQSLVNQFWETYEELWPWLTETQSIISQLPAPALEYETLRQQQEEHRQLRELIAEHKPHIDKMNKTGPQLLELSPGEGFSIQEKYVAADTLYSQIKEDVKKRAVALDEAISQSTQFHDKIDQILESLERIVERLRQPPSISAEVEKIKEQISENKNVSVDMEKLQPLYETLKQRGEEMIARSGGTDKDISAKAVQDKLDQMVFIWENIHTLVEEREAKLLDVMELAEKFWCDHMSLIVTIKDTQDFIRDLEDPGIDPSVVKQQQEAAETIREEIDGLQEELDIVINLGSELIAACGEPDKPIVKKSIDELNSAWDSLNKAWKDRIDKLEEAMQAAVQYQDGLQAVFDWVDIAGGKLASMSPIGTDLETVKQQIEELKQFKSEAYQQQIEMERLNHQAELLLKKVTEESDKHTVQDPLMELKLIWDSLEERIINRQHKLEGALLALGQFQHALDELLAWLTHTEGLLSEQKPVGGDPKAIEIELAKHHVLQNDVLAHQSTVEAVNKAGNDLIESSAGEEASNLQNKLEVLNQRWQNVLEKTEQRKQQLDGALRQAKGFHGEIEDLQQWLTDTERHLLASKPLGGLPETAKEQLNVHMEVCAAFEAKEETYKSLMQKGQQMLARCPKSAETNIDQDINNLKEKWESVETKLNERKTKLEEALNLAMEFHNSLQDFINWLTQAEQTLNVASRPSLILDTVLFQIDEHKVFANEVNSHREQIIELDKTGTHLKYFSQKQDVVLIKNLLISVQSRWEKVVQRLVERGRSLDDARKRAKQFHEAWSKLMEWLEESEKSLDSELEIANDPDKIKTQLAQHKEFQKSLGAKHSVYDTTNRTGRSLKEKTSLADDNLKLDDMLSELRDKWDTICGKSVERQNKLEEALLFSGQFTDALQALIDWLYRVEPQLAEDQPVHGDIDLVMNLIDNHKAFQKELGKRTSSVQALKRSARELIEGSRDDSSWVKVQMQELSTRWETVCALSISKQTRLEAALRQAEEFHSVVHALLEWLAEAEQTLRFHGVLPDDEDALRTLIDQHKEFMKKLEEKRAELNKATTMGDTVLAICHPDSITTIKHWITIIRARFEEVLAWAKQHQQRLASALAGLIAKQELLEALLAWLQWAETTLTDKDKEVIPQEIEEVKALIAEHQTFMEEMTRKQPDVDKVTKTYKRRAADPSSLQSHIPVLDKGRAGRKRFPASSLYPSGSQTQIETKNPRVNLLVSKWQQVWLLALERRRKLNDALDRLEELREFANFDFDIWRKKYMRWMNHKKSRVMDFFRRIDKDQDGKITRQEFIDGILSSKFPTSRLEMSAVADIFDRDGDGYIDYYEFVAALHPNKDAYKPITDADKIEDEVTRQVAKCKCAKRFQVEQIGDNKYRFFLGNQFGDSQQLRLVRILRSTVMVRVGGGWMALDEFLVKNDPCRVHHHGSKMLRSESNSSITTTQPTIAKGRTNMELREKFILADGASQGMAAFRPRGRRSRPSSRGASPNRSTSVSSQAAQAASPQVPATTTPKGTPIQGSKLRLPGYLSGKGFHSGEDSGLITTAAARVRTQFADSKKTPSRPGSRAGSKAGSRASSRRGSDASDFDISEIQSVCSDVETVPQTHRPTPRAGSRPSTAKPSKIPTPQRKSPASKLDKSSKR

SEQ ID NO: 7877 - protein, 271 aa, Homo sapiens
MPEAPPLLLAAVLLGLVLLVVLLLLLRHWGWGLCLIGWNEFILQPIHNLLMGDTKEQRILNHVLQHAEPGNAQSVLEAIDTYCEQKEWAMNVGDKKGKIVDAVIQEHQPSVLLELGAYCGYSAVRMARLLSPGARLITIEINPDCAAITQRMVDFAGVKDKVTLVVGASQDIIPQLKKKYDVDTLDMVFLDHWKDRYLPDTLLLEECGLLRKGTVLLADNVICPGAPDFLAHVRGSSCFECTHYQSFLEYREVVDGLEKAIYKGPGSEAGP

SEQ ID NO: 7878 - protein, 538 aa, Homo sapiens
MDDFERRRELRRQKREEMRLEAERIAYQRNDDDEEEAARERRRRARQERLRQKQEEESLGQVTDQVEVNAQNSVPDEEAKTTTTNTQVEGDDEAAFLERLARREERRQKRLQEALERQKEFDPTITDASLSLPSRRMQNDTAENETTEKEEKSESRQERYEIEETETVTKSYQKNDWRDAEENKKEDKEKEEEEEEKPKRGSIGENQIKDEKIKKDKEPKEEVKSFMDRKKGFTEVKSQNGEFMTHKLKHTENTFSRPGGRASVDTKEAEGAPQVEAGKRLEELRRRRGETESEEFEKLKQKQQEAALELEELKKKREERRKVLEEEEQRRKQEEADRKLREEEEKRRLKEEIERRRAEAAEKRQKMPEDGLSDDKKPFKCFTPKGSSLKIEERAEFLNKSVQKSSGVKSTHQAAIVSKIDSRLEQYTSAIEGTKSAKPTKPAASDLPVPAEGVRNIKSMWEKGNVFSSPTAAGTPNKETAGLKVGVSSRINEWLTKTPDGNKSPAPKPSDLRPGDVSSKRNLWEKQSVDKVTSPTKV

SEQ ID NO: 7879 - protein, 765 aa, Homo sapiens
MSGDHLHNDSQIEADFRLNDSHKHKDKHKDREHRHKEHKKEKDREKSKHSNSEHKDSEKKHKEKEKTKHKDGSSEKHKDKHKDRDKEKRKEEKVRASGDAKIKKEKENGFSSPPQIKDEPEDDGYFVPPKEDIKPLKRPRDEDDADYKPKKIKTEDTKKEKKRKLEEEEDGKLKKPKNKDKDKKVPEPDNKKKKPKKEEEQKWKWWEEERYPEGIKWKFLEHKGPVFAPPYEPLPENVKFYYDGKVMKLSPKAEEVATFFAKMLDHEYTTKEIFRKNFFKDWRKEMTNEEKNIITNLSKCDFTQMSQYFKAQTEARKQMSKEEKLKIKEENEKLLKEYGFCIMDNHKERIANFKIEPPGLFRGRGNHPKMGMLKRRIMPEDIIINCSKDAKVPSPPPGHKWKEVRHDNKVTWLVSWTENIQGSIKYIMLNPSSRIKGEKDWQKYETARRLKKCVDKIRNQYREDWKSKEMKVRQRAVALYFIDKLALRAGNEKEEGETADTVGCCSLRVEHINLHPELDGQEYVVEFDFLGKDSIRYYNKVPVEKRVFKNLQLFMENKQPEDDLFDRLNTGILNKHLQDLMEGLTAKVFRTYNASITLQQQLKELTAPDENIPAKILSYNRANRAVAILCNHQRAPPKTFEKSMMNLQTKIDAKKEQLADARRDLKSAKADAKVMKDAKTKKVVESKKKAVQRLEEQLMKLEVQATDREENKQIALGTSKLNYLDPRITVAWCKKWGVPIEKIYNKTQREKFAWAIDMADEDYEF

SEQ ID NO: 7880 - protein, 216 aa, Homo sapiens
MRLSALLALASKVTLPPHYRYGMSPPGSVADKRKNPPWIRRRPVVVEPISDEDWYLFCGDTVEILEGKDAGKQGKVVQVIRQRNWVVVGGLNTHYRYIGKTMDYRGTMIPSEAPLLHRQVKLVDPMDRKPTEIEWRFTEAGERVRVSTRSGRIIPKPEFPRADGIVPETWIDGPKDTSVEDALERTYVPCLKTLQEEVMEAMGIKETRKYKKVYWY

SEQ ID NO: 7881 - protein, 780 aa, Homo sapiens
MTESASSTSGQEFDVFSVMDWKDGVGTLPGSDLKFRVNEFGALEVITDENEMENVKKATATTTWMVPTAQEAPTSPPSSRPVFPPAYWTSPPGCPTVFSEKTGMPFRLKDPVKVEGLQFCENCCQYGNVDECLSGGNYCSQNCARHIKDKDQKEERDVEEDNEEEDPKCSRKKKPKLSLKADTKEDGEERDDEMENKQDVRILRGSQRARRKRRGDSAVLKQGLPPKGKKAWCWASYLEEEKAVAVPAKLFKEHQSFPYNKNGFKVGMKLEGVDPEHQSVYCVLTVAEVCGYRIKLHFDGYSDCYDFWVNADALDIHPVGWCEKTGHKLHPPKGYKEEEFNWQTYLKTCKAQAAPKSLFENQNITVIPSGFRVGMKLEAVDKKNPSFICVATVTDMVDNRFLVHFDNWDESYDYWCEASSPHIHPVGWCKEHRRTLITPPGYPNVKHFSWDKYLEETNSLPAPARAFKVKPPHGFQKKMKLEVVDKRNPMFIRVATVADTDDHRVKVHFDGWNNCYDYWIDADSPDIHPVGWCSKTGHPLQPPLSPLELMEASEHGGCSTPGCKGIGHFKRARHLGPHSAANCPYSEINLNKDRIFPDRLSGEMPPASPSFPRNKRTDANESSSSPEIRDQHADDVKEDFEERTESEMRTSHEARGAREEPTVQQAQRRSAVFLSFKSPIPCLPLRWEQQSKLLPTVAGIPASKVSKWSTDEVSEFIQSLPGCEEHGKVFKDEQIDGEAFLLMTQTDIVKIMSIKLGPALKIFNSILMFKAAEKNSHNEL

SEQ ID NO: 7882 - protein, 289 aa, Homo sapiens
MENGYTYEDYKNTAEWLLSHTKHRPQVAIICGSGLGGLTDKLTQAQIFDYGEIPNFPRSTVPGHAGRLVFGFLNGRACVMMQGRFHMYEGYPLWKVTFPVRVFHLLGVDTLVVTNAAGGLNPKFEVGDIMLIRDHINLPGFSGQNPLRGPNDERFGDRFPAMSDAYDRTMRQRALSTWKQMGEQRELQEGTYVMVAGPSFETVAECRVLQKLGADAVGMSTVPEVIVARHCGLRVFGFSLITNKVIMDYESLEKANHEEVLAAGKQAAQKLEQFVSILMASIPLPDKAS

SEQ ID NO: 7883 - protein, 1294 aa, Homo sapiens
MALAGLCALLACCWGPAAVLATAAGDVDPSKELECKLKSITVSALPFLRENDLSIMHSPSASEPKLLFSVRNDFPGEMVVVDDLENTELPYFVLEISGNTEDIPLVRWRQQWLENGTLLFHIHHQDGAPSLPGQDPTEEPQHESAEEELRILHISVMGGMIALLLSILCLVMILYTRRRWCKRRRVPQPQKSASAEAANEIHYIPSVLIGGHGRESLRNARVQGHNSSGTLSIRETPILDGYEYDITDLRHHLQRECMNGGEDFASQVTRTLDSLQGCNEKSGMDLTPGSDNAKLSLMNKYKDNIIATSPVDSNHQQATLLSHTSSSQRKRINNKARAGSAFLNPEGDSGTEAENDPQLTFYTDPSRSRRRSRVGSPRSPVNKTTLTLISITSCVIGLVCSSHVNCPLVVKITLHVPEHLIADGSRFILLEGSQLDASDWLNPAQVVLFSQQNSSGPWAMDLCARRLLDPCEHQCDPETGECLCYEGYMKDPVHKHLCIRNEWGTNQGPWPYTIFQRGFDLVLGEQPSDKIFRFTYTLGEGMWLPLSKSFVIPPAELAINPSAKCKTDMTVMEDAVEVREELMTSSSFDSLEVLLDSFGPVRDCSKDNGGCSKNFRCISDRKLDSTGCVCPSGLSPMKDSSGCYDRHIGVDCSDGFNGGCEQLCLQQMAPFPDDPTLYNILMFCGCIEDYKLGVDGRSCQLITETCPEGSDCGESRELPMNQTLFGEMFFGYNNHSKEVAAGQVLKGTFRQNNFARGLDQQLPDGLVVATVPLENQCLEEISEPTPDPDFLTGMVNFSEVSGYPVLQHWKVRSVMYHIKLNQVAISQALSNALHSLDGATSRADFVALLDQFGNHYIQEAIYGFEESCSIWYPNKQVQRRLWLEYEDISKGNSPSDESEERERDPKVLTFPEYITSLSDSGTKHMAAGVRMECHSKGRCPSSCPLCHVTSSPDTPAEPVLLEVTKAAPIYELVTNNQTQRLLQEATMSSLWCSGTGDVIEDWCRCDSTAFGADGLPTCAPLPQPVLRLSTVHEPSSTLVVLEWEHSEPPIGVQIVDYLLRQEKVTDRMDHSKVETETVLSFVDDIISGAKSPCAMPSQVPDKQLTTISLIIRCLEPDTIYMFTLWGVDNTGRRSRPSDVIVKTPCPVVDDVKAQEIADKIYNLFNGYTSGKEQQTAYNTLLDLGSPTLHRVLYHYNQHYESFGEFTWRCEDELGPRKAGLILSQLGDLSSWCNGLLQEPKISLRRSSLKYLGCRYSEIKPYGLDWAELSRDLRKTCEEQTLSIPYNDYGDSKEI

SEQ ID NO: 7884 - protein, 780 aa, Homo sapiens
MSKMPAKKKSCFQITSVTTAQVATSITEDTESLDDPDESRTEDVSSEIFDVSRATDYGPEEVCERSSSEETLNNVGDAETPGTVSPNLLLDGQLAAAAAAPANGGGVVSARSVSGALASTLAAAATSAPAPGAPGGPQLAGSSAGPVTAAPSQPPTTCSSRFRVIKLDHGSGEPYRRGRWTCMEYYERDSDSSVLTRSGDCIRHSSTFDQTAERDSGLGATGGSVVVVVASMQGAHGPESGTDSSLTAVSQLPPSEKMSQPTPAQPQSFSVGQPQPPPPPVGGAVAQSSAPLPPFPGAATGPQPMMAAAQPSQPQGAGPGGQTLPPTNVTLAQPAMSLPPQPGPAVGAPAAQQPQQFAYPQPQIPPGHLLPVQPSGQSEYLQQHVAGLQPPSPAQPSSTGAAASPATAATLPVGTGQNASSVGAQLMGASSQPSEAMAPRTGPAQGGQVAPCQPTGVPPATVGGVVQPCLGPAGAGQPQSVPPPQMGGSGPLSAVPGGPHAVVPGVPNVPAAVPAPSVPSVSTTSVTMPNVPAPLAQSQQLSSHTPVSRSSSIIQHVGLPLAPGTHSAPTSLPQSDLSQFQTQTQPLVGQVDDTRRKSEPLPQPPLSLIAENKPVVKPPVADSLANPLQLTPMNSLATSVFSIAIPVDGDEDRNPSTAFYQAFHLNTLKESKSLWDSASGGGVVAIDNKIEQAMDLVKSHLMYAVREEVEVLKEQIKELVERNSLLERENALLKSLSSNDQLSQLPTQQANPGSTSQQQAVIAQPPQPTQPPQQPNVSSA

SEQ ID NO: 7885 - protein, 406 aa, Homo sapiens
MRGSVECTWGWGHCAPSPLLLWTLLLFAAPFGLLGEKTRQVSLEVIPNWLGPLQNLLHIRAVGTNSTLHYVWSSLGPLAVVMVATNTPHSTLSVNWSLLLSPEPDGGLMVLPKDSIQFSSALVFTRLLEFDSTNVSDTAAKPLGRPYPPYSLADFSWNNITDSLDPATLSATFQGHPMNDPTRTFANGSLAFRVQAFSRSSRPAQPPRLLHTADTCQLEVALIGASPRGNRSLFGLEVATLGQGPDCPSMQEQHSIDDEYAPAVFQLDQLLWGSLPSGFAQWRPVAYSQKPGGRESALPCQASPLHPALAYSLPQSPIVRAFFGSQNNFCAFNLTFGASTGPGYWDQHYLSWSMLLGVGFPPVDGLSPLVLGIMAVALGAPGLMLLGGGLVLLLHHKKYSEYQSIN

SEQ ID NO: 7886 - protein, 2549 aa, Homo sapiens
MLGTGPAAATTAATTSSNVSVLQQFASGLKSRNEETRAKAAKELQHYVTMELREMSQEESTRFYDQLNHHIFELVSSSDANERKGGILAIASLIGVEGGNATRIGRFANYLRNLLPSNDPVVMEMASKAIGRLAMAGDTFTAEYVEFEVKRALEWLGADRNEGRRHAAVLVLRELAISVPTFFFQQVQPFFDNIFVAVWDPKQAIREGAVAALRACLILTTQREPKEMQKPQWYRHTFEEAEKGFDETLAKEKGMNRDDRIHGALLILNELVRISSMEGERLREEMEEITQQQLVHDKYCKDLMGFGTKPRHITPFTSFQAVQPQQSNALVGLLGYSSHQGLMGFGTSPSPAKSTLVESRCCRDLMEEKFDQVCQWVLKCRNSKNSLIQMTILNLLPRLAAFRPSAFTDTQYLQDTMNHVLSCVKKEKERTAAFQALGLLSVAVRSEFKVYLPRVLDIIRAALPPKDFAHKRQKAMQVDATVFTCISMLARAMGPGIQQDIKELLEPMLAVGLSPALTAVLYDLSRQIPQLKKDIQDGLLKMLSLVLMHKPLRHPGMPKGLAHQLASPGLTTLPEASDVGSITLALRTLGSFEFEGHSLTQFVRHCADHFLNSEHKEIRMEAARTCSRLLTPSIHLISGHAHVVSQTAVQVVADVLSKLLVVGITDPDPDIRYCVLASLDERFDAHLAQAENLQALFVALNDQVFEIRELAICTVGRLSSMNPAFVMPFLRKMLIQILTELEHSGIGRIKEQSARMLGHLVSNAPRLIRPYMEPILKALILKLKDPDPDPNPGVINNVLATIGELAQVSGLEMRKWVDELFIIIMDMLQDSSLLAKRQVALWTLGQLVASTGYVVEPYRKYPTLLEVLLNFLKTEQNQGTRREAIRVLGLLGALDPYKHKVNIGMIDQSRDASAVSLSESKSSQDSSDYSTSEMLVNMGNLPLDEFYPAVSMVALMRIFRDQSLSHHHTMVVQAITFIFKSLGLKCVQFLPQVMPTFLNVIRVCDGAIREFLFQQLGMLVSFVKSHIRPYMDEIVTLMREFWVMNTSIQSTIILLIEQIVVALGGEFKLYLPQLIPHMLRVFMHDNSPGRIVSIKLLAAIQLFGANLDDYLHLLLPPIVKLFDAPEAPLPSRKAALETVDRLTESLDFTDYASRIIHPIVRTLDQSPELRSTAMDTLSSLVFQLGKKYQIFIPMVNKVLVRHRINHQRYDVLICRIVKGYTLADEEEDPLIYQHRMLRSGQGDALASGPVETGPMKKLHVSTINLQKAWGAARRVSKDDWLEWLRRLSLELLKDSSSPSLRSCWALAQAYNPMARDLFNAAFVSCWSELNEDQQDELIRSIELALTSQDIAEVTQTLLNLAEFMEHSDKGPLPLRDDNGIVLLGERAAKCRAYAKALHYKELEFQKGPTPAILESLISINNKLQQPEAAAGVLEYAMKHFGELEIQATWYEKLHEWEDALVAYDKKMDTNKDDPELMLGRMRCLEALGEWGQLHQQCCEKWTLVNDETQAKMARMAAAAAWGLGQWDSMEEYTCMIPRDTHDGAFYRAVLALHQDLFSLAQQCIDKARDLLDAELTAMAGESYSRAYGAMVSCHMLSELEEVIQYKLVPERREIIRQIWWERLQGCQRIVEDWQKILMVRSLVVSPHEDMRTWLKYASLCGKSGRLALAHKTLVLLLGVDPSRQLDHPLPTVHPQVTYAYMKNMWKSARKIDAFQHMQHFVQTMQQQAQHAIATEDQQHKQELHKLMARCFLKLGEWQLNLQGINESTIPKVLQYYSAATEHDRSWYKAWHAWAVMNFEAVLHYKHQNQARDEKKKLRHASGANITNATTAATTAATATTTASTEGSNSESEAESTENSPTPSPLQKKVTEDLSKTLLMYTVPAVQGFFRSISLSRGNNLQDTLRVLTLWFDYGHWPDVNEALVEGVKAIQIDTWLQVIPQLIARIDTPRPLVGRLIHQLLTDIGRYHPQALIYPLTVASKSTTTARHNAANKILKNMCEHSNTLVQQAMMVSEELIRVAILWHEMWHEGLEEASRLYFGERNVKGMFEVLEPLHAMMERGPQTLKETSFNQAYGRDLMEAQEWCRKYMKSGNVKDLTQAWDLYYHVFRRISKQLPQLTSLELQYVSPKLLMCRDLELAVPGTYDPNQPIIRIQSIAPSLQVITSKQRPRKLTLMGSNGHEFVFLLKGHEDLRQDERVMQLFGLVNTLLANDPTSLRKNLSIQRYAVIPLSTNSGLIGWVPHCDTLHALIRDYREKKKILLNIEHRIMLRMAPDYDHLTLMQKVEVFEHAVNNTAGDDLAKLLWLKSPSSEVWFDRRTNYTRSLAVMSMVGYILGLGDRHPSNLMLDRLSGKILHIDFGDCFEVAMTREKFPEKIPFRLTRMLTNAMEVTGLDGNYRITCHTVMEVLREHKDSVMAVLEAFVYDPLLNWRLMDTNTKGNKRSRTRTDSYSAGQSVEILDGVELGEPAHKKTGTTVPESIHSFIGDGLVKPEALNKKAIQIINRVRDKLTGRDFSHDDTLDVPTQVELLIKQATSHENLCQCYIGWCPFW

SEQ ID NO: 7887 - protein, 792 aa, Homo sapiens
MQGEDARYLKRKVKGGNIDVHPSEKALIVHYEVEATILGEMGDPMLGERKECQKIIRLKSLNANTDITSLARKVVEECKLIHPSKLNEVEQLLYYLQNRRDSLSGKEKKEKSSKPKDPPPFEGMEIDEVANINDMDEYIELLYEDIPDKVRGSALILQLARNPDNLEELLLNETALGALARVLREDWKQSVELATNIIYIFFCFSSFSQFHGLITHYKIGALCMNIIDHELKRHELWQEELSKKKKAVDEDPENQTLRKDYEKTFKKYQGLVVKQEQLLRVALYLLLNLAEDTRTELKMRNKNIVHMLVKALDRDNFELLILVVSFLKKLSIFMENKNDMVEMDIVEKLVKMIPCEHEDLLNITLRLLLNLSFDTGLRNKMVQVGLLPKLTALLGNDNYKQIAMCVLYHISMDDRFKSMFAYTDCIPQLMKMLFECSDERIDLELISFCINLAANKRNVQLICEGNGLKMLMKRALKFKDPLLMKMIRNISQHDGPTKNLFIDYVGDLAAQISNDEEEEFVIECLGTLANLTIPDLDWELVLKEYKLVPYLKDKLKPGAAEDDLVLEVVIMIGTVSMDDSCAALLAKSGIIPALIELLNAQQEDDEFVCQIIYVFYQMVFHQATRDVIIKETQAPAYLIDLMHDKNNEIRKVCDNTLDIIAEYDEEWAKKIQSEKFRWHNSQWLEMVESRQMDESEQYLYGDDRIEPYIHEGDILERPDLFYNSDGLIASEGAISPDFFNDYHLQNGDVVGQHSFPGSLGMDGFGQPVGILGRPATAYGFRPDEPYYYGYGS

SEQ ID NO: 7888 - protein, 103 aa, Homo sapiens
MWLPWALLLLWVPAGDHSELSQNPKQAATQSELHYANLELLMWPLQEKPAPPREVEVEYSTVASPREELHYASVVFDSNTNRIAAQRPREEEPDSDYSVIRKT

SEQ ID NO: 7889 - protein, 207 aa, Homo sapiens
MQSGTHWRVLGLCLLSVGVWGQDGNEEMGGITQTPYKVSISGTTVILTCPQYPGSEILWQHNDKNIGGDEDDKNIGSDEDHLSLKEFSELEQSGYYVCYPRGSKPEDANFYLYLRARVCENCMEMDVMSVATIVIVDICITGGLLLLVYYWSKNRKAKAKPVTRGAGAGGRQRGQNKERPPPVPNPDYEPIRKGQRDLYSGLNQRRI

SEQ ID NO: 7890 - protein, 327 aa, Homo sapiens
MAAVVEVEVGGGAAGERELDEVDMSDLSPEEQWRVEHARMHAKHRGHEAMHAEMVLILIATLVVAQLLLVQWKQRHPRSYNMVTLFQMWVVPLYFTVKLHWWRFLVIWILFSAVTAFVTFRATRKPLVQTTPRLVYKWFLLIYKISYATGIVGYMAVMFTLFGLNLLFKIKPEDAMDFGISLLFYGLYYGVLERDFAEMCADYMASTIGFYSESGMPTKHLSDSVCAVCGQQIFVDVSEEGIIENTYRLSCNHVFHEFCIRGWCIVGKKQTCPYCKEKVDLKRMFSNPWERPHVMYGQLLDWLRYLVAWQPVIIGVVQGINYILGLE

SEQ ID NO: 7891 - protein, 5430 aa, Homo sapiens
MSSSDEETLSERSCRSERSCRSERSYRSERSGSLSPCPPGDTLPWNLPLHEQKKRKSQDSVLDPAERAVVRVADERDRVQKKTFTKWVNKHLMKVRKHINDLYEDLRDGHNLISLLEVLSGIKLPREKGRMRFHRLQNVQIALDFLKQRQVKLVNIRNDDITDGNPKLTLGLIWTIILHFQISDIYISGESGDMSAKEKLLLWTQKVTAGYTGIKCTNFSSCWSDGKMFNALIHRYRPDLVDMERVQIQSNRENLEQAFEVAERLGVTRLLDAEDVDVPSPDEKSVITYVSSIYDAFPKVPEGGEGISATEVDSRWQEYQSRVDSLIPWIKQHTILMSDKTFPQNPVELKALYNQYIHFKETEILAKEREKGRIEELYKLLEVWIEFGRIKLPQGYHPNDVEEEWGKLIIEMLEREKSLRPAVERLELLLQIANKIQNGALNCEEKLTLAKNTLQADAAHLESGQPVQCESDVIMYIQECEGLIRQLQVDLQILRDENYYQLEELAFRVMRLQDELVTLRLECTNLYRKGHFTSLELVPPSTLTTTHLKAEPLTKATHSSSTSWFRKPMTRAELVAISSSEDEGNLRFVYELLSWVEEMQMKLERAEWGNDLPSVELQLETQQHIHTSVEELGSSVKEARLYEGKMSQNFHTSYAETLGKLETQYCKLKETSSFRMRHLQSLHKFVSRATAELIWLNEKEEEELAYDWSDNNSNISAKRNYFSELTMELEEKQDVFRSLQDTAELLSLENHPAKQTVEAYSAAVQSQLQWMKQLCLCVEQHVKENTAYFQFFSDARELESFLRNLQDSIKRKYSCDHNTSLSRLEDLLQDSMDEKEQLIQSKSSVASLVGRSKTIVQLKPRSPDHVLKNTISVKAVCDYRQIEITICKNDECVLEDNSQRTKWKVISPTGNEAMVPSVCFLIPPPNKDAIEMASRVEQSYQKVMALWHQLHVNTKSLISWNYLRKDLDLVQTWNLEKLRSSAPGECHQIMKNLQAHYEDFLQDSRDSVLFSVADRLRLEEEVEACKARFQHLMKSMENEDKEETVAKMYISELKNIRLRLEEYEQRVVKRIQSLASSRTDRDAWQDNALRIAEQEHTQEDLQQLRSDLDAVSMKCDSFLHQSPSSSSVPTLRSELNLLVEKMDHVYGLSTVYLNKLKTVDVIVRSIQDAELLVKGYEIKLSQEEVVLADLSALEAHWSTLRHWLSDVKDKNSVFSVLDEEIAKAKVVAEQMSRLTPERNLDLERYQEKGSQLQERWHRVIAQLEIRQSELESIQEVLGDYRACHGTLIKWIEETTAQQEMMKPGQAEDSRVLSEQLSQQTALFAEIERNQTKLDQCQKFSQQYSTIVKDYELQLMTYKAFVESQQKSPGKRRRMLSSSDAITQEFMDLRTRYTALVTLTTQHVKYISDALRRLEEEEKVVEEEKQEHVEKVKELLGWVSTLARNTQGKATSSETKESTDIEKAILEQQVLSEELTTKKEQVSEAIKTSQIFLAKHGHKLSEKEKKQISEQLNALNKAYHDLCDGSANQLQQLQSQLAHQTEQKTLQKQQNTCHQQLEDLCSWVGQAERALAGHQGRTTQQDLSALQKNQSDLKDLQDDIQNRATSFATVVKDIEGFMEENQTKLSPRELTALREKLHQAKEQYEALQEETRVAQKELEEAVTSALQQETEKSKAAKELAENKKKIDALLDWVTSVGSSGGQLLTNLPGMEQLSGASLEKGALDTTDGYMGVNQAPEKLDKQCEMMKARHQELLSQQQNFILATQSAQAFLDQHGHNLTPEEQQMLQQKLGELKEQYSTSLAQSEAELKQVQTLQDELQKFLQDHKEFESWLERSEKELENMHKGGSSPETLPSLLKRQGSFSEDVISHKGDLRFVTISGQKVLDMENSFKEGKEPSEIGNLVKDKLKDATERYTALHSKCTRLGSHLNMLLGQYHQFQNSADSLQAWMQACEANVEKLLSDTVASDPGVLQEQLATTKQLQEELAEHQVPVEKLQKVARDIMEIEGEPAPDHRHVQETTDSILSHFQSLSYSLAERSSLLQKAIAQSQSVQESLESLLQSIGEVEQNLEGKQVSSLSSGVIQEALATNMKLKQDIARQKSSLEATREMVTRFMETADSTTAAVLQGKLAEVSQRFEQLCLQQQEKESSLKKLLPQAEMFEHLSGKLQQFMENKSRMLASGNQPDQDITHFFQQIQELNLEMEDQQENLDTLEHLVTELSSCGFALDLCQHQDRVQNLRKDFTELQKTVKEREKDASSCQEQLDEFRKLVRTFQKWLKETEGSIPPTETSMSAKELEKQIEHLKSLLDDWASKGTLVEEINCKGTSLENLIMEITAPDSQGKTGSILPSVGSSVGSVNGYHTCKDLTEIQCDMSDVNLKYEKLGGVLHERQESLQAILNRMEEVHKEANSVLQWLESKEEVLKSMDAMSSPTKTETVKAQAESNKAFLAELEQNSPKIQKVKEALAGLLVTYPNSQEAENWKKIQEELNSRWERATEVTVARQRQLEESASHLACFQAAESQLRPWLMEKELMMGVLGPLSIDPNMLNAQKQQVQFMLKEFEARRQQHEQLNEAAQGILTGPGDVSLSTSQVQKELQSINQKWVELTDKLNSRSSQIDQAIVKSTQYQELLQDLSEKVRAVGQRLSVQSAISTQPEAVKQQLEETSEIRSDLEQLDHEVKEAQTLCDELSVLIGEQYLKDELKKRLETVALPLQGLEDLAADRINRLQAALASTQQFQQMFDELRTWLDDKQSQQAKNCPISAKLERLQSQLQENEEFQKSLNQHSGSYEVIVAEGESLLLSVPPGEEKRTLQNQLVELKNHWEELSKKTADRQSRLKDCMQKAQKYQWHVEDLVPWIEDCKAKMSELRVTLDPVQLESSLLRSKAMLNEVEKRRSLLEILNSAADILINSSEADEDGIRDEKAGINQNMDAVTEELQAKTGSLEEMTQRLREFQESFKNIEKKVEGAKHQLEIFDALGSQACSNKNLEKLRAQQEVLQALEPQVDYLRNFTQGLVEDAPDGSDASQLLHQAEVAQQEFLEVKQRVNSGCVMMENKLEGIGQFHCRVREMFSQLADLDDELDGMGAIGRDTDSLQSQIEDVRLFLNKIHVLKLDIEASEAECRHMLEEEGTLDLLGLKRELEALNKQCGKLTERGKARQEQLELTLGRVEDFYRKLKGLNDATTAAEEAEALQWVVGTEVEIINQQLADFKMFQKEQVDPLQMKLQQVNGLGQGLIQSAGKDCDVQGLEHDMEEINARWNTLNKKVAQRIAQLQEALLHCGKFQDALEPLLSWLADTEELIANQKPPSAEYKVVKAQIQEQKLLQRLLDDRKATVDMLQAEGGRIAQSAELADREKITGQLESLESRWTELLSKAAARQKQLEDILVLAKQFHETAEPISDFLSVTEKKLANSEPVGTQTAKIQQQIIRHKALEEDIENHATDVHQAVKIGQSLSSLTSPAEQGVLSEKIDSLQARYSEIQDRCCRKAALLDQALSNARLFGEDEVEVLNWLAEVEDKLSSVFVKDFKQDVLHRQHADHLALNEEIVNRKKNVDQAIKNGQALLKQTTGEEVLLIQEKLDGIKTRYADITVTSSKALRTLEQARQLATKFQSTYEELTGWLREVEEELATSGGQSPTGEQIPQFQQRQKELKKEVMEHRLVLDTVNEVSRALLELVPWRAREGLDKLVSDANEQYKLVSDTIGQRVDEIDAAIQRSQQYEQAADAELAWVAETKRKLMALGPIRLEQDQTTAQLQVQKAFSIDIIRHKDSMDELFSHRSEIFGTCGEEQKTVLQEKTESLIQQYEAISLLNSERYARLERAQVLVNQFWETYEELSPWIEETRALIAQLPSPAIDHEQLRQQQEEMRQLRESIAEHKPHIDKLLKIGPQLKELNPEEGEMVEEKYQKAENMYAQIKEEVRQRALALDEAVSQSTQITEFHDKIEPMLETLENLSSRLRMPPLIPAEVDKIRECISDNKSATVELEKLQPSFEALKRRGEELIGRSQGADKDLAAKEIQDKLDQMVFFWEDIKARAEEREIKFLDVLELAEKFWYDMAALLTTIKDTQDIVHDLESPGIDPSIIKQQVEAAETIKEETDGLHEELEFIRILGADLIFACGETEKPEVRKSIDEMNNAWENLNKTWKERLEKLEDAMQAAVQYQDTLQAMFDWLDNTVIKLCTMPPVGTDLNTVKDQLNEMKEFKVEVYQQQIEMEKLNHQGELMLKKATDETDRDIIREPLTELKHLWENLGEKIAHRQHKLEGALLALGQFQHALEELMSWLTHTEELLDAQRPISGDPKVIEVELAKHHVLKNDVLAHQATVETVNKAGNELLESSAGDDASSLRSRLEAMNQCWESVLQKTEEREQQLQSTLQQAQGFHSEIEDFLLELTRMESQLSASKPTGGLPETAREQLDTHMELYSQLKAKEETYNQLLDKGRLMLLSRDDSGSGSKTEQSVALLEQKWHVVSSKMEERKSKLEEALNLATEFQNSLQEFINWLTLAEQSLNIASPPSLILNTVLSQIEEHKVFANEVNAHRDQIIELDQTGNQLKFLSQKQDVVLIKNLLVSVQSRWEKVVQRSIERGRSLDDARKRAKQFHEAWKKLIDWLEDAESHLDSELEISNDPDKIKLQLSKHKEFQKTLGGKQPVYDTTIRTGRALKEKTLLPEDSQKLDNFLGEVRDKWDTVCGKSVERQHKLEEALLFSGQFMDALQALVDWLYKVEPQLAEDQPVHGDLDLVMNLMDAHKVFQKELGKRTGTVQVLKRSGRELIENSRDDTTWVKGQLQELSTRWDTVCKLSVSKQSRLEQALKQAEVFRDTVHMLLEWLSEAEQTLRFRGALPDDTEALQSLIDTHKEFMKKVEEKRVDVNSAVAMGEVILAVCHPDCITTIKHWITIIRARFEEVLTWAKQHQQRLETALSELVANAELLEELLAWIQWAETTLIQRDQEPIPQNIDRVKALIAEHQTFMEEMTRKQPDVDRVTKTYKRKNIEPTHAPFIEKSRSGGRKSLSQPTPPPMPILSQSEAKNPRINQLSARWQQVWLLALERQRKLNDALDRLEELKEFANFDFDVWRKKYMRWMNHKKSRVMDFFRRIDKDQDGKITRQEFIDGILASKFPTTKLEMTAVADIFDRDGDGYIDYYEFVAALHPNKDAYRPTTDADKIEDEVTRQVAQCKCAKRFQVEQIGENKYRFGDSQQLRLVRILRSTVMVRVGGGWMALDEFLVKNDPCRARGRTNIELREKFILPEGASQGMTPFRSRGRRSKPSSRAASPTRSSSSASQSNHSCTSMPSSPATPASGTKVIPSSGSKLKRPTPTFHSSRTSLAGDTSNSSSPASTGAKTNRADPKKSASRPGSRAGSRAGSRASSRRGSDASDFDLLETQSACSDTSESSAAGGQGNSRRGLNKPSKIPTMSKKTTTASPRTPGPKR

SEQ ID NO: 7892 - protein, 537 aa, Homo sapiens
MGDEDKRITYEDSEPSTGMNYTPSMHQEAQEETVMKLKGIDANEPTEGSILLKSSEKKLQETPTEANHVQRLRQMLACPPHGLLDRVITNVTIIVLLWAVVWSITGSECLPGGNLFGIIILFYCAIIGGKLLGLIKLPTLPPLPSLLGMLLAGFLIRNIPVINDNVQIKHKWSSSLRSIALSIILVRAGLGLDSKALKKLKGVCVRLSMGPCIVEACTSALLAHYLLGLPWQWGFILGFVLGAVSPAVVVPSMLLLQGGGYGVEKGVPTLLMAAGSFDDILAITGFNTCLGIAFSTGSTVFNVLRGVLEVVIGVATGSVLGFFIQYFPSRDQDKLVCKRTFLVLGLSVLAVFSSVHFGFPGSGGLCTLVMAFLAGMGWTSEKAEVEKIIAVAWDIFQPLLFGLIGAEVSIASLRPETVGLCVATVGIAVLIRILTTFLMVCFAGFNLKEKIFISFAWLPKATVQAAIGSVALDTARSHGEKQLEDYGMDVLTVAFLSILITAPIGSLLIGLLGPRLLQKVEHQNKDEEVQGETSVQV

SEQ ID NO: 7893 - protein, 182 aa, Homo sapiens
MWPPDPDPDPDPEPAGGSRPGPAVPGLRALLPARAFLCSLKGRLLLAESGLSFITFICYVASSASAFLTAPLLEFLLALYFLFADAMQLNDKWQGLCWPMMDFLRCVTAALIYFAISITAIAKYSDGASKAAGVFGFFATIVFATDFYLIFNDVAKFLKQGDSADETTAHKTEEENSDSDSD

SEQ ID NO: 7894 - protein, 205 aa, Homo sapiens
MAASSLTVTLGRLASACSHSILRPSGPGAASLWSASRRFNSQSTSYLPGYVPKTSLSSPPWPEVVLPDPVEETRHHAEVVKKVNEMIVTGQYGRLFAVVHFASRQWKVTSEDLILIGNELDLACGERIRLEKVLLVGADNFTLLGKPLLGKDLVRVEATVIEKTESWPRIIMRFRKRKNFKKKRIVTTPQTVLRINSIEIAPCLL

SEQ ID NO: 7895 - protein, 221 aa, Homo sapiens
MFQQFQASCLVLFFLVGFAQQTLKPQNRKVDCNKGVTGTIYEYGALTLNGEEYIQFKQFAGKHVLFVNVAAYUGLAAQYPELNALQEELKNFGVIVLAFPCNQFGKQEPGTNSEILLGLKYVCPGSGFVPSFQLFEKGDVNGEKEQKVFTFLKNSCPPTSDLLGSSSQLFWEPMKVHDIRWNFEKFLVGPDGVPVMHWFHQAPVSTVKSDILEYLKQFNTH

SEQ ID NO: 7896 - protein, 409 aa, Homo sapiens
MDRLKSHLTVCFLPSVPFLILVSTLATAKSVTNSTLNGTNVVLGSVPVIIARTDHIIVKEGNSALINCSVYGIPDPQFKWYNSIGKLLKEEEDEKERGGGKWQMHDSGLLNITKVSFSDRGKYTCVASNIYGTVNNTVTLRVIFTSGDMGVYYMVVCLVAFTIVMVLNITRLCMMSSHLKKTEKAINEFFRTEGAEKLQKAFEIAKRIPIITSAKTLELAKVTQFKTMEFARYIEELARSVPLPPLIMNCRTIMEEIMEVVGLEEQGQNFVRHTPEGQEAADRDEVYTIPNSLKRSDSPAADSDASSLHEQPQQIAIKVSVHPQSKKEHADDQEGGQFEVKDVEETELSAEHSPETAEPSTDVTSTELTSEEPTPVEVPDKVLPPAYLEATEPAVTHDKNTCIIYESHV

SEQ ID NO: 7897 - protein, 1586 aa, Homo sapiens
METSASATASEKQEAKSGILEAAGFPDPGKKASPLVVAAAAAAAVAAQGVPQHLLPPFHAPLPIDMRHQEGRYHYEPHSVHGVHGPPALSGSPVISDISLIRLSPHPAGPGESPFNAPHPYVNPHMEHYLRSVHSSPTLSMISAARGLSPADVAQEHLKERGLFGLPAPGTTPSDYYHQMTLVAGHPAPYGDLLMQSGGAASAPHLHDYLNPVDVSRFSSPRVTPRLSRKRALSISPLSDASLDLQRMIRTSPNSLVAYINNSRSSSAASGSYGHLSAGALSPAFTFPHPINPVAYQQILSQQRGLGSAFGHTPPLIQPSPTFLAQQPMALTSINATPTQLSSSSNCLSDTNQNKQSSESAVSSTVNPVAIHKRSKVKTEPEGLRPASPLALTQGQVSGHGSCGCALPLSQEQLADLKEDLDRDDCKQEAEVVIYETNCHWEDCTKEYDTQEQLVHHINNEHIHGEKKEFVCRWQACTREQKPFKAQYMLVVHMRRHTGEKPHKCTFEGCSKAYSRLENLKTHLRSHTGEKPYVCEHEGCNKAFSNASDRAKHQNRTHSNEKPYICKIPGCTKRYTDPSSLRKHVKTVHGPDAHVTKKQRNDVHLRTPLLKENGDSEAGTEPGGPESTEASSTSQAVEDCLHVRAIKTESSGLCQSSPGAQSSCSSEPSPLGSAPNNDSGVEMPGTGPGSLGDLTALDDTPPGADTSALAAPSAGGLQLRKHMTTMHRFEQLKKEKLKSLKDSCSWAGPTPHTRNTKLPPLPGSGSILENFSGSGGGGPAGLLPNPRLSELSASEVTMLSQLQERRDSSTSTVSSAYTVSRRSSGISPYFSSRRSSEASPLGAGRPHNASSADSYDPISTDASRRSSEASQCSGGSGLLNLTPAQQYSLRAKYAAATGGPPPTPLPGLERMSLRTRLALLDAPERTLPAGCPRPLGPRRGSDGPTYGHGHAGAAPAFPHEAPGGGARRASDPVRRPDALSLPRVQRFHSTHNVNPGPLPPCADRRGLRLQSHPSTDGGLARGAYSPRPPSISENVAMEAVAAGVDGAGPEADLGLPEDDLVLPDDVVQYIKAHASGALDEGTGQVYPTESTGFSDNPRLPSPGLHGQRRMVAADSNVGPSAPMLGGCQLGFGAPSSLNKNNMPVQWNEVSSGTVDALASQVKPPPFPQGNLAVVQQKPAFGQYPGYSPQGLQASPGGLDSTQPHLQPRSGAPSQGIPRVNYMQQLRQPVAGSQCPGMTTTMSPHACYGQVHPQLSPSTISGALNQFPQSCSNMPAKPGHLGHPQQTEVAPDPTTMGNRHRELGVPDSALAGVPPPHPVQSYPQQSHHLAASMSQEGYHQVPSLLPARQPGFMEPQTGPMGVATAGFGLVQPRPPLEPSPTGRHRGVRAVQQQLAYARATGHAMAAMPSSQETAEAVPKGAMGNMGSVPPQPPPQDAGGAPDHSMLYYYGQIHMYEQDGGLENLGSCQVMRSQPPQPQACQDSIQPQPLPSPGVNQVSSTVDSQLLEAPQIDFDAIMDDGDHSSLFSGALSPSLLHSLSQNSSRLTTPRNSLTLPSIPAGISNMAVGDMSSMLTSLAEESKFLNMMT

SEQ ID NO: 7898 - protein, 159 aa, Homo sapiens
MEKLRRVLSGQDDEEQGLTAQVLDASSLSFNTRLKWFAICFVCGVFFSILGTGLLWLPGGIKLFAVFYTLGNLAALASTCFLMGPVKQLKKMFEATRLLATIVMLLCFIFTLCAALWWHKKGLAVLFCILQFLSMTWYSLSYIPYARDAVIKCCSSLLS

SEQ ID NO: 7899 - protein, 577 aa, Homo sapiens
MEESHFNSNPYFWPSIPTVSGQIENTMFINKMKDQLLPEKGCGLAPPHYPTLLTVPASVSLPSGISMDTESKSDQLTPHSQASVTQNITVVPVPSTGLMTAGVSCSQRWRREGSQSRGPGLVITSPSGSLVTTASSAQTFPISAPMIVSALPPGSQALQVVPDLSKKVASTLTEEGGGGGGGGGSVAPKPPRGRKKKRMLESGLPEMNDPYVLSPEDDDDHQKDGKTYRCRMCSLTFYSKSEMQIHSKSHTETKPHKCPHCSKTFANSSYLAQHIRIHSGAKPYSCNFCEKSFRQLSHLQQHTRIHSKMHTETIKPHKCPHCSKTFANTSYLAQHLRIHSGAKPYNCSYCQKAFRQLSHLQQHTRIHTGDRPYKCAHPGCEKAFTQLSNLQSHRRQHNKDKPFKCHNCHRAYTDAASLEVHLSTHTVKHAKVYTCTICSRAYTSETYLMKHMRKHNPPDLQQQVQAAAAAAAVAQAQAQAQAQAQAQAQAQAQAQASQASQQQQQQQQQQQQQQQQPPPHFQSPGAAPQGGGGGDSNPNPPPQCSFDLTPYKTAEHHKDICLTVTTSTIQVEHLASS

SEQ ID NO: 7900 - protein, 1496 aa, Homo sapiens
MAEERPPRLVDYFVVAGLAGNGAPIPEETWVPEPSGPLRPPRPAEPITDVAVIARALGEEVPQGYTCIQASAGGHPLELSAGLLGGTQPVICYRRGRDKPPLVELGVLYEGKERPKPGFQVLDTTPYSHSANLAPPGPGHPRTYLTYRRAAEGAGLHALGITDLCLVLPSKGEGTPHTYCRLPRNLNPGMWGPAVYLCYKVGLAKANTLVYEAELLGRYPEEDNEAFPLPESVPVFCLPMGATIECWPAQTKYPVPVFSTFVLTGAAGDKVYGAALQFYEAFPRARLSERQARALGLLSAVERGRALGGRAVRSRRAIAVLSRWPAFPAFRAFLTFLYRYSVSGPHRLPLEAHISHFIHNVPFPSPQRPRILVQMSPYDNLLLCQPVSSPLPLSGASFLQLLQSLGPELAITLLLAVLTEHKLLVHSLRPDLLTSVCEALVSMIFPLHWQCPYIPLCPLVLADVLSAPVPFIVGIHSSYFDLHDPPADVICVDLDTNTLFQTEEKKLLSPRTLPRRPYKVLLATLTNLYQQLDQTYTGPEEEASLEFLLTDYEAVCGRRARLEREVQGAFLRFMACLLKGYRVFLRPLTQAPSEGARDVDNLFFLQGFLKSRERSSHKLYSQLLHTQMFSQFIEECSFGSARHAALEFFDSCVEKVHPEQEKPEPTPLVELEELSGSELTVFITPPEEPALPEGSESTPQYCYDGFPELRAELFESLQEQPGALPVPGPSRSAPSSPAPRRTKQEMKVAQRMAQKSAAVPELWARCLLGHCYGLWFLCLPAYVRSAPSRVQALHTAYHVLRQMESGKVVLPDEVCYRVLMQLCSHYGQPVLSVRVMLEMRQAGIVPNTITYGYYNKAVLESKWPSGTPGGRLRWAKLRNVVLGAAQFRQPLRERQQQQQQQQQQQQQQQQEQVSAHQEAGSSQAEPYLERPSPTRPLQRQTTWAGRSLRDPASPPGRLVKSGSLGSARGAQPTVEAGVAHMIEALGVLEPRGSPVPWHDGSLSDLSLTGEEPLPGGSPGGSGSALSAQSTEALEGLSGRGPKAGGRQDEAGTPRRGLGARLQQLLTPSRHSPASRIPPPELPPDLPPPARRSPMDSLLHPRERPGSTASESSASLGSEWDLSESSLSNLSLRRSSERLSDTPGSFQSPSLEILLSSCSLCRACDSLVYDEEIMAGWAPDDSNLNTTCPFCACPFVPLLSVQTLDSRPSVPSPKSAGASGSKDAPVPGGPGPVLSDRRLCLALDEPQLCNGHMGGASRRVESGAWAYLSPLVLRKELESLVENEGSEVLALPELPSAHPIIFWNLLWYFQRLRLPSILPGLVLASCDGPSHSQAPSPWLTPDPASVQVRLLWDVLTPDPNSCPPLYVLWRVHSQIPQRVVWPGPVPASLSLALLESVLRHVGLNEVHKAVGLLLETLGPPPTGLHLQRGIYREILFLTMAALGKDHVDIVAFDKKYKSAFNKLASSMGKEELRHRRAQMPTPKAIDCRKCFGAPPEC

SEQ ID NO: 7901 - protein, 585 aa, Homo sapiens
MARPDPSAPPSLLLLLLAQLVGRAAAASKAPVCQEITVPMCRGIGYNLTHMPNQFNHDTQDEAGLEVHQFWPLVEIQCSPDLRFFLCSMYTPICLPDYHKPLPPCRSVCERAKAGCSPLMRQYGFAWPERMSCDRLPVLGRDAEVLCMDYNRSEATTAPPRPFPAKPTLPGPPGAPASGGECPAGGPFVCKCREPFVPILKESHPLYNKVRTGQVPNCAVPCYQPSFSADERTFATFWIGLWSVLCFISTSTTVATFLIDMERFRYPERPIIFLSACYLCVSLGFLVRLVVGHASVACSREHNHIHYETTGPALCTIVFLLVYFFGMASSIWWVILSLTWFLAAGMKWGNEAIAGYAQYFHLAAWLIPSVKSITALALSSVDGDPVAGICYVGNQNLNSLRGFVLGPLVLYLLVGTLFLLAGFVSLFRIRSVIKQGGTKTDKLEKLMIRIGIFTLLYTVPASIVVACYLYEQHYRESWEAALTCACPGHDTGQPRAKPEYWVLMLKYFMCLVVGITSGVWIWSGKTVESWRRFTSRCCCRPRRGHKSGGAMAAGDYPEASAALTGRTGPPGPAATYHKQVSLSHV

SEQ ID NO: 7902 - protein, 308 aa, Homo sapiens
MKSCGSMLGLCGQRLPAAWVLLLLPFLPLLLLAAPAPHRASYKPVIVVHGLFDSSYSFRHLLEYINETHPGTVVTVLDLFDGRESLRPLWEQVQGFREAVVPIMAKAPQGVHLICYSQGGLVCRALLSVMDDHNVDSFISLSSPQMGQYGDTDYLKWLFPTSMRSNLYRICYSPWGQEFSICNYWHDPHHDDLYLNASSFLALINGERDHPNATVWRKNFLRVGHLVLIGGPDDGVITPWQSSFFGFYDANETVLEMEEQLVYLRDSFGLKTLLARGAIVRCPMAGISHTAWHSNRTLYETCIEPWLS

SEQ ID NO: 7903 - protein, 511 aa, Homo sapiens
MKFFLLLFTIGFCWAQYSPNTQQGRTSIVHLFEWRWVDIALECERYLAPKGFGGVQVSPPNENVAIHNPFRPWWERYQPVSYKLCTRSGNEDEFRNMVTRCNNVGVRIYVDAVINHMSGNAVSAGTSSTCGSYFNPGSRDFPAVPYSGWDFNDGKCKTGSGDIENYNDATQVRDCRLVGLLDLALEKDYVRSKIAEYMNHLIDIGVAGFRLDASKHMWPGDIKAILDKLHNLNSNWFPAGSKPFIYQEVIDLGGEPIKSSDYFGNGRVTEFKYGAKLGTVIRKWNGEKMSYLKNWGEGWGFMPSDRALVFVDNHDNQRGHGAGGASILTFWDARLYKMAVGFMLAHPYGFTRVMSSYRWPRQFQNGNDVNDWVGPPNNNGVIKEVTINPDTTCGNDWVCEHRWRQIRNMVNFRNVVDGQPFTNWYDNGSNQVAFGRGNRGFIVFNNDDWTFSLTLQTGLPAGTYCDVISGDKINGNCTGIKIYVSDDGKAHFSISNSAEDPFIAIHAESKL

SEQ ID NO: 7904 - protein, 599 aa, Homo sapiens
MSRSLLLWFLLFLLLLPPLPVLLADPGAPTPVNPCCYYPCQHQGICVRFGLDRYQCDCTRTGYSGPNCTIPGLWTWLRNSLRPSPSFTHFLLTHGRWFWEFVNATFIREMLMRLVLTVRSNLIPSPPTYNSAHDYISWESFSNVSYYTRILPSVPKDCPTPMGTKGKKQLPDAQLLARRFLLRRKFIPDPQGTNLMFAFFAQHFTHQFFKTSGKMGPGFTKALGHGVDLGHIYGDNLERQYQLRLFKDGKLKYQVLDGEMYPPSVEEAPVLMHYPRGIPPQSQMAVGQEVFGLLPGLMLYATLWLREHNRVCDLLKAEHPTWGDEQLFQTTRLILIGETIKIVIEEYVQQLSGYFLQLKFDPELLFGVQFQYRNRIAMEFNHLYHWHPLMPDSFKVGSQEYSYEQFLFNTSMLVDYGVEALVDAFSRQIAGRIGGGRNMDHHILHVAVDVIRESREMRLQPFNEYRKRFGMKPYTSFQELVGEKEMAAELEELYGDIDALEFYPGLLLEKCHPNSIFGESMIEIGAPFSLKGLLGNPICSPEYWKPSTFGGEVGFNIVKTATLKKLVCLNTKTCPYVSFRVPDASQDDGPAVERPSTEL

SEQ ID NO: 7905 - protein, 370 aa, Homo sapiens
MARPGLIHSAPGLPDTCALLQPPAASAAAAPSMSGPDVETPSAIQICRIMRPDDANVAGNVHGGTILKMIEEAGAIISTRHCNSQNGERCVAALARVERTDFLSPMCIGEVAHVSAEITYTSKHSVEVQVNVMSENILTGAKKLTNKATLWYVPLSLKNVDKVLEVPPVVYSRQEQEEEGRKRYEAQKLERMETKWRNGDIVQPVLNPEPNTVSYSQSSLIHLVGPSDCTLHGFVHGGVTMKLMDEVAGIVAARHCKTNIVTASVDAINFHDKIRKGCVITISGRMTFTSNKSMEIEVLVDADPVVDSSQKRYRAASAFFTYVSLSQEGRSLPVPQLVPETEDEKKRFEEGKGRYLQMKAKRQGHAEPQP

SEQ ID NO: 7906 - protein, 375 aa, Homo sapiens
MLDRDVGPTPMYPPTYLEPGIGRHTPYGNQTDYRIFELNKRLQNWTEECDNLWWDAFTTEFFEDDAMLTITFCLEDGPKRYTIGRTLIPRYFRSIFEGGATELYYVLKHPKEAFHSNFVSLDCDQGSMVTQHGKPMFTQVCVEGRLYLEFMFDDMMRIKTWHFSIRQHRELIPRSILAMHAQDPQMLDQLSKNITRCGLSNSTLNYLRLCVILEPMQELMSRHKTYSLSPRDCLKTCLFQKWQRMVAPPAEPTRQQPSKRRKRKMSGGSTMSSGGGNTNNSNSKKKSPASTFALSSQVPDVMVVGEPTLMGGEFGDEDERLITRLENTQFDAANGIDDEDSFNNSPALGANSPWNSKPPSSQESKSENPTSQASQ

SEQ ID NO: 7907 - protein, 622 aa, Homo sapiens
MGLYGQACPSVTSLRMTSELESSLTSMDWLPQLTMRAAIQKSDATQNAHGTGISKKNALLDPNTTLDQEEVQQHKDGKPPYSYASLITFAINSSPKKKMTLSEIYQWICDNFPYYREAGSGWKNSIRHNLSLNKCFLKVPRSKDDPGKGSYWAIDTNPKEDVLPTRPKKRARSVERASTPYSIDSDSLGMECIISGSASPTLAINTVTNKVTLYNTDQDGSDSPRSSLNNSLSDQSLASVNLNSVGSVHSYTPVTSHPESVSQSLTPQQQPQYNLPERDKQLLFSEYNFEDLSASFRSLYKSVFEQSLSQQGLMNIPSESSQQSHTSCTYQHSPSSTVSTHPHSNQSSLSNSHGSGLNTTGSNSVAQVSLSHPQMHTQPSPHPPHRPHGLPQHPQRSPHPAPHPQQHSQLQSPHPQHPSPHQHIQHHPNHQHQTLTHQAPPPPQQVSCNSGVSNDWYATLDMLKESCRIASSVNWSDVDLSQFQGLMESMRQADLKNWSLDQVQFADLCSSLNQFFTQTGLIHSQSNVQQNVCHGAMHPTKPSQHIGTGNLYIDSRQNLPPSVMPPPGYPHIPQALSTPGTTMAGHHRAMNQQHMMPSQAFQMRRSLPPDDIQDDFDWDSIV

SEQ ID NO: 7908 - protein, 613 aa, Homo sapiens
MAAVEAAAEPVTVVAAVGPKAKDEEEEEEEPLPPCEAVRWAPVGAVAEARPGATAFLEEATAEEPGAAPGSPPDSPGRTLRRLRAERRRLDSALLALSSHFAQVQFRLRQVVRGAPAEQQRLLRELEDFAFRGCPHVLGYEGPGDPASDEGDGLPGDRPWLRGEDQSEQEKQERLETQREKQKELILQLKTQLDDLETFAYQEGSYDSLPQSVVLERQRVIIDELIKKLDMNLNEDISSLSTEELRQRVDAAVAQIVNPARVKEQLVEQLKTQIRDLEMFINFIQDEVGSPLQTGGGHCECKAGGKTGNGCSRTGSSRTPPGNSKTKAEDVKKVRETGLHLMRRALAVLQIFAVSQFGCATGQIPPTLWQRVQADRDYSPLLKRLEVSVDRVKQLALRQQPHDHVITSANLQDLSLGGKDELTMAVRKELTVAVRDLLAHGLYASSPGMSLVMAPIACLLPAFSSAPEAMHPWELFVKYYHAKNGRAYVESPARKLSQSFALPVTGGTVVTPKQSLLTAIHMVLTEHDPFKRSADSELKALVCMALNEQRLVSWVNLICKSGSLIEPHYQPWSYMAHTGFESALNLLSRLSSLKFSLPVDLAVRQLKNIKDAF

SEQ ID NO: 7909 - protein, 211 aa, Homo sapiens
MDDAHESPSDKGGETGESDETAAVPGDPGATDTDGIPEETDGDADVDLKEAAAEEGELESQDVSDLTTVEREDSSLLNPAAKKLKIDTKEKKEKKQKVDEDEIQKMQILVSSFSEEQLNRYEMYRRSAFPKAAIKRLIQSITGTSVSQNVVIAMSGISKVFVGEVVEEALDVCEKWGEMPPLQPKHMREAVRRLKSKGQIPNSKHKKIIFF

SEQ ID NO: 7910 - protein, 483 aa, Homo sapiens
MNGTLDHPDQPDLDAIKMFVGQVPRTWSEKDLRELFEQYGAVYEINVLRDRSQNPPQSKGCCFVTFYTRKAALEAQNALHNMKVLPGMHHPIQMKPADSEKNNAVEDRKLFIGMISKKCTENDIRVMFSSFGQIEECRILRGPDGLSRGCAFVTFTTRAMAQTAIKAMHQAQTMEGCSSPMVVKFADTQKDKEQKRMAQQLQQQMQQISAASVWGNLAGLNTLGPQYLALLQQTASSGNLNTLSSLHPMGGLNAMQLQNLAALAAAASAAQNTPSGTNALTTSSSPLSVLTSSAGSSPSSSSSNSVNPIASLGALQTLAGATAGLNVGSLAGMAALNGGLGSSGLSNGTGSTMEALTQAYSGIQQYAAAALPTLYNQNLLTQQSIGAAGSQKEGPEGANLFIYHLPQEFGDQDLLQMFMPFGNVVSAKVFIDKQTNLSKCFGFVSYDNPVSAQAAIQSMNGFQIGMKRLKVQLKRSKNDSKPY

SEQ ID NO: 7911 - protein, 1522 aa, Homo sapiens
MSVRLPQSIDRLSSLSSLGDSAPERKSPSHHRQPSDASETTGLVQRCVIIQKDQHGFGFTVSGDRIVLVQSVRPGGAAMKAGVKEGDRIIKVNGTMVTNSSHLEVVKLIKSGAYVALTLLGSSPSSMGISGLQQDPSPAGAPRITSVIPSPPPPPPLPPPQRITGPKPLQDPEVQKHATQILRNMLRQEEKELQDILPLYGDTSQRPSEGRLSLDSQEGDSGLDSGTERFPSLSESLMNRNSVLSDPGLDSPRTSPVIMARVAQHHRRQGSDAAVPSTGDQGVDQSPKPLIIGPEEDYDPGYFNNESDIIFQDLEKLKSRPAHLGVFLRYIFSQADPSPLLFYLCAEVYQQASPKDSRSLGKDIWNIFLEKNAPLRVKIPEMLQAEIDSRLRNSEDARGVLCEAQEAAMPEIQEQIHDYRTKRTLGLGSLYGENDLLDLDGDPLRERQVAEKQLAALGDILSKYEEDRSAPMDFALNTYMSHAGIRLREARPSNTAEKAQSAPDKDKWLPFFPKTKKSSNSKKEKDALEDKKRNPILKYIGKPKSSSQSTFHIPLSPVEVKPGNVRNIIQHFENNQQYDAPEPGTQRLSTGSFPEDLLESDSSRSEIRLGRSESLKGREEMKRSRKAENVPRSRSDVDMDAAAEATRLHQSASSSTSSLSTRSLENPTPPFTPKMGRRSIESPSLGFCTDTLLPHLLEDDLGQLSDLEPEPDAQNWQHTVGKDVVAGLTQREIDRQEVINELFVTEASHLRTLRVLDLIFYQRMKKENLMPREELARLFPNLPELIEIHNSWCEAMKKLREEGPIIKEISDLMLARFDGPAREELQQVAAQFCSYQSIALELIKTKQRKESRFQLFMQEAESHPQCRRLQLRDLIISEMQRLTKYPLLLESIIKHTEGGTSEHEKLCRARDQCREILKYVNEAVKQTENRHRLEGYQKRLDATALERASNPLAAEFKSLDLTTRKMIHEGPLTWRISKDKTLDLHVLLLEDLLVLLQKQDEKLLLKCHSKTAVGSSDSKQTFSPVLKLNAVLIRSVATDKRAFFIICTSKLGPPQIYELVALTSSDKNTWMELLEEAVRNATRHPGAAPMPVHPPPPGPREPAQQGPTPSRVELDDSDVFHGEPEPEELPGGTGSQQRVQGKHQVLLEDPEQEGSAEEEELGVLPCPSTSLDGENRGIRTRNPIHLAFPGPLFMEGLADSALEDVENLRHLILWSLLPGHTMETQAAQEPEDDLTPTPSVISVTSHPWDPGSPGQAPPGGEGDNTQLAGLEGERPEQEDMGLCSLEHLPPRTRNSGIWESPELDRNLAEDASSTEAAGGYKVVRKAEVAGSKVVPALPESGQSEPGPPEVEGGTKATGNCFYVSMPSGPPDSSTDHSEAPMSPPQPDSLPAGQTEPQPQLQGGNDDPRRPSRSPPSLALRDVGMIFHTIEQLTLKLNRLKDMELAHRELLKSLGGESSGGTTPVGSFHTEAARWTDGSLSPPAKEPLASDSRNSHELGPCPEDGSDAPLEDSTADAAASPGP

SEQ ID NO: 7912 - protein, 525 aa, Homo sapiens
MAVPGEAEEEATVYLVVSGIPSVLRSAHLRSYFSQFREERGGGFLCFHYRHRPERAPPQAAPNSALIPTDPAAEGQLLSQTSATDVRPLSTRDSTPIQTRTCCCVISVRGLAQAQRLIRMYSGRRWLDSHGTWLPGRCLIRRLRLPTEASGLGSFPFKTRKELQSWKAENEAFTLADLKQLPELNPPVLMPRGNVGTPLRVFLELIRACRLPPRIITQLQLQFPKTGSSRRYGNVPFEYEDSETVEQEELVYTAEGEEIPQGTYLADIPASPCGEPEEEVGKEEEEESHSDEDDDRGEEWERHEALHEDVTGQERTTEQLFEEEIELKWEKGGSGLVFYTDAQFWQEEEGDFDEQTADDWDVDMSVYYDRDGGDKDARDSVQMRLEQRLRDGQEDGSVIERQVGTFERHTKGIGRKVMERQGWAEGQGLGCRCSGVPEALDSDGQHPRCKRGLGYHGEKLQPFGQLKRPRRNGLGLISTIYDEPLPQDQTESLLRRQPPTSMKFRTDMAFVRGSSCASDSPSLPD

SEQ ID NO: 7913 - protein, 367 aa, Homo sapiens
MRKGKGPICLFSRPTLRPSRSKVSLIEGRGANMAARWRFWCVSVTMVVALLIVCDVPSASAQRKKEMVLSEKVSQLMEWTNKRPVIRMNGDKFRRLVKAPPRNYSVIVMFTALQLHRQCVVCKQADEEFQILANSWRYSSAFTNRIFFAMVDFDEGSDVFQMLNMNSAPTFINFPAKGKPKRGDTYELQVRGFSAEQIARWIADRTDVNIRVIRPPNYAGPLMLGLLLAVIGGLVYLRRSNMEFLFNKTGWAFAALCFVLAMTSGQMWNHIRGPPYAHKNPHTGHVNYIHGSSQAQFVAETHIVLLFNGGVTLGMVLLCEAATSDMDIGKRKIMCVAGIGLVVLFFSWMLSIFRSKYHGYPYSFLMS

SEQ ID NO: 7914 - protein, 384 aa, Homo sapiens
MNSTLFSQVENHSVHSNFSEKNAQLLAFENDDCHLPLAMIFTLALAYGAVIILGVSGNLALIIIILKQKEMRNVTNILIVNLSFSDLLVAIMCLPFTFVYTLMDHWVFGEAMCKLNPFVQCVSITVSIFSLVLIAVERHQLIINPRGWRPNNRHAYVGIAVIWVLAVASSLPFLIYQVMTDEPFQNVTLDAYKDKYVCFDQFPSDSHRLSYTTLLLVLQYFGPLCFIFICYFKIYIRLKRRNNMMDKMRDNKYRSSETKRINIMLLSIVVAFAVCWLPLTIFNTVFDWNHQIIATCNHNLLFLLCHLTAMISTCVNPIFYGFLNKNFQRDLQFFFNFCDFRSRDDDYETIAMSTMHTDVSKTSLKQASPVAFKKINNNDDNEKI

SEQ ID NO: 7915 - protein, 174 aa, Homo sapiens
MMYALFLLSVGLVMGFVGFSSKPSPIYGGLVLIVSGVVGCVIILNFGGGYMGLMVFLIYLGGMMVVFGYTTAMAIEEYPEAWGSGVEVLVSVLVGLAMEVGLVLWVKEYDGVVVVVNFNSVGSWMIYEGEGSGLIREDPIGAGALYDYGRWLVVVTGWTLFVGVYIVIEIARGN

SEQ ID NO: 7916 - protein, 1798 aa, Homo sapiens
MKRSRCRDRPQPPPPDRREDGVQRAAELSQSLPPRRRAPPGRQRLEERTGPAGPEGKEQDVVTGVSPLLFRKLSNPDIFSSTGKVKLQRQLSQDDCKLWRGNLASSLSGKQLLPLSSSVHSSVGQVTWQSSGEASNLVRMRNQSLGQSAPSLTAGLKELSLPRRGSFCRTSNRKSLIVTSSTSPTLPRPHSPLHGHTGNSPLDSPRNFSPNAPAHFSFVPARRTDGRRWSLASLPSSGYGTNTPSSTVSSSCSSQEKLHQLPFQPTADELHFLTKHFSTESVPDEEGRQSPAMRPRSRSLSPGRSPVSFDSEIIMMNHVYKERFPKATAQMEERLAEFISSNTPDSVLPLADGALSFIHHQVIEMARDCLDKSRSGLITSQYFYELQDNLEKLLQDAHERSESSEVAFVMQLVKKLMIIIARPARLLECLEFDPEEFYHLLEAAEGHAKEGQGIKCDIPRYIVSQLGLTRDPLEEMAQLSSCDSPDTPETDDSIEGHGASLPSKKTPSEEDFETIKLISNGAYGAVFLVRHKSTRQRFAMKKINKQNLILRNQIQQAFVERDILTFAENPFVVSMFCSFDTKRHLCMVMEYVEGGDCATLLKNIGALPVDMVRLYFAETVLALEYLHNYGIVHRDLKPDNLLITSMGHIKLTDFGLSKIGLMSLTTNLYEGHIEKDAREFLDKQVCGTPEYIAPEVILRQGYGKPVDWWAMGIILYEFLVGCVPFFGDTPEELFGQVISDEIVWPEGDEALPPDAQDLTSKLLHQNPLERLGTGSAYEVKQHPFFTGLDWTGLLRQKAEFIPQLESEDDTSYFDTRSERYHHMDSEDEEEVSEDGCLEIRQFSSCSPRFNKVYSSMERLSLLEERRTPPPTKRSLSEEKEDHSDGLAGLKGRDRSWVIGSPEILRKRLSVSESSHTESDSSPPMTVRRRCSGLLDAPRFPEGPEEASSTLRRQPQEGIWVLTPPSGEGVSGPVTEHSGEQRPKLDEEAVGRSSGSSPAMETRGRGTSQLAEGATAKAISDLAVRRARHRLLSGDSTEKRTARPVNKVIKSASATALSLLIPSEHHTCSPLASPMSPHSQSSNPSSRDSSPSRDFLPALGSMRPPIIIHRAGKKYGFTLRAIRVYMGDSDVYTVHHMVWHVEDGGPASEAGLRQGDLITHVNGEPVHGLVHTEVVELILKSGNKVAISTTPLENTSIKVGPARKGSYKAKMARRSKRSRGKDGQESRKRSSLFRKITKQASLLHTSRSLSSLNRSLSSGESGPGSPTHSHSLSPRSPTQGYRVTPDAVHSVGGNSSQSSSPSSSVPSSPAGSGHTRPSSLHGLAPKLQRQYRSPRRKSAGSIPLSPLAHTPSPPPPTASPQRSPSPLSGHVAQAFPTKLHLSPPLGRQLSRPKSAEPPRSPLLKRVQSAEKLAAALAASEKKLATSRKHSLDLPHSELKKELPPREVSPLEVVGARSVLSGKGALPGKGVLQPAPSRALGTLRQDRAERRESLQKQEAIREVDSSEDDTEEGPENSQGAQELSLAPHPEVSQSVAPKGAGESGEEDPFPSRDPRSLGPMVPSLLTGITLGPPRMESPSGPHRRLGSPQAIEEAASSSSAGPNLGQSGATDPIPPEGCWKAQHLHTQALTALSPSTSGLTPTSSCSPPSSTSGKLSMWSWKSLIEGPDRASPSRKATMAGGLANLQDLENTTPAQPKNLSPREQGKTQPPSAPRLAHPSYEDPSQGWLWESECAQAVKEDPALSITQVPDASGDRRQDVPCRGCPLTQKSEPSLRRGQEPGGHQKHRDLALVPDELLKQT

SEQ ID NO: 7917 - protein, 639 aa, Homo sapiens
MSRSPDAKEDPVECPLCMEPLEIDDINFFPCTCGYQICRFCWHRIRTDENGLCPACRKPYPEDPAVYKPLSQEELQRIKNEKKQKQNERKQKISENRKHLASVRVVQKNLVFVVGLSQRLADPEVLKRPEYFGKFGKIHKVVINNSTSYAGSQGPSASAYVTYIRSEDALRAIQCVNNVVVDGRTLKASLGTTKYCSYFLKNMQCPKPDCMYLHELGDEAASFTKEEMQAGKHQEYEQKLLQELYKLNPNFLQLSTGSVDKNKNKVTPLQSPIDKPSDSLSIGNGDNSQQISNSDTPSPPPGLSKSNPVIPISSSNHSARSPFEGAVTESQSLFSDNFRHPNPIPSGLPPFPSSPQTSSDWPTAPEPQSLFTSETIPVSSSTDWQAAFGFGSSKQPEDDLGFDPFDVTRKALADLIEKELSVQDQPSLSPTSLQNSSSHTTTAKGPGSGFLHPAAATNANSLNSTFSVLPQRFPQFQQHRAVYNSFSFPGQAARYPWMAFPRNSIMHLNHTANPTSNSNFLDLNLPPQHNTGLGGIPVAGIPASSGNSLDSLQDDNPPHWLKSLQALTEMDGPSAAPSQTHHSAPFSTQIPLHRASWNPYPPPSNPSSFHSPPPGFQTAFRPPSKTPTDLLQSSTLDRH

SEQ ID NO: 7918 - protein, 547 aa, Homo sapiens
MAGTKNKTRAQAKTEKKAAIQAKAGAEREATGVVRPVAKTRAKAKAKTGSKTDAVAEMKAVSKNKVVAETKEGALSEPKTLGKAMGDFTPKAGNESTSSTCKNEAGTDAWFWAGEEATINSWFWNGEEAGNSFSTKNDKPEIGAQVCAEELEPAAGADCKPRSGAEEEEEENVIGNWFWEGDDTSFDPNPKPVSRIVKPQPVYEINEKNRPKDWSEVTIWPNAPAVTPAVLGFRSQAPSEASPPSYIVLASAEENACSLPVATACRPSRNTRSCSQPIPECRFDSDPCIQTIDEIRRQIRIREVNGIKPFACPCKMECYMDSEEFEKLVSLLKSTTDPLIHKIARIAMGVHNVHPFAQEFINEVGVVTLIESLLSFPSPEMRKKTVITLNPPSGDERQRKIELHVKHMCKETMSFPLNSPGQQSGLKILGQLTTDFVHHYIVANYFSELFHLLSSGNCKTRNLVLKLLLNMSENPTAARDMINMKALAALKLIFNQKEAKANLVSGVAIFINIKEHIRKGSIVVVDHLSYNTLMAIFREVKEIIETM

SEQ ID NO: 7919 - protein, 149 aa, Homo sapiens
METLYRVPFLVLECPNLKLKKPPWLHMPSAMTVYALVVVSYFLITGGIIYDVIVEPPSVGSMTDEHGHQRPVAFLAYRVNGQYIMEGLASSFLFTMGGLGFIILDRSNAPNIPKLNRFLLLFIGFVCVLLSFFMARVFMRMKLPGYLMG

SEQ ID NO: 7920 - protein, 187 aa, Homo sapiens
MVAATVAAAWLLLWAAACAQQEQDFYDFKAVNIRGKLVSLEKYRGSVSLVVNVASECGFTDQHYRALQQLQRDLGPHHFNVLAFPCNQFGQQEPDSNKEIESFARRTYSVSFPMFSKIAVTGTGAHPAFKYLAQTSGKEPTWNFWKYLVAPDGKVVGAWDPTVSVEEVRPQITALVRKLILLKREDL

SEQ ID NO: 7921 - protein, 997 aa, Homo sapiens
MWRLRRAAVACEVCQSLVKHSSGIKGSLPLQKLHLVSRSIYHSHHPTLKLQRPQLRTSFQQFSSLTNLPLRKLKFSPIKYGYQPRRNFWPARLATRLLKLRYLILGSAVGGGYTAKKTFDQWKDMIPDLSEYKWIVPDIVWEIDEYIDFEKIRKALPSSEDLVKLAPDFDKIVESLSLLKDFFTSGSPEETAFRATDRGSESDKHFRKGLLGELILLQQQIQEHEEEARRAAGQYSTSYAQQKRKVSDKEKIDQLQEELLHTQLKYQRILERLEKENKELRKLVLQKDDKGIHHRKLKKSLIDMYSEVLDVLSDYDASYNTQDHLPRVVVVGDQSAGKTSVLEMIAQARIFPRGSGEMMTRSPVKVTLSEGPHHVALFKDSSREFDLTKEEDLAALRHEIELRMRKNVKEGCTVSPETISLNVKGPGLQRMVLVDLPGVINTVTSGMAPDTKETIFSISKAYMQNPNAIILCIQDGSVDAERSIVTDLVSQMDPHGRRTIFVLTKVDLAEKNVASPSRIQQIIEGKLFPMKALGYFAVVTGKGNSSESIEAIREYEEEFFQNSKLLKTSMLKAHQVTTRNLSLAVSDCFWKMVRESVEQQADSFKATRFNLETEWKNNYPRLRELDRNELFEKAKNEILDEVISLSQVTPKHWEEILQQSLWERVSTHVIENIYLPAAQTMNSGTFNTTVDIKLKQWTDKQLPNKAVEVAWETLQEEFSRFMTEPKGKEHDDIFDKLKEAVKEESIKRHKWNDFAEDSLRVIQHNALEDRSISDKQQWDAAIYFMEEALQARLKDTENAIENMVGPDWKKRWLYWKNRTQEQCVHNETKNELEKMLKCNEEHPAYLASDEITTVRKNLESRGVEVDPSLIKDTWHQVYRRHFLKTALNHCNLCRRGFYYYQRHFVDSELECNDVVLFWRIQRMLAITANTLRQQLTNTEVRRLEKNVKEVLEDFAEDGEKKIKLLTGKRVQLAEDLKKVREIQEKLDAFIEALHQEK

SEQ ID NO: 7922 - protein, 357 aa, Homo sapiens
MAAAEVADTQLMLGVGLIEKDTNGEVLWVWCYPSTTATLRNLLLRKCCLTDENKLLHPFVFGQYRRTWFYITTIEVPDSSILKKVTHFSIVLTAKDFNPEKYAAFTRILCRMYLKHGSPVKMMESYIAVLTKGICQSEENGSFLSKDFDARKAYLAGSIKDIVSQFGMETVILHTALMLKKRIVVYHPKIEAVQEFTRTLPALVWHRQDWTILHSYVHLNADELEALQMCTGYVAGFVDLEVSNRPDLYDVFVNLAESEITIAPLAKEAMAMGKLHKEMGQLIVQSAEDPEKSESHVIQDIALKTREIFTNLAPFSEVSADGEKRVLNLEALKQKRFPPATENFLYHLAAAEQMLKI

SEQ ID NO: 7923 - protein, 371 aa, Homo sapiens
MPGCPCPGCGMAGPRLLFLTALALELLERAGGSQPALRSRGTATACRLDNKESESWGALLSGERLDTWICSLLGSLMVGLSGVFPLLVIPLEMGTMLRSEAGAWRLKQLLSFALGGLLGNVFLHLLPEAWAYTCSASPGGEGQSLQQQQQLGLWVIAGILTFLALEKMFLDSKEEGTSQAPNKDPTAAAAALNGGHCLAQPAAEPGLGAVVRSIKVSGYLNLLANTIDNFTHGLAVAASFLVSKKIGLLTTMAILLHEIPHEVGDFAILLRAGFDRWSAAKLQLSTALGGLLGAGFAICTQSPKGVVGCSPAAEETAAWVLPFTSGGFLYIALVNVLPDLLEEEDPWRSLQQLLLLCAGIVVMVLFSLFVD

SEQ ID NO: 7924 - protein, 977 aa, Homo sapiens
MLLWVILLVLAPVSGQFARTPRPIIFLQPPWTTVFQGERVTLTCKGFRFYSPQKTKWYHRYLGKEILRETPDNILEVQESGEYRCQAQGSPLSSPVHLDFSSASLILQAPLSVFEGDSVVLRCRAKAEVTLNNTIYKNDNVLAFLNKRTDFHIPHACLKDNGAYRCTGYKESCCPVSSNTVKIQVQEPFTRPVLRASSFQPISGNPVTLTCETQLSLERSDVPLRFRFFRDDQTLGLGWSLSPNFQITAMWSKDSGFYWCKAATMPYSVISDSPRSWIQVQIPASHPVLTLSPEKALNFEGTKVTLHCETQEDSLRTLYRFYHEGVPLRHKSVRCERGASISFSLTTENSGNYYCTADNGLGAKPSKAVSLSVTVPVSHPVLNLSSPEDLIFEGAKVTLHCEAQRGSLPILYQFHHEGAALERRSANSAGGVAISFSLTAEHSGNYYCTADNGFGPQRSKAVSLSVTVPVSHPVLTLSSAEALTFEGATVTLHCEVQRGSPQILYQFYHEDMPLWSSSTPSVGRVSFSFSLTEGHSGNYYCTADNGFGPQRSEVVSLFVTVPVSRPILTLRVPRAQAVVGDLLELHCEAPRGSPPILYWFYHEDVTLGSSSAPSGGEASFNLSLTAEHSGNYSCEANNGLVAQHSDTISLSVIVPVSRPILTFRAPRAQAVVGDLLELHCEALRGSSPILYWFYHEDVTLGKISAPSGGGASFNLSLTTEHSGIYSCEADNGLEAQRSEMVTLKVAVPVSRPVLTLRAPGTHAAVGDLLELHCEALRGSPLILYRFFHEDVTLGNRSSPSGGASLNLSLTAEHSGNYSCEADNGLGAQRSETVTLYITGLTANRSGPFATGVAGGLLSIAGLAAGALLLYCWLSRKAGRKPASDPARSPSDSDSQEPTYHNVPAWEELQPVYTNANPRGENVVYSEVRIIQEKKKHAVASDPRHLRNKGSPIIYSEVKVASTPVSGSLFLASSAPHR

SEQ ID NO: 7925 - protein, 376 aa, Homo sapiens
MSPEVALNRISPMLSPFISSVVRNGKVGLDATNCLRITDLKSGCTSLTPGPNCDRFKLHIPYAGETLKWDIIFNAQYPELPPDFIFGEDAEFLPDPSALQNLASWNPSNPECLLLVVKELVQQYHQFQCSRLRESSRLMFEYQTLLEEPQYGENMEIYAGKKNNWTGEFSARFLLKLPVDFSNIPTYLLKDVNEDPGEDVALLSVSFEDTEATQVYPKLYLSPRIEHALGGSSALHIPAFPGGGCLIDYVPQVCHLLTNKVQYVIQGYHKRREYIAAFLSHFGTGVVEYDAEGFTKLTLLLMWKDFCFLVHIDLPLFFPRDQPTLTFQSVYHFTNSGQLYSQAQKNYPYSPRWDGNEMAKRAKRESNRDGEESSSA

SEQ ID NO: 7926 - protein, 399 aa, Homo sapiens
MASEVAEEWAQGTFKLNSNDEDIHTANERRLKELIGATAGKLHTGRSRNDQVVTDLRLWMRQTCSTLSGLLWELIRTMVDRAEAERDVLFPGYTHLQRAQPIRWSHWILSHAVALTRDSERLLEVRKRINVLPLGSGAIAGNPLGVDRELLRAELNFGAITLNSMDATSERDFVAEFLFWASLCMTHLSRMAEDLILYCTKEFSFVQLSDAYSTGSSLMPQKKNPDSLELIRSKAGRVFGRCAGLLMTLKGLPSTYNKDLQEDKEAVFEVSDTMSAVLQVATGVISTLQIHQENMGQALSPDMLATDLAYYLVRKGMPFRQAHEASGKAVFMAETKGVALNQLSLQELQTISPLFSGDVICVWDYGHSVEQYGALGGTARSSVDWQIRQVRALLQAQQA

SEQ ID NO: 7927 - protein, 1248 aa, Homo sapiens
MVVALRYVWPLLLCSPCLLIQIPEELMEPPVITEQSPRRLVVFPTDDISLKCEASGKPEVQFRWTRDGVHFKPKEELGVTVYQSPHSGSFTITGNNSNFAQRFQGIYRCFASNKLGTAMSHEIRLMAEGAPKWPKETVKPVEVEEGESVVLPCNPPPSAEPLRIYWMNSKILHIKQDERVTMGQNGNLYFANVLTSDNHSDYICHAHFPGTRTIIQKEPIDLRVKATNSMIDRKPRLLFPTNSSSHLVALQGQPLVLECIAEGFPTPTIKWLRPSGPMPADRVTYQNHNKTLQLLKVGEEDDGEYRCLAENSLGSARHAYYVTVEAAPYWLHKPQSHLYGPGETARLDCQVQGRPQPEVTWRINGIPVEELAKDQKYRIQRGALILSNVQPSDTMVTQCEARNRHGLLLANAYIYVVQLPAKILTADNQTYMAVQGSTAYLLCKAFGAPVPSVQWLDEDGTTVLQDERFFPYANGTLGIRDLQANDTGRYFCLAANDQNNVTIMANLKVKDATQITQGPRSTIEKKGSRVTFTCQASFDPSLQPSITWRGDGRDLQELGDSDKYFIEDGRLVIHSLDYSDQGNYSCVASTELDVVESRAQLLVVGSPGPVPRLVLSDLHLLTQSQVRVSWSPAEDHNAPIEKYDIEFEDKEMAPEKWYSLGKVPGNQTSTTLKLSPYVHYTFRVTAINKYGPGEPSPVSETVVTPEAAPEKNPVDVKGEGNETTNMVITWKPLRWMDWNAPQVQYRVQWRPQGTRGPWQEQIVSDPFLVVSNTSTFVPYEIKVQAVNSQGKGPEPQVTIGYSGEDYPQAIPELEGIEILNSSAVLVKWRPVDLAQVKGHLRGYNVTYWREGSQRKHSKRHIHKDHVVVPANTTSVILSGLRPYSSYHLEVQAFNGRGSGPASEFTFSTPEGVPGHPEALHLECQSNTSLLLRWQPPLSHNGVLTGYVLSYHPLDEGGKGQLSFNLRDPELRTHNLTDLSPHLRYRFQLQATTKEGPGEAIVREGGTMALSGISDFGNISATAGENYSVVSWVPKEGQCNFRFHILFKALGEEKGGASLSPQYVSYNQSSYTQWDLQPDTDYEIHLFKERMFRHQMAVKTNGTGRVRLPPAGFATEGWFIGFVSAIILLLLVLLILCFIKRSKGGKYSVKDKEDTQVDSEARPMKDETFGEYSDNEEKAFGSSQPSLNGDIKPLGSDDSLADYGGSVDVQFNEDGSFIGQYSGKKEKEAAGGNDSSGATSPINPAVALE

SEQ ID NO: 7928 - protein, 2817 aa, Homo sapiens
MKLNPQQAPLYGDCVVTVLLAEEDKAEDDVVFYLVFLGSTLRHCTSTRKVSSDTLETIAPGHDCCETVKVQLCASKEGLPVFVVAEEDFHFVQDEAYDAAQFLATSAGNQQALNFTRFLDQSGPPSGDVNSLDKKLVLAFRHLKLPTEWNVLGTDQSLHDAGPRETLMHFAVRLGLLRLTWFLLQKPGGRGALSIHNQEGATPVSLALERGYHKLHQLLTEENAGEPDSWSSLSYEIPYGDCSVRHHRELDIYTLTSESDSHHEHPFPGDGCTGPIFKLMNIQQQLMKTNLKQMDSLMPLMMTAQDPSSAPETDGQFLPCAPEPTDPQRLSSSEETESTQCCPGSPVAQTESPCDLSSIVEEENTDRSCRKKNKGVERKGEEVEPAPIVDSGTVSDQDSCLQSLPDCGVKGTEGLSSCGNRNEETGTKSSGMPTDQESLSSGDAVLQRDLVMEPGTAQYSSGGELGGISTTNVSTPDTAGEMEHGLMNPDATVWKNVLQGGESTKERFENSNIGTAGASDVHVTSKPVDKISVPNCAPAASSLDGNKPAESSLAFSNEETSTEKTAETETSRSREESADAPVDQNSVVIPAAAKDKISDGLEPYTLLAAGIGEAMSPSDLALLGLEEDVMPHQNSETNSSHAQSQKGKSSPICSTTGDDKLCADSACQQNTVTSSGDLVAKLCDNIVSESESTTARQPSSQDPPDASHCEDPQAHTVTSDPVRDTQERADFCPFKVVDNKGQRKDVKLDKPLTNMLEVVSHPHPVVPKMEKELVPDQAVISDSTFSLANSPGSESVTKDDALSFVPSQKEKGTATPELHTATDYRDGPDGNSNEPDTRPLEDRAVGLSTSSTAAELQHGMGNTSLTGLGGEHEGPAPPAIPEALNIKGNTDSSLQSVGKATLALDSVLTEEGKLLVVSESSAAQEQDKDKAVTCSSIKENALSSGTLQEEQRTPPPGQDTQQFHEKSISADCAKDKALQLSNSPGASSAFLKAETEHNKEVAPQVSLLTQGGAAQSLVPPGASLATESRQEALGAEHNSSALLPCLLPDGSDGSDALNCSQPSPLDVGVKNTQSQGKTSACEVSGDVTVDVTGVNALQGMAEPRRENISHNTQDILIPNVLLSQEKNAVLGLPVALQDKAVTDPQGVGTPEMIPLDWEKGKLEGADHSCTMGDAEEAQIDDEAHPVLLQPVAKELPTDMELSAHDDGAPAGVREVMRAPPSGRERSTPSLPCMVSAQDAPLPKGADLIEEAASRIVDAVIEQVKAAGALLTEGEACHMSLSSPELGPLTKGLESAFTEKVSTFPPGESLPMGSTPEEATGSLAGCFAGREEPEKIILPVQGPEPAAEMPDVKAEDEVDFRASSISEEVAVGSIAATLKMKQGPMTQAINRENWCTIEPCPDAASLLASKQSPECENFLDVGLGRECTSKQGVLKRESGSDSDLFHSPSDDMDSIIFPKPEEEHLACDITGSSSSTDDTASLDRHSSHGSDVSLSQILKPNRSRDRQSLDGFYSHGMGAEGRESESEPADPGDVEEEEMDSITEVPANCSVLRSSMRSLSPFRRHSWGPGKNAASDAEMNHRSMSWCPSGVQYSAGLSADFNYRSFSLEGLTGGAGVGNKPSSSLEVSSANAEELRHPFSGEERVDSLVSLSEEDLESDQREHRMFDQQICHRSKQQGFNYCTSAISSPLTKSISLMTISHPGLDNSRPFHSTFHNTSANLTESITEENYNFLPHSPSKKDSEWKSGTKVSRTFSYIKNKMSSSKKSKEKEKEKDKIKEKEKDSKDKEKDKKTVNGHTFSSIPVVGPISCSQCMKPFTNKDAYTCANCSAFVHKGCRESLASCAKVKMKQPKGSLQAHDTSSLPTVIMRNKPSQPKERPRSAVLLVDETATTPIFANRRSQQSVSLSKSVSIQNITGVGNDENMSNTWKFLSHSTDSLNKISKVNESTESLTDEGVGTDMNEGQLLGDFEIESKQLEAESWSRIIDSKFLKQQKKDVVKRQEVIYELMQTEFHHVRTLKIMSGVYSQGMMADLLFEQQMVEKLFPCLDELISIHSQFFQRILERKKESLVDKSEKNFLIKRIGDVLVNQFSGENAERLKKTYGKFCGQHNQSVNYFKDLYAKDKRFQAFVKKKMSSSVVRRLGIPECILLVTQRITKYPVLFQRILQCTKDNEVEQEDLAQSLSLVKDVIGAVDSKVASYEKKVRLNEIYTKTDSKSIMRMKSGQMFAKEDLKRKKLVRDGSVFLKNAAGRLKEVQAVLLTDILVFLQEKDQKYIFASLDQKSTVISLKKLIVREVAHEEKGLFLISMGMTDPEMVEVHASSKEERNSWIQIIQDTINTLNRDEDEGIPSENEEEKKMLDTRARELKEQLHQKDQKILLLLEEKEMIFRDMAECSTPLPEDCSPTHSPRVLFRSNTEEALKGGPLMKSAINEVEILQGLVSGNLGGTLGPTVSSPIEQDVVGPVSLPRRAETFGGFDSHQMNASKGGEKEEGDDGQDLRRTESDSGLKKGGNANLVFMLKRNSEQVVQSVVHLYELLSALQGVVLQQDSYIEDQKLVLSERALTRSLSRPSSLIEQEKQRSLEKQRQDLANLQKQQAQYLEEKRRREREWEARERELREREALLAQREEEVQQGQQDLEKEREELQQKKGTYQYDLERLRAAQKQLEREQEQLRREAERLSQRQTERDLCQVSHPHTKLMRIPSFFPSPEEPPSPSAPSIAKSGSLDSELSVSPKRNSISRTHKDKGPFHILSSTSQTNKGPEGQSQAPASTSASTRLFGLTKPKEKKEKKKKNKTSRSQPGDGPASEVSAEGEEIFC

SEQ ID NO: 7929 - protein, 1217 aa, Homo sapiens
MYIKQVIIQGFRSYRDQTIVDPFSSKHNVIVGRNGSGKSNFFYAIQFVLSDEFSHLRPEQRLALLHEGTGPRVISAFVEIIFDNSDNRLPIDKEEVSLRRVIGAKKDQYFLDKKMVTKNDVMNLLESAGFSRSNPYYIVKQGKINQMATAPDSQRLKLLREVAGTRVYDERKEESISLMKETEGKREKINELLKYIEERLHTLEEEKEELAQYQKWDKMRRALEYTIYNQELNETRAKLDELSAKRETSGEKSRQLRDAQQDARDKMEDIERQVRELKTKISAMKEEKEQLSAERQEQIKQRTKLELKAKDLQDELAGNSEQRKRLLKERQKLLEKIEEKQKELAETEPKFNSVKEKEERGIARLAQATQERTDLYAKQGRGSQFTSKEERDKWIKKELKSLDQAINDKKRQIAAIHKDLEDTEANKEKNLEQYNKLDQDLNEVKARVEELDRKYYEVKNKKDELQSERNYLWREENAEQQALAAKREDLEKKQQLLRAATGKAILNGIDSINKVLDHFRRKGINQHVQNGYHGIVMNNFECEPAFYTCVEVTAGNRLFYHIVDSDEVSTKILMEFNKMNLPGEVTFLPLNKLDVRDTAYPETNDAIPMISKLRYNPRFDKAFKHVFGKTLICRSMEVSTQLARAFTMDCITLEGDQVSHRGALTGGYYDTRKSRLELQKDVRKAEEELGELEAKLNENLRRNIERINNEIDQLMNQMQQIETQQRKFKASRDSILSEMKMLKEKRQQSEKTFMPKQRSLQSLEASLHAMESTRESLKAELGTDLLSQLSLEDQKRVDALNDEIRQLQQENRQLLNERIKLEGIITRVETYLNENLRKRLDQVEQELNELRETEGGTVLTATTSELEAINKRVKDTMARSEDLDNSIDKTEAGIKELQKSMERWKNMEKEHMDAINHDTKELEKMTNRQGMLLKKKEECMKKIRELGSLPQEAFEKYQTLSLKQLFRKLEQCNTELKKYSHVNKKALDQFVNFSEQKEKLIKRQEELDRGYKSIMELMNVLELRKYEAIQLTFKQVSKNFSEVFQKLVPGGKATLVMKKGDVEGSQSQDEGEGSGESERGSGSQSSVPSVDQFTGVGIRVSFTGKQGEMREMQQLSGGQKSLVALALIFAIQKCDPAPFYLFDEIDQALDAQHRKAVSDMIMELAVHAQFITTTFRPELLESADKFYGVKFRNKVSHIDVITAEMAKDFVEDDTTHG

SEQ ID NO: 7930 - protein, 242 aa, Homo sapiens
MLTRKIKLWDINAHITCRLCSGYLIDATTVTECLHTFCRSCLVKYLEENNTCPTCRIVIHQSHPLQYIGHDRTMQDIVYKLVPGLQEAEMRKQREFYHKLGMEVPGDIKGETCSAKQHLDSHRNGETKADDSSNKEAAEEKPEEDNDYHRSDEQVSICLECNSSKLRGLKRKWIRCSAQATVLHLKKFIAKKLNLSSFNELDILCNEEILGKDHTLKFVVVTRWRFKKAPLLLHYRPKMDLL

SEQ ID NO: 7931 - protein, 98 aa, Homo sapiens
MPLIYMNIMLAFTISLLGMLVYRSHLMSSLLCLEGMMLSLFIMATLMTLNTHSLLANIVPIAMLVFAACEAAVGLALLVSISNTYGLDYVHNLNLLQC

SEQ ID NO: 7932 - protein, 812 aa, Homo sapiens
MEAFQELRKPSARLECDHCSFRGTDYENVQIHMGTIHPEFCDEMDAGGLGKMIFYQKSAKLFHCHKCFFTSKMYSNVYYHITSKHASPDKWNDKPKNQLNKETDPVKSPPLPEHQKIPCNSAEPKSIPALSMETQKLGSVLSPESPKPTPLTPLEPQKPGSVVSPELQTPLPSPEPSKPASVSSPEPPKSVPVCESQKLAPVPSPEPQKPAPVSPESVKATLSNPKPQKQSHFPETLGPPSASSPESPVLAASPEPWGPSPAASPESRKSARTTSPEPRKPSPSESPEPWKPFPAVSPEPRRPAPAVSPGSWKPGPPGSPRPWKSNPSASSGPWKPAKPAPSVSPGPWKPIPSVSPGPWKPTPSVSSASWKSSSVSPSSWKSPPASPESWKSGPPELRKTAPTLSPEHWKAVPPVSPELRKPGPPLSPEIRSPAGSPELRKPSGSPDLWKLSPDQRKTSPASLDFPESQKSSRGGSPDLWKSSFFIEPQKPVFPETRKPGPSGPSESPKAASDIWKPVLSIDTEPRKPALFPEPAKTAPPASPEARKRALFPEPRKHALFPELPKSALFSESQKAVELGDELQIDAIDDQKCDILVQEELLASPKKLLEDTLFPSSKKLKKDNQESSDAELSSSEYIKTDLDAMDIKGQESSSDQEQVDVESIDFSKENKMDMTSPEQSRNVLQFTEEKEAFISEEEIAKYMKRGKGKYYCKICCCRAMKKGAVLHHLVNKHNVHSPYKCTICGKAFLLESLLKNHVAAHGQSLLKCPRCNFESNFPRGFKKHLTHCQSRHNEEANKKLMEALEPPLEEQQI

SEQ ID NO: 7933 - protein, 1366 aa, Homo sapiens
MLAVGPAMDRDYPQHEPPPAGSLLYSPPPLQSAMLHCPYWNTFSLPPYPAFSSDSRPFMSSASFLGSQPCPDTSYAPVATASSLPPKTCDFAQDSSYFEDFSNISIFSSSVDSLSDIVDTPDFLPADSLNQVSTIWDDNPAPSTHDKLFQLSRPFAGFEDFLPSHSTPLLVSYQEQSVQSQPEEEDEAEEEEAEELGHTETYADYVPSKSKIGKQHPDRVVETSTLSSVPPPDITYTLALPSDSGALSALQLEAITYACQQHEVLLPSGQRAGFLIGDGAGVGKGRTVAGVILENHLRGRKKALWFSVSNDLKYDAERDLRDIEATGIAVHALSKIKYGDTTTSEGVLFATYSALIGESQAGGQHRTRLRQILDWCGEAFEGVIVFDECHKAKNAGSTKMGKAVLDLQNKLPLARVVYASATGASEPRNMIYMSRLGIWGEGTPFRNFEEFLHAIEKRGVGAMEIVAMDMKVSGMYIARQLSFSGVTFRIEEIPLAPAFECVYNRAALLWAEALNVFQQAADWIGLESRKSLWGQFWSAHQRFFKYLCIAAKVRRLVELAREELARDKCVVIGLQSTGEARTREVLGENDGHLNCFVSAAEGVFLSLIQKHFPSTKRKRDRGAGSKRKRRPRGRGAKAPRLACETAGVIRISDDSSTESDPGLDSDFNSSPESLVDDDVVIVDAVGLPSDDRGPLCLLQRDPHGPGVLERVERLKQDLLDKVRRLGRELPVNTLDELIDQLGGPQRVAEMTGRKGRVVSRPDGTVAFESRAEQGLSIDHVNLREKQRFMSGEKLVAIISEASSSGVSLQADRRVQNQRRRVHMTLELPWSADRAIQQFGRTHRSNQVSAPEYVFLISELAGERRFASIVAKRLESLGALTHGDRRATESRDLSKYNFENKYGTRALHCVLTTILSQTENKVPVPQGYPGGVPTFFRDMKQGLLSVGIGGRESRNGCLDVEKDCSITKFLNRILGLEVHKQNALFQYFSDTFDHLIEMDKREGKYDMGILDLAPGIEEIYEESQQVFLAPGHPQDGQVVFYKISVDRGLKWEDAFAKSLALTGPYDGFYLSYKVRGNKPSCLLAEQNRGQFFTVYKPNIGRQSQLEALDSLRRKFHRVTAEEAKEPWESGYALSLTHCSHSAWNRHCRLAQEGKDCLQGLRLRHHYMLCGALLRVWGRIAAVMADVSSSSYLQIVRLKTKDRKKQVGIKIPEGCVRRVLQELRLMDADVKRRQAPALGCPAPPAPRPLALPCGPGEVLDLTYSPPAEAFPPPPHFSFPAPLSLDAGPGVVPLGTPDAQADPAALAHQGCDINFKEVLEDMLRSLHAGPPSEGALGEGAGAGGAAGGGPERQSVIQFSPPFPGAQAPL

SEQ ID NO: 7934 - protein, 130 aa, Homo sapiens
MRQKAVSLFLCYLLLFTCSGVEAGKKKCSESSDSGSGFWKALTFMAVGGGLAVAGLPALGFTGAGIAANSVAASLMSWSAILNGGGVPAGGLVATLQSLGAGGSSVVIGNIGALMGYATHKYLDSEEDEE

SEQ ID NO: 7935 - protein, 364 aa, Homo sapiens
MNRTAMRASQKDFENSMNQVKLLKKDPGNEVKLKLYALYKQATEGPCNMPKPGVFDLINKAKWDAWNALGSLPKEAARQNYVDLVSSLSPSLESSSQVEPGTDRKSTGFETLVVTSEDGITKIMFNRPKKKNAINTEMYHEIMRALKAASKDDSIITVLTGNGDYYSSGNDLTNFTDIPPGGVEEKAKNNAVLLREFVGCFIDFPKPLIAVVNGPAVGISVTLLGLFDAVYASDRATFHTPFSHLGQSPEGCSSYTFPKIMSPAKATEMLIFGKKLTAGEACAQGLVTEVFPDSTFQKEVWTRLKAFAKLPPNALRISKEVIRKREREKLHAVNAEECNVLQGRWLSDECTNAVVNFLSRKSKL

SEQ ID NO: 7936 - protein, 165 aa, Homo sapiens [sequence omitted]

SEQ ID NO: 7937 - protein, 1041 aa, Homo sapiens
MAAAAAAGAASGLPGPVAQGLKEALVDTLTGILSPVQEVRAAAEEQIKVLEVTEEFGVHLAELTVDPQGALAIRQLASVILKQYVETHWCAQSEKFRPPETTERAKIVIRELLPNGLRESISKVRSSVAYAVSAIAHWDWPEAWPQLFNLLMEMLVSGDLNAVHGAMRVLTEFTREVTDTQMPLVAPVILPEMYKIFTMAEVYGIRTRSRAVEIFTTCAHMICNMEELEKGAAKVLIFPVVQQFTEAFVQALQIPDGPTSDSGFKMEVLKAVTALVKNFPKHMVSSMQQILPIVWNTLTESAAFYVRTEVNYTEEVEDPVDSDGEVLGFENLVFSIFEFVHALLENSKFKSTVKKALPELIYYIILYMQITEEQIKVWTANPQQFVEDEDDDTFSYTVRIAAQDLLLAVATDFQNESAAALAAAATRHLQEAEQTKNSGTEHWWKIHEACMLALGSVKAIITDSVKNGRIHFDMHGFLTNVILADLNLSVSPFLLGRALWAASRFTVAMSPELIQQFLQATVSGLHETQPPSVRISAVRAIWGYCDQLKVSESTHVLQPFLPSILDGLIHLAAQFSSEVLNLVMETLCIVCTVDPEFTASMESKICPFTIAIFLKYSNDPVVASLAQDIFKELSQIEACQGPMQMRLIPTLVSIMQAPADKIPAGLCATAIDILTTVVRNTKPPLSQLLICQAFPAVAQCTLHTDDNATMQNGGECLRAYVSVTLEQVAQWHDEQGHNGLWYVMQVVSQLLDPRTSEFTAAFVGRLVSTLISKAGRELGENLDQILRAILSKMQQAETLSVMQSLIMVFAHLVHTQLEPLLEFLCSLPGPTGKPALEFVMAEWTSRQHLFYGQYEGKVSSVALCKLLQHGINADDKRLQDIRVKGEEIYSMDEGIRTRSKSAKNPERWTNIPLLVKILKLIINELSNVMEANAARQATPAEWSQDDSNDMWEDQEEEEEEEEDGLAGQLLSDILATSKYEEDYYEDDEEDDPDALKDPLYQIDLQAYLTDFLCQFAQQPCYIMFSGHLNDNERRVLQTIGI

SEQ ID NO: 7938 - protein, 106 aa, Homo sapiens
MASSGAGDPLDSKRGEAPFAQRIDPTREKLTPEQLHSMRQAELAQWQKVLPRRRTRNIVTGLGIGALVLAIYGYTFYSISQERFLDELEDEAKAARARALARASGS

SEQ ID NO: 7939 - protein, 196 aa, Homo sapiens
MATSVLCCLRCCRDGGTGHIPLKEMPAVQLDTQHMGTDVVIVKNGRRICGTGGCLASAPLHQNKSYFEFKIQSTGIWGIGVATQKVNLNQIPLGRDMHSLVMRNDGALYHNNEEKNRLPANSLPQEGDVVGITYDHVELNVYLNGKNMHCPASGIRGTVYPVVYVDDSAILDCQFSEFYHTPPPGFEKILFEQQIF

SEQ ID NO: 7940 - protein, 708 aa, Homo sapiens
MSQYTEKEPAAMDQESGKAVWPKPAGGYQTITGRRYGRRHAYVSFKPCMTRHERSLGRAGDDYEVLELDDVPKENSSGSSPLDQVDSSLPSEPIFEKSETEIPTCGSALNQTTESSQSFVAVHHSEEGRDTLGSSTNLHNHSEGEYIPGACSASSVQNGIALVHTDSYDPDGKHGEDNDHLQLSAEVVEGSRYQESLGNTVFELENREAEAYTGLSPPVPSFNCEVRDEFEELDSVPLVKSSAGDTEFVHQNSQEIQRSSQDEMVSTKQQNNTSQERQTEHSPEDAACGPGHICSEQNTNDREKNHGSSPEQVVRPKVRKLISSSQVDQETGFNRHEAKQRSVQRWREALEVEESGSDDLLIKCEEYDGEHDCMFLDPPYSRVITQRETENNQMTSESGATAGRQEVDNTFWNGCGDYYQLYDKDEDSSECSDGEWSASLPHRFSGTEKDQSSSDESWETLPGKDENEPELQSDSSGPEEENQELSLQEGEQTSLEEGEIPWLQYNEVNESSSDEGNEPANEFAQPAFMLDGNNNLEDDSSVSEDLDVDWSLFDGFADGLGVAEAISYVDPQFLTYMALEERLAQAMETALAHLESLAVDVEVANPPASKESIDGLPETLVLEDHTAIGQEQCCPICCSEYIKDDIATELPCHHFFHKPCVSIWLQKSGTCPVCRRHFPPAVIEASAAPSSEPDPDAPPSNDSIAEAP

SEQ ID NO: 7941 - protein, 615 aa, Homo sapiens
MESMFEDDISILTQEALGPSEVWLDSPGDPSLGGDMCSASHFALITAYGDIKERLGGLERENATLRRRLKVYEIKYPLISDFGEEHGFSLYEIKDGSLLEVEKVSLQQRLNQFQHELQKNKEQEEQLGEMIQAYEKLCVEKSDLETELREMRALVETHLRQICGLEQQLRQQQGLQDAAFSNLSPPPAPAPPCTDLDLHYLALRGGSGLSHAGWPGSTPSVSDLERRRLEEALEAAQGEARGAQLREEQLQAECERLQGELKQLQETRAQDLASNQSERDMAWVKRVGDDQVNLALAYTELTEELGRLRELSSLQGRILRTLLQEQARSGGQRHSPLSQRHSPAPQCPSPSPPARAAPPCPPCQSPVPQRRSPVPPCPSPQQRRSPASPSCPSPVPQRRSPVPPSCQSPSPQRRSPVPPSCPAPQPRPPPPPPPGERTLAERAYAKPPSHHVKAGFQGRRSYSELAEGAAYAGASPPWLQAEAATLPKPRAYGSELYGPGRPLSPRRAFEGIRLRFEKQPSEEDEWAVPTSPPSPEVGTIRCASFCAGFPIPESPAATAYAHAEHAQSWPSINLLMETVGSDIRSCPLCQLGFPVGYPDDALIKHIDSHLENSKI

SEQ ID NO: 7942 - protein, 1331 aa, Homo sapiens
MQAAPRAGCGAALLLWIVSSCLCRAWTAPSTSQKCDEPLVSGLPHVAFSSSSSISGSYSPGYAKINKRGGAGGWSPSDSDHYQWLQVDFGNRKQISAIATQGRYSSSDWVTQYRMLYSDTGRNWKPYHQDGNIWAFPGNINSDGVVRHELQHPIIARYVRIVPLDWNGEGRIGLRIEVYGCSYWADVINFDGHVVLPYRFRNKKMKTLKDVIALNFKTSESEGVILHGEGQQGDYITLELKKAKLVLSLNLGSNQLGPIYGHTSVMTGSLLDDHHWHSVVIERQGRSINLTLDRSMQHFRTNGEFDYLDLDYEITFGGIPFSGKPSSSSRKNFKGCMESINYNGVNITDLARRKKLEPSNVGNLSFSCVEPYTVPVFFNATSYLEVPGRLNQDLFSVSFQFRTWNPNGLLVFSHFADNLGNVEIDLTESKVGVHINITQTKMSQIDISSGSGLNDGQWHEVRFLAKENFAILTIDGDEASAVRTNSPLQVKTGEKYFFGGFLNQMNNSSHSVLQPSFQGCMQLIQVDDQLVNLYEVAQRKPGSFANVSIDMCAIIDRCVPNHCEHGGKCSQTWDSFKCTCDETGYSGATCHNSIYEPSCEAYKHLGQTSNYYWIDPDGSGPLGPLKVYCNMTEDKVWTIVSHDLQMQTPVVGYNPEKYSVTQLVYSASMDQISAITDSAEYCEQYVSYFCKMSRLLNTPDGSPYTWWVGKANEKHYYWGGSGPGIQKCACGIERNCTDPKYYCNCDADYKQWRKDAGFLSYKDHLPVSQVVVGDTDRQGSEAKLSVGPLRCQGDRNYWNAASFPNPSSYLHFSTFQGETSADISFYFKTLTPWGVFLENMGKEDFIKLELKSATEVSFSFDVGNGPVEIVVRSPTPLNDDQWHRVTAERNVKQASLQVDRLPQQIRKAPTEGHTRLELYSQLFVGGAGGQQGFLGCIRSLRMNGVTLDLEERAKVTSGFISGCSGHCTSYGTNCENGGKCLERYHGYSCDCSNTAYDGTFCNKDVGAFFEEGMWLRYNFQAPATNARDSSSRVDNAPDQQNSHPDLAQEEIRFSFSTTKAPCILLYISSFTTDFLAVLVKPTGSLQIRYNLGGTREPYNIDVDHRNMANGQPHSVNITRHEKTIFLKLDHYPSVSYHLPSSSDTLFNSPKSLFLGKVIETGKIDQEIHKYNTPGFTGCLSRVQFNQIAPLKAALRQTNASAHVHIQGELVESNCGASPLTLSPMSSATDPWHLDHLDSASADFPYNPGQGQAIRNGVNRNSAIIGGVIAVVIFTILCTLVFLIRYMFRHKGTYHTNEAKGAESAESADAAIMNNDPNFTETIDESKKEWLI

SEQ ID NO: 7943 - protein, 961 aa, Homo sapiens
MWRLRRAAVACEVCQSLVKHSSGIKGSLPLQKLHLVSRSIYHSHHPTLKLQRPQLRTSFQQFSSLTNLPLRKLKFSPIKYGYQPRRNFWPARLATRLLKLRYLILGSAVGGGYTAKKTFDQWKDMIPDLSEYKWIVPDIVWEIDEYIDFGSPEETAFRATDRGSESDKHFRKGLLGELILLQQQIQEHEEEARRAAGQYSTSYAQQKRKVSDKEKIDQLQEELLHTQLKYQRILERLEKENKELRKLVLQKDDKGIHHRKLKKSLIDMYSEVLDVLSDYDASYNTQDHLPRVVVVGDQSAGKTSVLEMIAQARIFPRGSGEMMTRSPVKVTLSEGPHHVALFKDSSREFDLTKEEDLAALRHEIELRMRKNVKEGCTVSPETISLNVKGPGLQRMVLVDLPGVINTVTSGMAPDTKETIFSISKAYMQNPNAIILCIQDGSVDAERSIVTDLVSQMDPHGRRTIFVLTKVDLAEKNVASPSRIQQIIEGKLFPMKALGYFAVVTGKGNSSESIEAIREYEEEFFQNSKLLKTSMLKAHQVTTRNLSLAVSDCFWKMVRESVEQQADSFKATRFNLETEWKNNYPRLRELDRNELFEKAKNEILDEVISLSQVTPKHWEEILQQSLWERVSTHVIENIYLPAAQTMNSGTFNTTVDIKLKQWTDKQLPNKAVEVAWETLQEEFSRFMTEPKGKEHDDIFDKLKEAVKEESIKRHKWNDFAEDSLRVIQHNALEDRSISDKQQWDAAIYFMEEALQARLKDTENAIENMVGPDWKKRWLYWKNRTQEQCVHNETKNELEKMLKCNEEHPAYLASDEITTVRKNLESRGVEVDPSLIKDTWHQVYRRHFLKTALNHCNLCRRGFYYYQRHFVDSELECNDVVLFWRIQRMLAITANTLRQQLTNTEVRRLEKNVKEVLEDFAEDGEKKIKLLTGKRVQLAEDLKKVREIQEKLDAFIEALHQEK

SEQ ID NO: 7944 - protein, 1278 aa, Homo sapiens
MAQSKRHVYSRTPSGSRMSAEASARPLRVGSRVEVIGKGHRGTVAYVGATLFATGKWVGVILDEAKGKNDGTVQGRKYFTCDEGHGIFVRQSQIQVFEDGADTTSPETPDSSASKVLKREGTDTTAKTSKLRGLKPKKAPTARKTTTRRPKPTRPASTGVAGASSSLGPSGSASAGELSSSEPSTPAQTPLAAPIIPTPVLTSPGAVPPLPSPSKEEEGLRAQVRDLEEKLETLRLKRAEDKAKLKELEKHKIQLEQVQEWKSKMQEQQADLQRRLKEARKEAKEALEAKERYMEEMADTADAIEMATLDKEMAEERAESLQQEVEALKERVDELTTDLEILKAEIEEKGSDGAASSYQLKQLEEQNARLKDALVRMRDLSSSEKQEHVKLQKLMEKKNQELEVVRQQRERLQEELSQAESTIDELKEQVDAALGAEEMVEMLTDRNLNLEEKVRELRETVGDLEAMNEMNDELQENARETELELREQLDMAGARVREAQKRVEAAQETVADYQQTIKKYRQLTAHLQDVNRELTNQQEASVERQQQPPPETFDFKIKFAETKAHAKAIEMELRQMEVAQANRHMSLLTAFMPDSFLRPGGDHDCVLVLLLMPRLICKAELIRKQAQEKFELSENCSERPGLRGAAGEQLSFAAGLVYSLSLLQATLHRYEHALSQCSVDVYKKVGSLYPEMSAHERSLDFLIELLHKDQLDETVNVEPLTKAIKYYQHLYSIHLAEQPEDCTMQLADHIKFTQSALDCMSVEVGRLRAFLQGGQEATDIALLLRDLETSCSDIRQFCKKIRRRMPGTDAPGIPAALAFGPQVSDTLLDCRKHLTWVVAVLQEVAAAAAQLIAPLAENEGLLVAALEELAFKASEQIYGTPSSSPYECLRQSCNILISTMNKLATAMQEGEYDAERPPSKPPPVELRAAALRAEITDAEGLGLKLEDRETVIKELKKSLKIKGEELSEANVRLSLLEKKLDSAAKDADERIEKVQTRLEETQALLRKKEKEFEETMDALQADIDQLEAEKAELKQRLNSQSKRTIEGLRGPPPSGIATLVSGIAGEEQQRGAIPGQAPGSVPGPGLVKDSPLLLQQISAMRLHISQLQHENSILKGAQMKASLASLPPLHVAKLSHEGPGSELPAGALYRKTSQLLETLNQLSTHTHVVDITRTSPAAKSPSAQLMEQVAQLKSLSDTVEKLKDEVLKETVSQRPGATVPTDFATFPSSAFLRAKEEQQDDTVYMGKVTFSCAAGFGQRHRLVLTQEQLHQLHSRLIS

SEQ ID NO: 7945 - protein, 1311 aa, Homo sapiens
MSRRKQAKPRSLKDPNCKLEDKTEDGEALDCKKRPEDGEELEDEAVHSCDSCLQVFESLSDITEHKINQCQLTDGVDVEDDPTCSWPASSPSSKDQTSPSHGEGCDFGEEEGGPGLPYPCQFCDKSFSRLSYLKHHEQSHSDKLPFKCTYCSRLFKHKRSRDRHIKLHTGDKKYHCSECDAAFSRSDHLKIHLKTHTSNKPYKCAICRRGFLSSSSLHGHMQVHERNKDGSQSGSRMEDWKMKDTQKCSQCEEGFDFPEDLQKHIAECHPECSPNEDRAALQCVYCHELFVEETSLMNHMEQVHSGEKKNSCSICSESFHTVEELYSHMDSHQQPESCNHSNSPSLVTVGYTSVSSTTPDSNLSVDSSTMVEAAPPIPKSRGRKRAAQQTPDMTGPSSKQAKVTYSCIYCNKQLFSSLAVLQIHLKTMHLDKPEQAHICQYCLEVLPSLYNLNEHLKQVHEAQDPGLIVSAMPAIVYQCNFCSEVVNDLNTLQEHIRCSHGFANPAAKDSNAFFCPHCYMGFLTDSSLEEHIRQVHCDLSGSRFGSPVLGTPKEPVVEVYSCSYCTNSPIFNSVLKLNKHIKENHKNIPLALNYIHNGKKSRALSPLSPVAIEQTSLKMMQAVGGAPARPTGEYICNQCGAKYTSLDSFQTHLKTHLDTVLPKLTCPQCNKEFPNQESLLKHVTIHFMITSTYYICESCDKQFTSVDDLQKHLLDMHTFVFFRCTLCQEVFDSKVSIQLHLAVKHSNEKKVYRCTSCNWDFRNETDLQLHVKHNHLENQGKVHKCIFCGESFGTEVELQCHITTHSKKYNCKFCSKAFHAIILLEKHLREKHCVFETKTPNCGTNGASEQVQKEEVELQTLLTNSQESHNSHDGSEEDVDTSEPMYGCDICGAAYTMETLLQNHQLRDHNIRPGESAIVKKKAELIKGNYKCNVCSRTFFSENGLREHMQTHLGPVKHYMCPICGERFPSLLTLTEHKVTHSKSLDTGNCRICKMPLQSEEEFLEHCQMHPDLRNSLTGFRCVVCMQTVTSTLELKIHGTFHMQKTGNGSAVQTTGRGQHVQKLYKCASCLKEFRSKQDLVKLDINGLPYGLCAGCVNLSKSASPGINVPPGTNRPGLGQNENLSAIEGKGKVGGLKTRCSSCNVKFESESELQNHIQTIHRELVPDSNSTQLKTPQVSPMPRISPSQSDEKKTYQCIKCQMVFYNEWDIQVHVANHMIDEGLNHECKLCSQTFDSPAKLQCHLIEHSFEGMGGTFKCPVCFTVFVQANKLQQHIFSAHGQEDKIYDCTQCPQKFFFQTELQNHTMTQHSS

SEQ ID NO: 7946 - protein, 376 aa, Homo sapiens
MAERGRKRPCGPGEHGQRIEWRKWKQQKKEEKKKWKDLKLMKKLERQRAQEEQAKRLEEEEAAAEKEDRGRPYTLSVALPGSILDNAQSPELRTYLAGQIARACAIFCVDEIVVFDEEGQDAKTVEGEFTGVGKKGQACVQLARILQYLECPQYLRKAFFPKHQDLQFAGLLNPLDSPHHMRQDEESEFREGIVVDRPTRPGHGSFVNCGMKKEVKIDKNLEPGLRVTVRLNQQQHPDCKTYHGKVVSSQDPRTKAGLYWGYTVRLASCLSAVFAEAPFQDGYDLTIGTSERGSDVASAQLPNFRHALVVFGGLQGLEAGADADPNLEVAEPSVLFDLYVNTCPGQGSRTIRTEEAILISLAALQPGLIQAGARHT

SEQ ID NO: 7947 - protein, 603 aa, Homo sapiens
MTMHTTMTTLTLTSLIPPILTTLVNPNKKNSYPHYVKSIVASTFIISLFPTTMFMCLDQEVIISNWHWATTQTTQLSLSFKLDYFSMMFIPVALFVTWSIMEFSLWYMNSDPNINQFFKYLLIFLITMLILVTANNLFQLFIGWEGVGIMSFLLISWWYARADANTAAIQAILYNRIGDIGFILALAWFILHSNSWDPQQMALLNANPSLTPLLGLLLAAAGKSAQLGLHPWLPSAMEGPTPVSALLHSSTMVVAGIFLLIRFHPLAENSPLIQTLTLCLGAITTLFAAVCALTQNDIKKIVAFSTSSQLGLMMVTIGINQPHLAFLHICTHAFFKAMLFMCSGSIIHNLNNEQDIRKMGGLLKTMPLTSTSLTIGSLALAGMPFLTGFYSKDHIIETANMSYTNAWALSITLIATSLTSAYSTRMILLTLTGQPRFPTLTNINENNPTLLNPIKRLAAGSLFAGFLITNNISPASPFQTTIPLYLKLTALAVTFLGLLTALDLNYLTNKLKMKSPLCTFYFSNMLGFYPSITHRTIPYLGLLTSQNLPLLLLDLTWLEKLLPKTISQHQISTSIITSTQKGMIKLYFLSFFFPLILTLLLIT

SEQ ID NO: 7948 - protein, 469 aa, Homo sapiens
MEYHQPEDPAPGKAGTAEAVIPENHEVLAGPDEHPQDTDARDADGEAREREPADQALLPSQCGDNLESPLPEASSAPPGPTLGTLPEVETIRACSMPQELPQSPRTRQPEPDFYCVKWIPWKGEQTPIITQSTNGPCPLLAIMNILFLQWKVKLPPQKEVITSDELMAHLGNCLLSIKPQEKSEGLQLNFQQNVDDAMTVLPKLATGLDVNVRFTGVSDFEYTPECSVFDLLGIPLYHGWLVDPQSPEAVRAVGKLSYNQLVERIITCKHSSDTNLVTEGLIAEQFLETTAAQLTYHGLCELTAAAKEGELSVFFRNNHFSTMTKHKSHLYLLVTDQGFLQEEQVVWESLHNVDGDSCFCDSDFHLSHSLGKGPGAEGGSGSPETQLQVDQDYLIALSLQQQQPRGPLGLTDLELAQQLQQEEYQQQQAAQPVRMRTRVLSLQGRGATSGRPAGERRQRPKHESDCILL

SEQ ID NO: 7949 - protein, 76 aa, Homo sapiens
MFGACYKQPLKPSGSEPPAEECRMTPRHAGCDVTEMQRILSQPTFTEHLLRAVLSTERGPYPDPKRAFLDLLQERI

SEQ ID NO: 7950 - protein, 413 aa, Homo sapiens
MKEVVYWSPKKVADWLLENAMPEYCEPLEHFTGQDLINLTQEDFKKPPLCRVSSDNGQRLLDMIETLKMEHHLEAHKNGHANGHLNIGVDIPTPDGSFSIKIKPNGMPNGYRKEMIKIPMPELERSQYPMEWGKTFLAFLYALSCFVLTTVMISVVHERVPPKEVQPPLPDTFFDHFNRVQWAFSICEINGMILVGLWLIQWLLLKYKSIISRRFFCIVGTLYLYRCITMYVTTLPVPGMHFNCSPKLFGDWEAQLRRIMKLIAGGGLSITGSHNMCGDYLYSGHTVMLTLTYLFIKEYSPRRLWWYHWICWLLSVVGIFCILLAHDHYTVDVVVAYYITTRLFWWYHTMANQQVLKEASQMNLLARVWWYRPFQYFEKNVQGIVPRSYHWPFPWPVVHLSRQVKYSRLVNDT

SEQ ID NO: 7951 - protein, 986 aa, Homo sapiens
MSRIESLTRARIDRSRELASKTREKEKMKEAKDARYTNGHLFTTISVSGMTMCYACNKSITAKEALICPTCNVTIHNRCKDTLANCTKVKQKQQKAALLKNNTALQSVSLRSKTTIRERPSSAIYPSDSFRQSLLGSRRGRSSLSLAKSVSTTNIAGHFNDESPLGLRRILSQSTDSLNMRNRTLSVESLIDEAEVIYSELMSDFEMDEKDFAADSWSLAVDSSFLQQHKKEVMKQQDVIYELIQTELHHVRTLKIMTRLFRTGMLEELHLEPGVVQGLFPCVDELSDIHTRFLSQLLERRRQALCPGSTRNFVIHRLGDLLISQFSGPSAEQMCKTYSEFCSRHSKALKLYKELYARDKRFQQFIRKVTRPAVLKRHGVQECILLVTQRITKYPLLISRILQHSHGIEEERQDLTTALGLVKELLSNVDEGIYQLEKGARLQEIYNRMDPRAQTPVPGKGPFGREELLRRKLIHDGCLLWKTATGRFKDVLVLLMTDVLVFLQEKDQKYIFPTLDKPSVVSLQNLIVRDIANQEKGMFLISAAPPEMYEVHTASRDDRSTWIRVIQQSVRTCPSREDFPLIETEDEAYLRRIKMELQQKDRALVELLREKVGLFAEMTHFQAEEDGGSGMALPTLPRGLFRSESLESPRGERLLQDAIREVEGLKDLLVGPGVELLLTPREPALPLEPDSGGNTSPGVTANGEARTFNGSIELCRADSDSSQRDRNGNQLRSPQEEALQRLVNLYGLLHGLQAAVAQQDTLMEARFPEGPERREKLCRANSRDGEAGRAGAAPVAPEKQATELALLQRQHALLQEELRRCRRLGEERATEAGSLEARLRESEQARALLEREAEEARRQLAALGQTEPLPAEAPWARRPVDPRRRSLPAGDALYLSFNPPQPSRGTDRLDLPVTTRSVHRNFEDRERQELGSPEERLQDSSDPDTGSEEEGSSRLSPPHSPRDFTRMQDIPEETESRDGEAVASES

SEQ ID NO: 7952 - protein, 210 aa, Homo sapiens
MAASVEQREGTIQVQGQALFFREALPGSGQARFSVLLLHGIRFSSETWQNLGTLHRLAQAGYRAVAIDLPGLGHSKEAAAPAPIGELAPGSFLAAVVDALELGPPVVISPSLSGMYSLPFLTAPGSQLPGFVPVAPICTDKINAANYASVKTPALIVYGDQDPMGQTSFEHLKQLPNHRVLIMKGAGHPCYLDKPEEWHTGLLDFLQGLQ

SEQ ID NO: 7953 - protein, 526 aa, Homo sapiens
MDVRFYPPPAQPAAAPDAPCLGPSPCLDPYYCNKFDGENMYMSMTEPSQDYVPASQSYPGPSLESEDFNIPPITPPSLPDHSLVHLNEVESGYHSLCHPMNHNGLLPFHPQNMDLPEITVSNMLGQDGTLLSNSISVMPDIRNPEGTQYSSHPQMAAMRPRGQPADIRQQPGMMPHGQLTTINQSQLSAQLGLNMGGSNVPHNSPSPPGSKSATPSPSSSVHEDEGDDTSKINGGEKRPASDMGKKPKTPKKKKKKDPNEPQKPVSAYALFFRDTQAAIKGQNPNATFGEVSKIVASMWDGLGEEQKQVYKKKTEAAKKEYLKQLAAYRASLVSKSYSEPVDVKTSQPPQLINSKPSVFHGPSQAHSALYLSSHYHQQPGMNPHLTAMHPSLPRNIAPKPNNQMPVTVSIANMAVSPPPPLQISPPLHQHLNMQQHQPLTMQQPLGNQLPMQVQSALHSPTMQQGFTLQPDYQTIINPTSTAAQVVTQAMEYVRSGCRNPPPQPVDWNNDYCSSGGMQRDKALYLT

SEQ ID NO: 7954 - protein, 621 aa, Homo sapiens
MANVPWAEVCEKFQAALALSRVELHKNPEKEPYKSKYSARALLEEVKALLGPAPEDEDERPEAEDGPGAGDHALGLPAEVVEPEGPVAQRAVRLAVIEFHLGVNHIDTEELSAGEEHLVKCLRLLRRYRLSHDCISLCIQAQNNLGILWSEREEIETAQAYLESSEALYNQYMKEVGSPPLDPTERFLPEEEKLTEQERSKRFEKVYTHNLYYLAQVYQHLEMFEKAAHYCHSTLKRQLEHNAYHPIEWAINAATLSQFYINKLCFMEARHCLSAANVIFGQTGKISATEDTPEAEGEVPELYHQRKGEIARCWIKYCLTLMQNAQLSMQDNIGELDLDKQSELRALRKKELDEEESIRKKAVQFGTGELCDAISAVEEKVSYLRPLDFEEARELFLLGQHYVFEAKEFFQIDGYVTDHIEVVQDHSALFKVLAFFETDMERRCKMHKRRIAMLEPLTVDLNPQYYLLVNRQIQFEIAHAYYDMMDLKVAIADRLRDPDSHIVKKINNLNKSALKYYQLFLDSLRDPNKVFPEHIGEDVLRPAMLAKFRVARLYGKIITADPKKELENLATSLEHYKFIVDYCEKHPEAAQEIEVELELSKEMVSLLPTKMERFRTKMALT

SEQ ID NO: 7955 - protein, 916 aa, Homo sapiens
MVQKESQATLEERESELSSNPAASAGASLEPPAAPAPGEDNPAGAGGAAVAGAAGGARRFLCGVVEGFYGRPWVMEQRKELFRRLQKWELNTYLYAPKDDYKHRMFWREMYSVEEAEQLMTLISAAREYEIEFIYAISPGLDITFSNPKEVSTLKRKLDQVSQFGCRSFALLFDDIDHNMCAADKEVFSSFAHAQVSITNEIYQYLGEPETFLFCPTEYCGTFCYPNVSQSPYLRTVGEKLLPGIEVLWTGPKVVSKEIPVESIEEVSKIIKRAPVIWDNIHANDYDQKRLFLGPYKGRSTELIPRLKGVLTNPNCEFEANYVAIHTLATWYKSNMNGVRKDVVMTDSEDSTVSIQIKLENEGSDEDIETDVLYSPQMALKLALTEWLQEFGVPHQYSSRQVAHSGAKASVVDGTPLVAAPSLNATTVVTTVYQEPIMSQGAALSGEPTTLTKEEEKKQPDEEPMDMVVEKQEETDHKNDNQILSEIVEAKMAEELKPMDTDKESIAESKSPEMSMQEDCISDIAPMQTDEQTNKEQFVPGPNEKPLYTAEPVTLEDLQLLADLFYLPYEHGPKGAQMLREFQWLRANSSVVSVNCKGKDSEKIEEWRSRAAKFEEMCGLVMGMFTRLSNCANRTILYDMYSYVWDIKSIMSMVKSFVQWLGCRSHSSAQFLIGDQEPWAFRGGLAGEFQRLLPIDGANDLFFQPPPLTPTSKVYTIRPYFPKDEASVYKICREMYDDGVGLPFQSQPDLIGDKLVGGLLSLSLDYCFVLEDEDGICGYALGTVDVTPFIKKCKISWIPFMQEKYTKPNGDKELSEAEKIMLSFHEEQEVLPETFLANFPSLIKMDIHKKVTDPSVAKSMMACLLSSLKANGSRGAFCEVRPDDKRILEFYSKLGCFEIAKMEGFPKDVVILGRSL

SEQ ID NO: 7956 - protein, 1661 aa, Homo sapiens
MLGAPDESSVRVAVRIRPQLAKEKIEGCHICTSVTPGEPQVFLGKDKAFTFDYVFDIDSQQEQIYIQCIEKLIEGCFEGYNATVFAYGQTGAGKTYTMGTGFDVNIVEEELGIISRAVKHLFKSIEEKKHIAIKNGLPAPDFKVNAQFLELYNEEVLDLFDTTRDIDAKSKKSNIRIHEDSTGGIYTVGVTTRTVNTESEMMQCLKLGALSRTTASTQMNVQSSRSHAIFTIHVCQTRVCPQIDADNATDNKIISESAQMNEFETLTAKFHFVDLAGSERLKRTGATGERAKEGISINCGLLALGNVISALGDKSKRATHVPYRDSKLTRLLQDSLGGNSQTIMIACVSPSDRDFMETLNTLKYANRARNIKNKVMVNQDRASQQINALRSEITRLQMELMEYKTGKRIIDEEGVESINDMFHENAMLQTENNNLRVRIKAMQETVDALRSRITQLVSDQANHVLARAGEGNEEISNMIHSYIKEIEDLRAKLLESEAVNENLRKNLTRATARAPYFSGSSTFSPTILSSDKETIEIIDLAKKDLEKLKRKEKRKKKSVAGKEDNTDTDQEKKEEKGVSERENNELEVEESQEVSDHEDEEEEEEEEEDDIDGGESSDESDSESDEKANYQADLANITCEIAIKQKLIDELENSQKRLQTLKKQYEEKLMMLQHKIRDTQLERDQVLQNLGSVESYSEEKAKKVRSEYEKKLQAMNKELQRLQAAQKEHARLLKNQSQYEKQLKKLQQDVMEMKKTKVRLMKQMKEEQEKARLTESRRNREIAQLKKDQRKRDHQLRLLEAQKRNQEVVLRRKTEEVTALRRQVRPMSDKVAGKVTRKLSSSDAPAQDTGSSAAAVETDASRTGAQQKMRIPVARVQALPTPATNGNRKKYQRKGLTGRVFISKTARMKWQLLERRVTDIIMQKMTISNMEADMNRLLKQREELTKRREKLSKRREKIVKENGEGDKNVANINEEMESLTANIDYINDSISDCQANIMQMEEAKEEGETLDVTAVINACTLTEARYLLDHFLSMGINKGLQAAQKEAQIKVLEGRLKQTEITSATQNQLLFHMLKEKAELNPELDALLGHALQDLDSVPLENVEDSTDEDAPLNSPGSEGSTLSSDLMKLCGEVKPKNKARRRTTTQMELLYADSSELASDTSTGDASLPGPLTPVAEGQEIGMNTETSGTSAREKELSPPPGLPSKIGSISRQSSLSEKKIPEPSPVTRRKAYEKAEKSKAKEQKHSDSGTSEASLSPPSSPPSRPRNELNVFNRLTVSQGNTSVQQDKSDESDSSLSEVHRSSRRGIINPFPASKGIRAFPLQCIHIAEGHTKAVLCVDSTDDLLFTGSKDRTCKVWNLVTGQEIMSLGGHPNNVVSVKYCNYTSLVFTVSTSYIKVWDIRDSAKCIRTLTSSGQVTLGDACSASTSRTVAIPSGENQINQIALNPTGTFLYAASGNAVRMWDLKRFQSTGKLTGHLGPVMCLTVDQISSGQDLIITGSKDHYIKMFDVTEGALGTVSPTHNFEPPHYDGIEALTIQGDNLFSGSRDNGIKKWDLTQKDLLQQVPNAHKDWVCALGVVPDHPVLLSGCRGGILKVWNMDTFMPVGEMKGHDSPINAICVNSTHIFTAADDRTVRIWKARNLQDGQISDTGDLGEDIASN

SEQ ID NO: 7957 - protein, 772 aa, Homo sapiens
MLSLKKYLTEGLLQFTILLSLIGVRVDVDTYLTSQLPPLREIILGPSSAYTQTQFHNLRNTLDGYGIHPKSIDLDNYFTARRLLSQVRALDRFQVPTTEVNAWLVHRDPEGSVSGSQPNSGLALESSSGLQDVTGPDNGVRESETEQGFGEDLEDLGAVAPPVSGDLTKEDIDLIDILWRQDIDLGAGREVFDYSHRQKEQDVEKELRDGGEQDTWAGEGAEALARNLLVDGETGESFPAQVPSGEDQTALSLEECLRLLEATCPFGENAEFPADISSITEAVPSESEPPALQNNLLSPLLTGTESPFDLEQQWQDLMSIMEMQAMEVNTSASEILYSAPPGDPLSTNYSLAPNTPINQNVSLHQASLGGCSQDFLLFSPEVESLPVASSSTLLPLAPSNSTSLNSTFGSTNLTGLFFPPQLNGTANDTAGPELPDPLGGLLDEAMLDEISLMDLAIEEGFNPVQASQLEEEFDSDSGLSLDSSHSPSSLSSSEGSSSSSSSSSSSSSSASSSASSSFSEEGAVGYSSDSETLDLEEAEGAVGYQPEYSKFCRMSYQDPAQLSCLPYLEHVGHNHTYNMAPSALDSADLPPPSALKKGSKEKQADFLDKQMSRDEHRARAMKIPFTNDKIINLPVEEFNELLSKYQLSEAQLSLIRDIRRRGKNKMAAQNCRKRKLDTILNLERDVEDLQRDKARLLREKVEFLRSLRQMKQKVQSLYQEVFGRLRDENGRPYSPSQYALQYAGDGSVLLIPRTMADQQARRQERKPKDRRK

SEQ ID NO: 7958 - protein, 498 aa, Homo sapiens
MPHPRRYHSSERGSRGSYREHYRSRKHKRRRSRSWSSSSDRTRRRRREDSYHVRSRSSYDDRSSDRRVYDRRYCGSYRRNDYSRDRGDAYYDTDYRHSYEYQRENSSYRSQRSSRRKHRRRRRRSRTFSRSSSHSSRRAKSVEDDAEGHLIYHVGDWLQERYEIVSTLGEGTFGRVVQCVDHRRGGARVALKIIKNVEKYKEAARLEINVLEKINEKDPDNKNLCVQMFDWFDYHGHMCISFELLGLSTFDFLKDNNYLPYPIHQVRHMAFQLCQAVKFLHDNKLTHTDLKPENILFVNSDYELTYNLEKKRDERSVKSTAVRVVDFGSATFDHEHHSTIVSTRHYRAPEVILELGWSQPCDVWSIGCIIFEYYVGFTLFQTHDNREHLAMMERILGPIPSRMIRKTRKQKYFYRGRLDWDENTSAGRYVRENCKPLRRYLTSEAEEHHQLFDLIESMLEYEPAKRLTLGEALQHPFFARLRAEPPNKLWDSSRDISR

SEQ ID NO: 7959 - protein, 333 aa, Homo sapiens
MVGEMETKEKPKPTPDYLMQLMNDKKLMSSLPNFCGIFNHLERLLDEEISRVRKDMYNDTLNGSTEKRSAELPDAVGPIVQLQEKLYVPVKEYPDFNFVGRILGPRGLTAKQLEAETGCKIMVRGKGSMRDKKKEEQNRGKPNWEHLNEDLHVLITVEDAQNRAEIKLKRAVEEVKKLLVPAAEGEDSLKKMQLMELAILNGTYRDANIKSPTAQAAPRIITGPAPVLPPAALRTPTPAGPTIMPLIRQIQTAVMPNGTPHPTAAIVPPGPEAGLIYTPYEYPYTLAPATSILEYPIEPSGVLGAVATKVRRHDMRVHPYQRIVTADRAATGN

SEQ ID NO: 7960 - protein, 1077 aa, Homo sapiens
MEPNDSTSTAVEEPDSLEVLVKTLDSQTRTFIVGAQMNVKEFKEHIAASVSIPSEKQRLIYQGRVLQDDKKLQEYNVGGKVIHLVERAPPQTHLPSGASSGTGSASATHGGGSPPGTRGPGASVHDRNANSYVMVGTFNLPSDGSAVDVHINMEQAPIQSEPRVRLVMAQHMIRDIQTLLSRMECRGGPQPQHSQPPPQPPAVTPEPVALSSQTSEPVESEAPPREPMEAEEVEERAPAQNPELTPGPAPAGPTPAPETNAPNHPSPAEYVEVLQELQRLESRLQPFLQRYYEVLGAAATTDYNNNHEGREEDQRLINLVGESLRLLGNTFVALSDLRCNLACTPPRHLHVVRPMSHYTTPMVLQQAAIPIQINVGTTVTMTGNGTRPPPTPNAEAPPPGPGQASSVAPSSTNVESSAEGAPPPGPAPPPATSHPRVIRISHQSVEPVVMMHMNIQDSGTQPGGVPSAPTGPLGPPGHGQTLGQQVPGFPTAPTRVVIARPTPPQARPSHPGGPPVSGTLQGAGLGTNASLAQMVSGLVGQLLMQPVLVAQGTPGMAPPPAPATASASAGTTNTATTAGPAPGGPAQPPPTPQPSMADLQFSQLLGNLLGPAGPGAGGSGVASPTITVAMPGVPAFLQGMTDFLQATQTAPPPPPPPPPPPPAPEQQTMPPPGSPSGGAGSPGGLGLESLSPEFFTSVVQGVLSSLLGSLGARAGSSESIAAFIQRLSGSSNIFEPGADGALGFFGALLSLLCQNFSMVDVVMLLHGHFQPLQRLQPQLRSFFHQHYLGGQEPTPSNIRMATHTLITGLEEYVRESFSLVQVQPGVDIIRTNLEFLQEQFNSIAAHVLHCTDSGFGARLLELCNQGLFECLALNLHCLGGQQMELAAVINGRIRRMSRGVNPSLVSWLTTMMGLRLQVVLEHMPVGPDAILRYVRRVGDPPQPLPEEPMEVQGAERASPEPQRENASPAPGTTAEEAMSRGPPPAPEGGSRDEQDGASAETEPWAAAVPPEWVPIIQQDIQSQRKVKPQPPLSDAYLSGMPAKRRKLRSDIQKRLQEDPNYSPQRFPNAQRAFADDP

SEQ ID NO: 7961 - protein, 1036 aa, Homo sapiens
MEVVGDFEYSKRDLVGHGAFAVVFRGRHRQKTDWEVAIKSINKKNLSKSQILLGKEIKILKELQHENIVALYDVQELPNSVFLVMEYCNGGDLADYLQAKGTLSEDTIRVFLHQIAAAMRILHSKGIIHRDLKPQNILLSYANRRKSSVSGIRIKIADFGFARYLHSNMMAATLCGSPMYMAPEVIMSQHYDAKADLWSIGTVIYQCLVGKPPFQANSPQDLRMFYEKNRSLMPSIPRETSPYLANLLLGLLQRNQKDRMDFEAFFSHPFLEQGPVKKSCPVPVPMYSGSVSGSSCGSSPSCRFASPPSLPDMQHIQEENLSSPPLGPPNYLQVSKDSASTSSKNSSCDTDDFVLVPHNISSDHSCDMPVGTAGRRASNEFLVCGGQCQPTVSPHSETAPIPVPTQIRNYQRIEQNLTSTASSGTNVHGSPRSAVVRRSNTSPMGFLRPGSCSPVPADTAQTVGRRLSTGSSRPYSPSPLVGTIPEQFSQCCCGHPQGHDSRSRNSSGSPVPQAQSPQSLLSGARLQSAPTLTDIYQNKQKLRKQHSDPVCPSHTGAGYSYSPQPSRPGSLGTSPTKHLGSSPRSSDWFFKTPLPTIIGSPTKTTAPFKIPKTQASSNLLALVTRHGPAEEQSKDGNEPRECAHCLLVQGSERQRAEQQSKAVFGRSVSTGKLSDQQGKTPICRHQGSTDSLNTERPMDIAPAGACGGVLAPPAGTAASSKAVLFTVGSPPHSAAAPTCTHMFLRTRTTSVGPSNSGGSLCAMSGRVCVGSPPGPGFGSSPPGAEAAPSLRYVPYGASPPSLEGLITFEAPELPEETLMEREHTDTLRHLNVMLMFTECVLDLTAMRGGNPELCTSAVSLYQIQESVVVDQISQLSKDWGRVEQLVLYMKAAQLLAASLHLAKAQIKSGKLSPSTAVKQVVKNLNERYKFCITMCKKLTEKLNRFFSDKQRFIDEINSVTAEKLIYNCAVEMVQSAALDEMFQQTEDIVYRYHKAALLLEGLSRILQDPADIENVHKYKCSIERRLSALCHSTATV

SEQ ID NO: 7962 - protein, 380 aa, Homo sapiens
MSLSDWHLAVKLADQPLTPKSILRLPETELGEYSLGGYSISFLKQLIAGKLQESVPDPELIDLIYCGRKLKDDQTLDFYGIQPGSTVHVLRKSWPEPDQKPEPVDKVAAMREFRVLHTALHSSSSYREAVFKMLSNKESLDQIIVATPGLSSDPIALGVLQDKDLFSVFADPNMLDTLVPAHPALVNAIVLVLHSVAGSAPMPGTDSSSRSMPSSSYRDMPGGFLFEGLSDDEDDFHPNTRSTPSSSTPSSRPASLGYSGAAGPRPITQSELATALALASTPESSSHTPTPGTQGHSSGTSPMSSGVQSGTPITNDLFSQALQHALQASGQPSLQSQWQPQLQQLRDMGIQDDELSLRALQATGGDIQAALELIFAGGAP

SEQ ID NO: 7963 - protein, 283 aa, Homo sapiens
MNWTGLYTLLSGVNRHSTAIGRVWLSVIFIFRIMVLVVAAESVWGDEKSSFICNTLQPGCNSVCYDQFFPISHVRLWSLQLILVSTPALLVAMHVAHQQHIEKKMLRLEGHGDPLHLEEVKRHKVHISGTLWWTYVISVVFRLLFEAVFMYVFYLLYPGYAMVRLVKCDVYPCPNTVDCFVSRPTEKTVFTVFMLAASGICIILNVAEVVYLIIRACARRAQRRSNPPSRKGSGFGHRLSPEYKQNEINKLLSEQDGSLKDILRRSPGTGAGLAEKSDRCSAC

SEQ ID NO: 7964 - protein, 125 aa, Homo sapiens
MKKSGVLFLLGIILLVLIGVQGTPVVRKGRCSCISTNQGTIHLQSLKDLKQFAPSPSCEKIEIIATLKNGVQTCLNPDSADVKELIKKWEKQVSQKKKQKNGKKHQKKKVLKVRKSQRSRQKKTT

SEQ ID NO: 7965 - protein, 151 aa, Homo sapiens
MEGCVSNLMVCNLAYSGKLEELKESILADKSLATRTDQDSRTALHWACSAGHTEIVEFLLQLGVPVNDKDDAGWSPLHIAASAGRDEIVKALLGKGAQVNAVNQNGCTPLHYAASKNRHEIAVMLLEGGANPDAKDHYEATAMHRAAAKDT

SEQ ID NO: 7966 - protein, 939 aa, Homo sapiens
MDDSEVESTASILASVKEQEAQFEKLTRALEEERRHVSAQLERVRVSPQDANPLMANGTLTRRHQNGRFVGDADLERQKFSDLKLNGPQDHSHLLYSTIPRMQEPGQIVETYTEEDPEGAMSVVSVETSDDGTTRRTETTVKKVVKTVTTRTVQPVAMGPDGLPVDASSVSNNYIQTLGRDFRKNGNGGPGPYVGQAGTATLPRNFHYPPDGYSRHYEDGYPGGSDNYGSLSRVTRIEERYRPSMEGYRAPSRQDVYGPQPQVRVGGSSVDLHRFHPEPYGLEDDQRSMGYDDLDYGMMSDYGTARRTGTPSDPRRRLRSYEDMIGEEVPSDQYYWAPLAQHERGSLASLDSLRKGGPPPPNWRQPELPEVIAMLGFRLDAVKSNAAAYLQHLCYRNDKVKTDVRKLKGIPVLVGLLDHPKKEVHLGACGALKNISFGRDQDNKIAIKNCDGVPALVRLLRKARDMDLTEVITGTLWNLSSHDSIKMEIVDHALHALTDEVIIPHSGWEREPNEDCKPRHIEWESVLTNTAGCLRNVSSERSEARRKLRECDGLVDALIFIVQAEIGQKDSDSKLVENCVCLLRNLSYQVHREIPQAERYQEAAPNVANNTGPHAASCFGAKKGKDEWFSRGKKPIEDPANDTVDFPKRTSPARGYELLFQPEVVRIYISLLKESKTPAILEASAGAIQNLCAGRWTYGRYIRSALRQEKALSAIADLLTNEHERVVKAASGALRNLAVDARNKELIGKHAIPNLVKNLPGGQQNSSWNFSEDTVISILNTINEVIAENLEAAKKLRETQGIEKLVLINKSGNRSEKEVRAAALVLQTIWGYKELRKPLEKEGWKKSDFQVNLNNASRSQSSHSYDDSTLPLIDRNQKSDKKPDREEIQMSNMGSNTKSLDNNYSTPNERGDHNRTLDRSGDLGDMEPLKGTTPLMQKI

SEQ ID NO: 7967 - protein, 957 aa, Homo sapiens
MSLVSQNSRRRRRRVAKATAHNSSWGEMQAPNAPGLPADVPGSDVPQGPSDSQILQGLCASEGPSTSVLPTSAEGPSTFVPPTISEASSASGQPTISEGPGTSVLPTPSEGLSTSGPPTISKGLCTSVTLAASEGRNTSRPPTSSEEPSTSVPPTASEVPSTSLPPTPGEGTSTSVPPTAYEGPSTSVVPTPDEGPSTSVLPTPGEGPGTSVPLAATEGLSTSVQATPDEGPSTSVPPTATEGLSTPVPPTRDEGPSTSVPATPGEGPSTSVLPAASDGQSISLVPTRGKGSSTSVPPTATEGLSTSVQPTAGEGSSTSVPPTPGGGLSTSVPPTATEELSTSVPPTPGEGPSTSVLPIPGEGLSTSVPPTASDGSDTSVPPTPGEGASTLVQPTAPDGPGSSVLPNPGEGPSTLFSSSASVDRNPSKCSLVLPSPRVTKASVDSDSEGPKGAEGPIEFEVLRDCESPNSISIMGLNTSRVAITLKPQDPMEQNVAELLQFLLVKDQSKYPIRESEMREYIVKEYRNQFPEILRRAAAHLECIFRFELRELDPEAHTYILLNKLGPVPFEGLEESPNGPKMGLLMMILGQIFLNGNQAKEAEIWEMLWRMGVQRERRLSIFGNPKRLLSVEFVWQRYLDYRPVTDCKPVEYEFFWGPRSHLETTKMKILKFMAKIYNKDPMDWPEKYNEALEEDAARAFAEGWQALPHFRRPFFEEAAAEVPSPDSEVSSYSSKYAPHSWPESRLESKARKLVQLFLLMDSTKLPIPKKGILYYIGRECSKVFPDLLNRAARTLNHVYGTELVVLDPRNHSYTLYNRREMEETEEIVDSPNRPGNNFLMQVLSFIFIMGNHARESAVWAFLRGLGVQAGRKHVITCRYLSQRYIDSLRVPDSDPVQYEFVWGPRARLETSKMKALRYVARIHRKEPQDWPQQYREAMEDEANRADVGHRQIFVHNFR

SEQ ID NO: 7968 - protein, 699 aa, Homo sapiens
MNLLPKSSREFGSVDYWEKFFQQRGKKAFEWYGTYLELCGVLHKYIKPREKVLVIGCGNSELSEQLYDVGYRDIVNIDISEVVIKQMKECNATRRPQMSFLKMDMTQMEFPDASFQVVLDKGTLDAVLTDEEEKTLQQVDRMLAEVGRVLQVGGRYLCISLAQAHILKKAVGHFSREGWMVRVHQVANSQDQVLEAEPQFSLPVFAFIMTKFRPVPGSALQIFELCAQEQRKPVRLESAERLAEAVQERQQYAWLCSQLRRKARLGSVSLDLCDGDTGEPRYTLHVVDSPTVKPSRDNHFAIFIIPQGRETEWLFGMDEGRKQLAASAGFRRLITVALHRGQQYESMDHIQAELSARVMELAPAGMPTQQQVPFLSVGGDIGVRTVQHQDCSPLSGDYVIEDVQGDDKRYFRRLIFLSNRNVVQSEARLLKDVSHKAQKKRKKDRKKQRPADAEDLPAAPGQSIDKSYLCCEHHKAMIAGLALLRNPELLLEIPLALLVVGLGGGSLPLFVHDHFPKSCIDAVEIDPSMLEVATQWFGFSQSDRMKVHIADGLDYIASLAGGGEARPCYDVIMFDVDSKDPTLGMSCPPPAFVEQSFLQKVKSILTPEGVFILNLVCRDLGLKDSVLAGLKAVFPLLYVRRIEGEVNEILFCQLHPEQKLATPELLETAQALERTLRKPGRGWDDTYVLSDMLKTVKIV

SEQ ID NO: 7969 - protein, 230 aa, Homo sapiens
MEAAETEAEAAALEVLAEVAGILEPVGLQEEAELPAKILVEFVVDSQKKDKLLCSQLQVADFLQNILAQEDTAKGLDPLASEDTSRQKAIAAKEQWKELKATYREHVEAIKIGLTKALTQMEEAQRKRTQLREAFEQLQAKKQMAMEKRRAVQNQWQLQQEKHLQHLAEVSAEGKLLFPEAEAEAENLPDDKPQQPTRPQEQSTGDTMGRDPGVSFKAVGLQPAGDVNLP

SEQ ID NO: 7970 - protein, 3685 aa, Homo sapiens
MLWWEEVEDCYEREDVQKKTFTKWVNAQFSKFGKQHIENLFSDLQDGRRLLDLLEGLTGQKLPKEKGSTRVHALNNVNKALRVLQNNNVDLVNIGSTDIVDGNHKLTLGLIWNIILHWQVKNVMKNIMAGLQQTNSEKILLSWVRQSTRNYPQVNVINFTTSWSDGLALNALIHSHRPDLFDWNSVVCQQSATQRLEHAFNIARYQLGIEKLLDPEDVDTTYPDKKSILMYITSLFQVLPQQVSIEAIQEVEMLPRPPKVTKEEHFQLHHQMHYSQQITVSLAQGYERTSSPKPRFKSYAYTQAAYVTTSDPTRSPFPSQHLEAPEDKSFGSSLMESEVNLDRYQTALEEVLSWLLSAEDTLQAQGEISNDVEVVKDQFHTHEGYMMDLTAHQGRVGNILQLGSKLIGTGKLSEDEETEVQEQMNLLNSRWECLRVASMEKQSNLHRVLMDLQNQKLKELNDWLTKTEERTRKMEEEPLGPDLEDLKRQVQQHKVLQEDLEQEQVRVNSLTHMVVVVDESSGDHATAALEEQLKVLGDRWANICRWTEDRWVLLQDILLKWQRLTEEQCLFSAWLSEKEDAVNKIHTTGFKDQNEMLSSLQKLAVLKADLEKKKQSMGKLYSLKQDLLSTLKNKSVTQKTEAWLDNFARCWDNLVQKLEKSTAQISQAVTTTQPSLTQTTVMETVTTVTTREQILVKHAQEELPPPPPQKKRQITVDSEIRKRLDVDITELHSWITRSEAVLQSPEFAIFRKEGNFSDLKEKVNAIEREKAEKFRKLQDASRSAQALVEQMVNEGVNADSIKQASEQLNSRWIEFCQLLSERLNWLEYQNNIIAFYNQLQQLEQMTTTAENWLKIQPTTPSEPTAIKSQLKICKDEVNRLSDLQPQIERLKIQSIALKEKGQGPMFLDADFVAFTNHFKQVFSDVQAREKELQTIFDTLPPMRYQETMSAIRTWVQQSETKLSIPQLSVTDYEIMEQRLGELQALQSSLQEQQSGLYYLSTTVKEMSKKAPSEISRKYQSEFEEIEGRWKKLSSQLVEHCQKLEEQMNKLRKIQNHIQTLKKWMAEVDVFLKEEWPALGDSEILKKQLKQCRLLVSDIQTIQPSLNSVNEGGQKIKNEAEPEFASRLETELKELNTQWDHMCQQVYARKEALKGGLEKTVSLQKDLSEMHEWMTQAEEEYLERDFEYKTPDELQKAVEEMKRAKEEAQQKEAKVKLLTESVNSVIAQAPPVAQEALKKELETLTTNYQWLCTRLNGKCKTLEEVWACWHELLSYLEKANKWLNEVEFKLKTTENIPGGAEEISEVLDSLENLMRHSEDNPNQIRILAQTLTDGGVMDELINEELETFNSRWRELHEEAVRRQKLLEQSIQSAQETEKSLHLIQESLTFIDKQLAAYIADKVDAAQMPQEAQKIQSDLTSHEISLEEMKKHNQGKEAAQRVLSQIDVAQKKLQDVSMKFRLFQKPANFEQRLQESKMILDEVKMHLPALETKSVEQEVVQSQLNHCVNLYKSLSEVKSEVEMVIKTGRQIVQKKQTENPKELDERVTALKLHYNELGAKVTERKQQLEKCLKLSRKMRKEMNVLTEWLAATDMELTKRSAVEGMPSNLDSEVAWGKATQKEIEKQKVHLKSITEVGEALKTVLGKKETLVEDKLSLLNSNWIAVTSRAEEWLNLLLEYQKHMETFDQNVDHITKWIIQADTLLDESEKKKPQQKEDVLKRLKAELNDIRPKVDSTRDQAANLMANRGDHCRKLVEPQISELNHRFAAISHRIKTGKASIPLKELEQFNSDIQKLLEPLEAEIQQGVNLKEEDFNKDMNEDNEGTVKELLQRGDNLQQRITDERKREEIKIKQQLLQTKHNALKDLRSQRRKKALEISHQWYQYKRQADDLLKCLDDIEKKLASLPEPRDERKIKEIDRELQKKKEELNAVRRQAEGLSEDGAAMAVEPTQIQLSKRWREIESKFAQFRRLNFAQIHTVREETMMVMTEDMPLEISYVPSTYLTEITHVSQALLEVEQLLNAPDLCAKDFEDLFKQEESLKNIKDSLQQSSGRIDIIHSKKTAALQSATPVERVKLQEALSQLDFQWEKVNKMYKDRQGRFDRSVEKWRRFHYDIKIFNQWLTEAEQFLRKTQIPENWEHAKYKWYLKELQDGIGQRQTVVRTLNATGEEIIQQSSKTDASILQEKLGSLNLRWQEVCKQLSDRKKRLEEQKNILSEFQRDLNEFVLWLEEADNIASIPLEPGKEQQLKEKLEQVKLLVEELPLRQGILKQLNETGGPVLVSAPISPEEQDKLENKLKQTNLQWIKVSRALPEKQGEIEAQIKDLGQLEKKLEDLEEQLNHLLLWLSPIRNQLEIYNQPNQEGPFDVKETEIAVQAKQPDVEEILSKGQHLYKEKPATQPVKRKLEDLSSEWKAVNRLLQELRAKQPDLAPGLTTIGASPTQTVTLVTQPVVTKETAISKLEMPSSLMLEVPALADFNRAWTELTDWLSLLDQVIKSQRVMVGDLEDINEMIIKQKATMQDLEQRRPQLEELITAAQNLKNKTSNQEARTIITDRIERIQNQWDEVQEHLQNRRQQLNEMLKDSTQWLEAKEEAEQVLGQARAKLESWKEGPYTVDAIQKKITETKQLAKDLRQWQTNVDVANDLALKLLRDYSADDTRKVHMITENINASWRSIHKRVSEREAALEETHRLLQQFPLDLEKFLAWLTEAETTANVLQDATRKERLLEDSKGVKELMKQWQDLQGEIEAHTDVYHNLDENSQKILRSLEGSDDAVLLQRRLDNMNFKWSELRKKSLNIRSHLEASSDQWKRLHLSLQELLVWLQLKDDELSRQAPIGGDFPAVQKQNDVHRAFKRELKTKEPVIMSTLETVRIFLTEQPLEGLEKLYQEPRELPPEERAQNVTRLLRKQAEEVNTEWEKLNLHSADWQRKIDETLERLRELQEATDELDLKLRQAEVIKGSWQPVGDLLIDSLQDHLEKVKALRGEIAPLKENVSHVNDLARQLTTLGIQLSPYNLSTLEDLNTRWKLLQVAVEDRVRQLHEAHRDFGPASQHFLSTSVQGPWERAISPNKVPYYINHETQTTCWDHPKMTELYQSLADLNNVRFSAYRTAMKLRRLQKALCLDLLSLSAACDALDQHNLKQNDQPMDILQIINCLTTIYDRLEQEHNNLVNVPLCVDMCLNWLLNVYDTGRTGRIRVLSFKTGIISLCKAHLEDKYRYLFKQVASSTGFCDQRRLGLLLHDSIQIPRQLGEVASFGGSNIEPSVRSCFQFANNKPEIEAALFLDWMRLEPQSMVWLPVLHRVAAAETAKHQAKCNICKECPIIGFRYRSLKHFNYDICQSCFFSGRVAKGHKMHYPMVEYCTPTTSGEDVRDFAKVLKNKFRTKRYFAKHPRMGYLPVQTVLEGDNMETPVTLINFWPVDSAPASSPQLSHDDTHSRIEHYASRLAEMENSNGSYLNDSISPNESIDDEHLLIQHYCQSLNQDSPLSQPRSPAQILISLESEERGELERILADLEEENRNLQAEYDRLKQQHEHKGLSPLPSPPEMMPTSPQSPRDAELIAEAKLLRQHKGRLEARMQILEDHNKQLESQLHRLRQLLEQPQAEAKVNGTTVSSPSTSLQRSDSSQPMLLRVVGSQTSDSMGEEDLLSPPQDTSTGLEEVMEQLNNSFPSSRGRNTPGKPMREDTM

SEQ ID NO: 7971 - protein, 671 aa, Homo sapiens
MAQLFLPLLAALVLAQAPAALADVLEGDSSEDRAFRVRIAGDAPLQGVLGGALTIPCHVHYLRPPPSRRAVLGSPRVKWTFLSRGREAEVLVARGVRVKVNEAYRFRVALPAYPASLTDVSLALSELRPNDSGIYRCEVQHGIDDSSDAVEVKVKGVVFLYREGSARYAFSFSGAQEACARIGAHIATPEQLYAAYLGGYEQCDAGWLSDQTVRYPIQTPREACYGDMDGFPGVRNYGVVDPDDLYDVYCYAEDLNGELFLGDPPEKLTLEEARAYCQERGAEIATTGQLYAAWDGGLDHCSPGWLADGSVRYPIVTPSQRCGGGLPGVKTLFLFPNQTGFPNKHSRFNVYCFRDSAQPSAIPEASNPASNPASDGLEAIVTVTETLEELQLPQEATESESRGAIYSIPIMEDGGGGSSTPEDPAEAPRTLLEFETQSMVPPTGFSEEEGKALEEEEKYEDEEEKEEEEEEEEVEDEALWAWPSELSSPGPEASLPTEPAAQEESLSQAPARAVLQPGASPLPDGESEASRPPRVHGPPTETLPTPRERNLASPSPSTLVEAREVGEATGGPELSGVPRGESEETGSSEGAPSLLPATRAPEGTRELEAPSEDNSGRTAPAGTSVQAQPVLPTDSASRGGVAVVPASGNSAQGSTALSILLLFFPLQLWVT

SEQ ID NO: 7972 - protein, 786 aa, Homo sapiens
MTSIFHFAIIFMLILQIRIQLSEESEFLVDRSKNGLIHVPKDLSQKTTILNISQNYISELWTSDILSLSKLRILIISHNRIQYLDISVFKFNQELEYLDLSHNKLVKISCHPTVNLKHLDLSFNAFDALPICKEFGNMSQLKFLGLSTTHLEKSSVLPIAHLNISKVLLVLGETYGEKEDPEGLQDFNTESLHIVFPTNKEFHFILDVSVKTVANLELSNIKCVLEDNKCSYFLSILAKLQTNPKLSNLTLNNIETTWNSFIRILQLVWHTTVWYFSISNVKLQGQLDFRDFDYSGTSLKALSIHQVVSDVFGFPQSYIYEIFSNMNIKNFTVSGTRMVHMLCPSKISPFLHLDFSNNLLTDTVFENCGHLTELETLILQMNQLKELSKIAEMTTQMKSLQQLDISQNSVSYDEKKGDCSWTKSLLSLNMSSNILTDTIFRCLPPRIKVLDLHSNKIKSIPKQVVKLEALQELNVAFNSLTDLPGCGSFSSLSVLIIDHNSVSHPSADFFQSCQKMRSIKAGDNPFQCTCELGEFVKNIDQVSSEVLEGWPDSYKCDYPESYRGTLLKDFHMSELSCNITLLIVTIVATMLVLAVTVTSLCSYLDLPWYLRMVCQWTQTRRRARNIPLEELQRNLQFHAFISYSGHDSFWVKNELLPNLEKEGMQICLHERNFVPGKSIVENIITCIEKSYKSIFVLSPNFVQSEWCHYELYFAHHNLFHEGSNSLILILLEPIPQYSIPSSYHKLKSLMARRTYLEWPKEKSKRGLFWANLRAAINIKLTEQAKK

SEQ ID NO: 7973 - protein, 447 aa, Homo sapiens
MENKKKDKDKSDDRMARPSGRSGHNTRGTGSSSSGVLMVGPNFRVGKKIGCGNFGELRLGKNLYTNEYVAIKLEPMKSRAPQLHLEYRFYKQLGSGDGIPQVYYFGPCGKYNAMVLELLGPSLEDLFDLCDRTFSLKTVLMIAIQLISRMEYVHSKNLIYRDVKPENFLIGRPGNKTQQVIHIIDFGLAKEYIDPETKKHIPYREHKSLTGTARYMSINTHLGKEQSRRDDLEALGHMFMYFLRGSLPWQGLKADTLKERYQKIGDTKRATPIEVLCENFPEMATYLRYVRRLDFFEKPDYDYLRKLFTDLFDRKGYMFDYEYDWIGKQLPTPVGAVQQDPALSSNREAHQHRDKMQQSKNQSADHRAAWDSQQANPHHLRAHLAADRHGGSVQVVSSTNGELNTDDPTAGRSNAPITAPTEVEVMDETKCCCFFKRRKRKTIQRHK

SEQ ID NO: 7974 - protein, 286 aa, Homo sapiens
MADLEEQLSDEEKVRIAAKFIIHAPPGEFNEVFNDVRLLLNNDNLLREGAAHAFAQYNLDQFTPVKIEGYEDQVLITEHGDLGNGKFLDPKNRICFKFDHLRKEATDPRPCEVENAVESWRTSVETALRAYVKEHYPNGVCTVYGKKIDGQQTIIACIESHQFQAKNFWNGRWRSEWKFTITPSTTQVVGILKIQVHYYEDGNVQLVSHKDIQDSLTVSNEVQTAKEFIKIVEAAENEYQTAISENYQTMSDTTFKALRRQLPVTRTKIDWNKILSYKIGKEMQNA

SEQ ID NO: 7975 - protein, 1957 aa, Homo sapiens
MFRQFYLWTCLASGIILGSLFEICLGQYDDDCKLARGGPPATIVAIDEESRNGTILVDNMLIKGTAGGPDPTIELSLKDNVDYWVLMDPVKQMLFLNSTGRVLDRDPPMNIHSIVVQVQCINKKVGTIIYHEVRIVVRDRNDNSPTFKHESYYATVNELTPVGTTIFTGFSGDNGATDIDDGPNGQIEYVIQYNPDDPTSNDTFEIPLMLTGNIVLRKRLNYEDKTRYFVIIQANDRAQNLNERRTTTTTLTVDVLDGDDLGPMFLPCVLVPNTRDCRPLTYQAAIPELRTPEELNPIIVTPPIQAIDQDRNIQPPSDRPGILYSILVGTPEDYPRFFHMHPRTAELSLLEPVNRDFHQKFDLVIKAEQDNGHPLPAFAGLHIEILDENNQSPYFTMPSYQGYILESAPVGATISDSLNLTSPLRIVALDKDIEDTKDPELHLFLNDYTSVFTVTQTGITRYLTLLQPVDREEQQTYTFSITAFDGVQESEPVIVNIQVMDANDNTPTFPEISYDVYVYTDMRPGDSVIQLTAVDADEGSNGEITYEILVGAQGDFIINKTTGLITIAPGVEMIVGRTYALTVQAADNAPPAERRNSICTVYIEVLPPNNQSPPRFPQLMYSLEISEAMRVGAVLLNLQATDREGDSITYAIENGDPQRVFNLSETTGILTLGKALDRESTDRYILIITASDGRPDGTSTATVNIVVTDVNDNAPVFDPYLPRNLSVVEEEANAFVGQVKATDPDAGINGQVHYSLGNFNNLFRITSNGSIYTAVKLNREVRDYYELVVVATDGAVHPRHSTLTLAIKVLDIDDNSPVFTNSTYTVLVEENLPAGTTILQIEAKDVDLGANVSYRIRSPEVKHFFALHPFTGELSLLRSLDYEAFPDQEASITFLVEAFDIYGTMPPGIATVTVIVKDMNDYPPVFSKRIYKGMVAPDAVKGTPITTVYAEDADPPGLPASRVRYRVDDVQFPYPASIFEVEEDSGRVITRVNLNEEPTTIFKLVVVAFDDGEPVMSSSATVKILVLHPGEIPRFTQEEYRPPPVSELATKGTMVGVISAAAINQSIVYSIVSGNEEDTFGINNITGVIYVNGPLDYETRTSYVLRVQADSLEVVLANLRVPSKSNTAKVYIEIQDENNHPPVFQKKFYIGGVSEDARMFTSVLRVKATDKDTGNYSVMAYRLIIPPIKEGKEGFVVETYTGLIKTAMLFHNMRRSYFKFQVIATDDYGKGLSGKADVLVSVVNQLDMQVIVSNVPPTLVEKKIEDLTEILDRYVQEQIPGAKVVVESIGARRHGDAFSLEDYTKCDLTVYAIDPQTNRAIDRNELFKFLDGKLLDINKDFQPYYGEGGRILEIRTPEAVTSIKKRGESLGYTEGALLALAFIIILCCIPAILVVLVSYRQFKVRQAECTKTARIQAALPAAKPAVPAPAPVAAPPPPPPPPPGAHLYEELGDSSMHNLFLLYHFQQSRGNNSVSEDRKHQQVVMPFSSNTIEAHKSAHVDGSLKSNKLKSARKFTFLSDEDDLSAHNPLYKENISQVSTNSDISQRTDFVDPFSPKIQAKSKSLRGPREKIQRLWSQSVSLPRRLMRKVPNRPEIIDLQQWQGTRQKAENENTGICTNKRGSSNPLLTTEEANLTEKEEIRQGETLMIEGTEQLKSLSSDSSFCFPRPHFSFSTLPTVSRTVELKSEPNVISSPAECSLELSPSRPCVLHSSLSRRETPICMLPIETERNIFENFAHPPNISPSACPLPPPPPISPPSPPPAPAPLAPPPDISPFSLFCPPPSPPSIPLPLPPPTFFPLSVSTSGPPTPPLLPPFPTPLPPPPPSIPCPPPPSASFLSTECVCITGVKCTTNLMPAEKIKSSMTQLSTTTVCKTDPQREPKGILRHVKNLAELEKSVANMYSQIEKNYLRTNVSELQTMCPSEVTNMEITSEQNKGSLNNIVEGTEKQSHSQSTSL

SEQ ID NO: 7976 - protein, 319 aa, Homo sapiens
MVGEMETKEKPKPTPDYLMQLMNDKKLMSSLPNFCGIFNHLERLLDEEISRVRKDMYNDTLNGSTEKRSAELPDAVGPIVQLQEKLYVPVKEYPDFNFVGRILGPRGLTAKQLEAETGCKIMVRGKGSMRDKKKEEQNRGKPNWEHLNEDLHVLITVEDAQNRAEIKLKRAVEEVKKLLVPAAEGEDSLKKMQLMELAILNGTYRDANIKSPALAFSLAATAQAAPRIITGPAPVLPPAALRTPTPAGPTIMPLIRQIQTAVMPNGTPHPTAAIVPPGPEAGLIYTPYEYPYTLAPATSILEYPIEPSGVLGMAFPTKG

SEQ ID NO: 7977 - protein, 676 aa, Homo sapiens
MSGGGDVVCTGWLRKSPPEKKLRRYAWKKRWFILRSGRMSGDPDVLEYYKNDHSKKPLRIINLNFCEQVDAGLTFNKKELQDSFVFDIKTSERTFYLVAETEEDMNKWVQSICQICGFNQAEESTDSLRNVSSAGHGPRSSPAELSSSSQHLLRERKSSAPSHSSQPTLFTFEPPVSNHMQPTLSTSAPQEYLYLHQCISRRAENARSASFSQGTRASFLMRSDTAVQKLAQGNGHCVNGISGQVHGFYSLPKPSRHNTEFRDSTYDLPRSLASHGHTKGSLTGSETDNEDVYTFKTPSNTLCREFGDLLVDNMDVPATPLSAYQIPRTFTLDKNHNAMTVATPGDSAIAPPPRPPKPSQAETPRWGSPQQRPPISENSRSVAATIPRRNTLPAMDNSRLHRASSCETYEYPQRGGESAGRSAESMSDGVGSFLPGKMIVGRSDSTNSEDNYVPMNPGSSTLLAMERAGDNSQSVYIPMSPGAHHFDSLGYPSTTLPVHRGPSRGSEIQPPPVNRNLKPDRKAKPTPLDLRNNTVIDELPFKSPITKSWSRANHTFNSSSSQYCRPISTQSITSTDSGDSEENYVPMQNPVSASPVPSGTNSPAPKKSTGSVDYLALDFQPSSPSPHRKPSTSSVTSDEKVDYVQVDKEKTQALQNTMQEWTDVRQSSEPSKGAKL

SEQ ID NO: 7978 - protein, 1101 aa, Homo sapiens
MATPSKKTSTPSPQPSKRALPRDPSSEVPSKRKNSAPQLPLLQSSGPFVEGSIVRISMENFLTYDICEVSPGPHLNMIVGANGTGKSSIVCAICLGLAGKPAFMGRADKVGFFVKRGCSRGMVEIELFRASGNLVITREIDVAKNQSFWFINKKSTTQKIVEEKVAALNIQVGNLCQFLPQDKVGEFAKLSKIELLEATEKSIGPPEMHKYHCELKNLREKEKQLETSCKEKTEYLQKMVQRNERYKQDVERFYERKRHLDLIEMLEAKRPWVEYENVRQEYEEVKLVRDRVKEEVRKLKEGQIPVTCRIEEMENERHNLEARIKEKATDIKEASQKCKQKQDVIERKDKHIEELQQALIVKQNEELDRQRRIGNTRKMIEDLQNELKTTENCENLQPQIDAITNDLRRIQDEKALCEGEIIDKRRERETLEKEKKSVDDHIVRFDNLMNQKEDKLRQRFRDTYDAVLWLRNNRDKFKQRVCEPIMLTINMKDNKNAKYIENHIPSNDLRAFVFESQEDMEVFLKEVRDNKKLRVNAVIAPKSSYADKAPSRSLNELKQYGFFSYLRELFDAPDPVMSYLCCQYHIHEVPVGTEKTRERIERVIQETRLKQIYTAEEKYVVKTSFYSNKVISSNTSLKVAQFLTVTVDLEQRRHLEEQLKEIHRKLQAVDSGLIALRETSKHLEHKDNELRQKKKELLERKTKKRQLEQKISSKLGSLKLMEQDTCNLEEEERKASTKIKEINVQKAKLVTELTNLIKICTSLHIQKVDLILQNTTVISEKNKLESDYMAASSQLRLTEQHFIELDENRQRLLQKCKELMKRARQVCNLGAEQTLPQEYQTQVPTIPNGHNSSLPMVFQDLPNTLDEIDALLTEERSRASCFTGLNPTIVQEYTKREEEIEQLTEELKGKKVELDQYRENISQVKERWLNPLKELVEKINEKFSNFFSSMQCAGEVDLHTENEEDYDKYGIRIRVKFRSSTQLHELTPHHQSGGERSVSTMLYLMALQELNRCPFRVVDEINQGMDPINERRVFEMVVNTACKENTSQYFFITPKLLQNLPYSEKMTVLFVYNGPHMLEPNTWNLKAFQRRRRRITFTQPS

SEQ ID NO: 7979 - protein, 161 aa, Homo sapiens
MKQVPTLKIDGITIHQSLAIIEYLEEMRPTPRLLPQDPKKRASVRMISDLIAGGIQPLQNLSVLKQVGEEMQLTWAQNAITCGFNALEQILQSTAGIYCVGDEVTMADLCLVPQVANAERFKVDLTPYPTISSINKRLLVLEAFQVSHPCRQPDTPTELRA

SEQ ID NO: 7980 - protein, 626 aa, Homo sapiens
MAARPAATLAWSLLLLSSALLREGCRARFVAERDSEDDGEEPVVFPESPLQSPTVLVAVLARNAAHTLPHFLGCLERLDYPKSRMAIWAATDHNVDNTTEIFREWLKNVQRLYHYVEWRPMDEPESYPDEIGPKHWPTSRFAHVMKLRQAALRTAREKWSDYILFIDVDNFLTNPQTLNLLIAENKTIVAPMLESRGLYSNFWCGITPKGFYKRTPDYVQIREWKRTGCFPVPMVHSTFLIDLRKEASDKLTFYPPHQDYTWTFDDIIVFAFSSRQAGIQMYLCNREHYGYLPIPLKPHQTLQEDIENLIHVQIEAMIDRPPMEPSQYVSVVPKYPDKMGFDEIFMINLKRRKDRRDRMLRTLYEQEIEVKIVEAVDGKALNTSQLKALNIEMLPGYRDPYSSRPLTRGEIGCFLSHYSVWKEVIDRELEKTLVIEDDVRFEHQFKKKLMKLMDNIDQAQLDWELIYIGRKRMQVKEPEKAVPNVANLVEADYSYWTLGYVISLEGAQKLVGANPFGKMLPVDEFLPVMYNKHPVAEYKEYYESRDLKAFSAEPLLIYPTHYTGQPGYLSDTETSTIWDNETVATDWDRTHAWKSRKQSRIYSNAKNTEALPPPTSLDTVPSRDEL

SEQ ID NO: 7981 - protein, 2279 aa, Homo sapiens
MYRSSARSSVSSHRPKDDGGGGPRSGRSSGSSSGPARRSSPPPPPSGSSSRTPARRPRSPSGHRGRRASPSPPRGRRVSPSPPRARRGSPSPPRGRRLFPPGPAGFRGSSRGESRADYARDGRGDHPGDSGSRRRSPGLCSDSLEKSLRITVGNDHFCVSTPERRRLSDRLGSPVDNLEDMDRDDLTDDSVFTRSSQCSRGLERYISQEEGPLSPFLGQLDEDYRTKETFLHRSDYSPHISCHDELLRGTERNREKLKGYSIRSEERSREAKRPRYDDTVKINSMGGDHPSFTSGTRNYRQRRRSPSPRFLDPEFRELDLARRKREEEEERSRSLSQELVGVDGGGTGCSIPGLSGVLTASEPGYSLHRPEEVSVMPKKSILKKRIEVDIMEPSMQLESFSSSTSSSQDHPLYSGHPSLPLSGAIAAFASEIENKGTMVETALKEPQGNLYQWGPLPGIPKDNSPLREKFGSFLCHKDNLDLKAEGPERHTDFLLPHERASQDGSGFSRILSMLADSTSTQEKRRRSFPDIEDEEKFLYGDEEEDLKAESVPKPLGSSESEVMRQKASSLPSSAPAVKLESLEETNPEYAKIHDLLKTIGLDIGVAEISQLAARTQERLHGKKPSLRSSADRRSSVDRYFSADHCSSVDHRFSADRCSSVDHCFSADRRSSDPHRLESREAHHSNTHSPEVSHPHPPSPVDPYLLTKNSPPFLKSDHPVGHISGPEVVGSGFQSSVAVRCMLPSAPSAPIRLPHTAALSQFHMPRASQFAAARIPPNYQGPAIPPASFDAYRHYMAYAASRWPMYPTSQPSNHPVPEPHRIMPITKQATRSRPNLRVIPTVTPDKPKQKESLRGSIPAAQVPVQVSIPSLIRYNPEKISDEKNRASQKQKVIEEREKLKNDREARQKKMYYLRTELERLHKQQGEMLRKKRREKDGHKDPLLVEVSRLQDNIMKDIAELRQEAEEAEKKQSELDKVAQILGINIFDKSQKSLSDSREPTEKPGKAEKSKSPEKVSSFSNSSSNKESKVNNEKFRTKSPKPAESPQSATKQLDQPTAAYEYYDAGNHWCKDCNTICGTMFDFFTHMHNKKHTQTLDPYNRPWASKTQSEAKQDAIKRTDKITVPAKGSEFLVPISGFYCQLCEEFLGDPISGEQHVKGHQHNEKYKKYVDENPLYEERRNLDRQAGLAVVLETERRRQSELKRKLSEKPKEEKKEKKAKAVKEVKEDDKVSEKLEDQLSEGRNSPEKAENKRNTGIKLQLKEEVKKESPTSSSFGKFSWKKPEKEEEKSSLVTPSISKEEILESSKDKEDGKTEAGKAKPIKIKLSGKTVVAHTSPWMPVVTTSTQTKIRPNLPIPSTVLRKSCSATMSKPAPLNTFLSIKSSGTTAKPLPVVKESSADLLLPPDIISKAFGGEEVILKGSPEEKVVLAEKSEPSHLPEQILPPPPPPPPPPPPPPPVIPHPAAPSAAQANAILAPVKSNPVVSQTLSPGFVGPNILNPVLPVAIMASAQPAAIPSDETAPGVSESDRDQTLFSVLVRPPPPLSSVFSEQAKKLEKRNSCLATANAKDLYDIFYSSGGKGAPETKGAPETKLSGGPLANGENSNLSRTKSSDTSSTSPLNSSASQEELHQDEGLVAAPIVSNSEKPIAKTLVALGKWSVVEHVGPKSTGSTYGFLQPLTRLCQSRPYETITPKTDTLAIWTSSSFQSDTSRDISPEKSELDLGEPGPPGVEPPPQLLDIQCKESQKLVEIHLRESVNQDKESQELRKSEDCRESEIETNTELKERVKELSEGIVDEGVSTSIGPHSIDDSNLNHGNRYMWEGEVKQPNLLMIDKEAEQSNKLMTGSETPSKVVIKLSPQACSFTKAKLDSFLSEARSLLNPQDTPVKISAPELLLHSPARSAMCLTGSPQEQGVSVVSEEGLENSAPESASRTSRYRSLKLKRERSKDFQVKKIYELAVWDENKKRPETWESPEKPKTEALELQDVHPELTVTIESKALEDFEATDLKVEELTALGNLGDMPVDFCTTRVSPAHRSPTVLCQKVCEENSVSPIGCNSSDPADFEPIPSFSGFPLDSPKTLVLDFETEGERNSPNPRSVRIPSPNILKTGLTENVDRGLGGLEGTHQALDLLAGGMMPEEVKESSQLDKQESLGLELKTINSAGLGPSPCLPDLVDFVTRTSGVQKDKLCSPLSEPGDPSKCSSLELGPLQLEISNASTTEVAILQVDDDSGDPLNLVKAPVSRSPPREQVIEDNMVPQGMPEQETTVGAIQDHTESSVHN

SEQ ID NO: 7982 - protein, 725 aa, Homo sapiens
MVMKASVDDDDSGWELSMPEKMEKSNTNWVDITQDFEEACRELKLGELLHDKLFGLFEAMSAIEMMDPKMDAGMIGNQVNRKVLNFEQAIKDGTIKIKDLTLPELIGIMDTCFCCLITWLEGHSLAQTVFTCLYIHNPDFIEDPAMKAFALGILKICDIAREKVNKAAVFEEEDFQSMTYGFKMANSVTDLRVTGMLKDVEDDMQRRVKSTRSRQGEERDPEVELEHQQCLAVFSRVKFTRVLLTVLIAFTKKETSAVAEAQKLMVQAADLLSAIHNSLHHGIQAQNDTTKGDHPIMMGFEPLVNQRLLPPTFPRYAKIIKREEMVNYFARLIDRIKTVCEVVNLTNLHCILDFFCEFSEQSPCVLSRSLLQTTFLVDNKKVFGTHLMQDMVKDALRSFVSPPVLSPKCYLYNNHQAKDCIDSFVTHCVRPFCSLIQIHGHNRARQRDKLGHILEEFATLQDEAEKVDAALHTMLLKQEPQRQHLACLGTWVLYHNLRIMIQYLLSGFELELYSMHEYYYIYWYLSEFLYAWLMSTLSRADGSQMAEERIMEEQQKGRSSKKTKKKKKVRPLSREITMSQAYQNMCAGMFKTMVAFDMDGKVRKPKFELDSEQVRYEHRFAPFNSVMTPPPVHYLQFKEMSDLNKYSPPPQSPELYVAASKHFQQAKMILENIPNPDHEVNRILKVAKPNFVVMKLLAGGHKKESKVPPEFDFSAHKYFPVVKLV

SEQ ID NO: 7983 - protein, 1766 aa, Homo sapiens
MGGKNKQRTKGNLRPSNSGRAAELLAKEQGTVPGFIGFGTSQSDLGYVPAIQGAEEIDSLVDSDFRMVLRKLSKKDVTTKLKAMQEFGTMCTERDTETVKGVLPYWPRIFCKISLDHDRRVREATQQAFEKLILKVKKQLAPYLKSLMGYWLMAQCDTYTPAAFAAKDAFEAAFPPSKQPEAIAFCKDEITSVLQDHLIKETPDTLSDPQTVPEEEREAKFYRVVTCSLLALKRLLCLLPDNELDSLEEKFKSLLSQNKFWKYGKHSVPQIRSAYFELVSALCQRIPQLMKEEASKVSPSVLLSIDDSDPIVCPALWEAVLYTLTTIEDCWLHVNAKKSVFPKLSTVIREGGRGLATVIYPYLLPFISKLPQSITNPKLDFFKNFLTSLVAGLSTERTKTSSLESSAVISAFFECLRFIMQQNLGEEEIEQMLVNDQLIPFIDAVLKDPGLQHGQLFNHLAETLSSWEAKADTEKDEKTAHNLENVLIHFWERLSEICVAKISEPEADVESVLGVSNLLQVLQKPKSSLKSSKKKNGKVRFADEILESNKENEKCVSSEGEKIEGWELTTEPSLTHNSSGLLSPLRKKPLEDLVCKLADISINYVNERKSEQHLRFLSTLLDSFSSSRVFKMLLGDEKQSIVQAKPLEIAKLVQKNPAVQFLYQKLIGWLNEDQRKDFGFLVDILYSALRCCDNDMERKKVLDDLTKVDLKWNSLLKIIEKACPSSDKHALVTPWLKGDILGEKLVNLADCLCNEDLESRVSSESHFSERWTLLSLVLSQHVKNDYLIGDVYVERIIVRLHETLFKTKKLSEAESSDSSVSFICDVAYNYFSSAKGCLLMPSSEDLLLTLFQLCAQSKEKTHLPDFLICKLKNTWLSGVNLLVHQTDSSYKESTFLHLSALWLKNQVQASSLDINSLQVLLSAVDDLLNTLLESEDSYLMGVYIGSVMPNDSEWEKMRQSLPMQWLHRPLLEGRLSLNYECFKTDFKEQDIKTLPSHLCTSALLSKMVLIALRKETVLENNELEKIIAELLYSLQWCEELDNPPIFLIGFCEILQKMNITYDNLRVLGNTSGLLQLLFNRSREHGTLWSLIIAKLILSRSISSDEVKPHYKRKESFFPLTEGNLHTIQSLCPFLSKEEKKEFSAQCIPALLGWTKKDLCSTNGGFGHLAIFNSCLQTKSIDDGELLHGILKIIISWKKEHEDIFLFSCNLSEASPEVLGVNIEIIRFLSLFLKYCSSPLAESEWDFIMCSMLAWLETTSENQALYSIPLVQLFACVSCDLACDLSAFFDSTTLDTIGNLPVNLISEWKEFFSQGIHSLLLPILVTVTGENKDVSETSFQNAMLKPMCETLTYISKEQLLSHKLPARLVADQKTNLPEYLQTLLNTLAPLLLFRARPVQIAVYHMLYKLMPELPQYDQDNLKSYGDEEEEPALSPPAALMSLLSIQEDLLENVLGCIPVGQIVTIKPLSEDFCYVLGYLLTWKLILTFFKAASSQLRALYSMYLRKTKSLNKLLYHLFRLMPENPTYAETAVEVPNKDPKTFFTEELQLSIRETTMLPYHIPHLACSVYHMTLKDLPAMVRLWWNSSEKRVFNIVDRFTSKYVSSVLSFQEISSVQTSTQLFNGMTVKARATTREVMATYTIEDIVIELIIQLPSNYPLGSIIVESGKRVGVAVQQWRNWMLQLSTYLTHQNGSIMEGLALWKNNVDKRFEGVEDCMICFSVIHGFNYSLPKKACRTCKKKFHSACLYKWFTSSNKSTCPLCRETFF

SEQ ID NO: 7984 - protein, 450 aa, Homo sapiens
MATFSRQEFFQQLLQGCLLPTAQQGLDQIWLLLAICLACRLLWRLGLPSYLKHASTVAGGFFSLYHFFQLHMVWVVLLSLLCYLVLFLCRHSSHRGVFLSVTILIYLLMGEMHMVDTVTWHKMRGAQMIVAMKAVSLGFDLDRGEVGTVPSPVEFMGYLYFVGTIVFGPWISFHSYLQAVQGRPLSCRWLQKVARSLALALLCLVLSTCVGPYLFPYFIPLNGDRLLRKWLRAYESAVSFHFSNYFVGFLSEATATLAGAGFTEEKDHLEWDLTVSKPLNVELPRSMVEVVTSWNLPMSYWLNNYVFKNALRLGTFSAVLVTYAASALLHGFSFHLAAVLLSLAFITYVEHVLRKRLARILSACVLSKRCPPDCSHQHRLGLGVRALNLLFGALAIFHLAYLGSLFDVDVDDTTEEQGYGMAYTVHKWSELSWASHWVTFGCWIFYRLIG

SEQ ID NO: 7985 - protein, 971 aa, Homo sapiens
MLRRPAPALAPAARLLLAGLLCGGGVWAARVNKHKPWLEPTYHGIVTENDNTVLLDPPLIALDKDAPLRFAGEICGFKIHGQNVPFDAVVVDKSTGEGVIRSKEKLDCELQKDYSFTIQAYDCGKGPDGTNVKKSHKATVHIQVNDVNEYAPVFKEKSYKATVIEGKQYDSILRVEAVDADCSPQFSQICSYEIITPDVPFTVDKDGYIKNTEKLNYGKEHQYKLTVTAYDCGKKRATEDVLVKISIKPTCTPGWQGWNNRIEYEPGTGALAVFPNIHLETCDEPVASVQATVELETSHIGKGCDRDTYSEKSLHRLCGAAAGTAELLPSPSGSLNWTMGLPTDNGHDSDQVFEFNGTQAVRIPDGVVSVSPKEPFTISVWMRHGPFGRKKETILCSSDKTDMNRHHYSLYVHGCRLIFLFRQDPSEEKKYRPAEFHWKLNQVCDEEWHHYVLNVEFPSVTLYVDGTSHEPFSVTEDYPLHPSKIETQLVVGACWQEFSGVENDNETEPVTVASAGGDLHMTQFFRGNLAGLTLRSGKLADKKVIDCLYTCKEGLDLQVLEDSGRGVQIQAHPSQLVLTLEGEDLGELDKAMQHISYLNSRQFPTPGIRRLKITSTIKCFNEATCISVPPVDGYVMVLQPEEPKISLSGVHHFARAASEFESSEGVFLFPELRIISTITREVEPEGDGAEDPTVQESLVSEEIVHDLDTCEVTVEGEELNHEQESLEVDMARLQQKGIEVSSSELGMTFTGVDTMASYEEVLHLLRYRNWHARSLLDRKFKLICSELNGRYISNEFKVEVNVIHTANPMEHANHMAAQPQFVHPEHRSFVDLSGHNLANPHPFAVVPSTATVVIVVCVSFLVFMIILGVFRIRAAHRRTMRDQDTGKENEMDWDDSALTITVNPMETYEDQHSSEEEEEEEEEEESEDGEEEDDITSAESESSEEEEGEQGDPQNATRQQQLEWDDSTLSY

SEQ ID NO: 7986 - protein, 500 aa, Homo sapiens
MATAASNPYLPGNSLLAAGSIVHSDAAGAGGGGGGGGGGGGGGAGGGGGGMQPGSAAVTSGAYRGDPSSVKMVQSDFMQGAMAASNGGHMLSHAHQWVTALPHAAAAAAAAAAAAVEASSPWSGSAVGMAGSPQQPPQPPPPPPQGPDVKGGAGRDDLHAGTALHHRGPPHLGPPPPPPHQGHPGGWGAAAAAAAAAAAAAAAAHLPSMAGGQQPPPQSLLYSQPGGFTVNGMLSAPPGPGGGGGGAGGGAQSLVHPGLVRGDTPELAEHHHHHHHHAHPHPPHPHHAQGPPHHGGGGGGAGPGLNSHDPHSDEDTPTSDDLEQFAKQFKQRRIKLGFTQADVGLALGTLYGNVFSQTTICRFEALQLSFKNMCKLKPLLNKWLEEADSSTGSPTSIDKIAAQGRKRKKRTSIEVSVKGALESHFLKCPKPSAQEITNLADSLQLEKEVVRVWFCNRRQKEKRMTPPGIQQQTPDDVYSQVGTVSADTPPPHHGLQTSVQ

SEQ ID NO: 7987 - protein, 390 aa, Homo sapiens
MRGDRGRGRGGRFGSRGGPGGGFRPFVPHIPFDFYLCEMAFPRVKPAPDETSFSEALLKRNQDLAPNSAEQASILSLVTKINNVIDNLIVAPGTFEVQIEEVRQVGSYKKGTMTTGHNVADLVVILKILPTLEAVAALGNKVVESLRAQDPSEVLTMLTNETGFEISSSDATVKILITTVPPNLRKLDPELHLDIKVLQSALAAIRHARWFEENASQSTVKVLIRLLKDLRIRFPGFEPLTPWILDLLGHYAVMNNPTRQPLALNVAYRRCLQILAAGLFLPGSVGITDPCESGNFRVHTVMTLEQQDMVCYTAQTLVRILSHGGFRKILGQEGDASYLASEISTWDGVIVTPSEKAYEKPPEKKEGEEEEENTEEPPQGEEEESMETQE

SEQ ID NO: 7988 - protein, 1173 aa, Homo sapiens
MSRGSIEIPLRDTDEVIELDFDQLPEGDEVISILKQEHTQLHIWIALALEYYKQGKTEEFVKLLEAARIDGNLDYRDHEKDQMTCLDTLAAYYVQQARKEKNKDNKKDLITQATLLYTMADKIIMYDQNHLLGRACFCLLEGDKMDQADAQFHFVLNQSPNNIPALLGKACISFNKKDYRGALAYYKKALRTNPGCPAEVRLGMGHCFVKLNKLEKARLAFSRALELNSKCVGALVGLAVLELNNKEADSIKNGVQLLSRAYTIDPSNPMVLNHLANHFFFKKDYSKVQHLALHAFHNTEVEAMQAESCYQLARSFHVQEDYDQAFQYYYQATQFASSSFVLPFFGLGQMYIYRGDKENASQCFEKVLKAYPNNYETMKILGSLYAASEDQEKRDIAKGHLKKVTEQYPDDVEAWIELAQILEQTDIQGALSAYGTATRILQEKVQADVPPEILNNVGALHFRLGNLGEAKKYFLASLDRAKAEAEHDEHYYNAISVTTSYNLARLYEAMCEFHEAEKLYKNILREHPNYVDCYLRLGAMARDKGNFYEASDWFKEALQINQDHPDAWSLIGNLHLAKQEWGPGQKKFERILKQPSTQSDTYSMLALGNVWLQTLHQPTRDREKEKRHQDRALAIYKQVLRNDAKNLYAANGIGAVLAHKGYFREARDVFAQVREATADISDVWLNLAHIYVEQKQYISAVQMYENCLRKFYKHQNTEVVLYLARALFKCGKLQECKQTLLKARHVAPSDTVLMFNVALVLQRLATSVLKDEKSNLKEVLNAVKELELAHRYFSYLSKVGDKMRFDLALAATEARQCSDLLSQAQYHVARARKQDEEERELRAKQEQEKELLRQKLLKEQEEKRLREKEEQKKLLEQRAQYVEKTKNILMFTGETEATKEKKRGGGGGRRSKKGGEFDEFVNDDTDDDLPISKKKKRRKGSGSEQEGEDEEGGERKKKKRRRHPKGEEGSDDDETENGPKPKKRRPPKAEKKKAPKPERLPPSMKGKIKSKAIISSSDDSSDEDKLKIADEGHPRNSNSNSDSDEDEQRKKCASSESDSDENQNKSGSEAGSPRRPRRQRSDQDSDSDQPSRKRRPSGSEQSDNESVQSGRSHSGVSENDSRPASPSAESDHESERGSDNEGSGQGSGNESEPEGSNNEASDRGSEHGSDDSD

SEQ ID NO: 7989 - protein, 643 aa, Homo sapiens
MGQESSKPVWPNPTGGYQSNTGRRYGRRHAYVSFRPPTSQRERIASQRKTNSEVPMHRSAPSQTTKRSRSPFSTTRRSWDDSESSGTNLNIDNEDYSRYPPREYRASGSRRGMAYGHIDSYGADDSEEEGAGPVERPPVRGKTGKFKDDKLYDPEKGARSLAGPPPHFSSFSRDVREERDKLDPVPAARCSASRADFLPQSSVASQSSSEGKLATKGDSSERERREQNLPARPSRAPVSICGGGENTSKSAEEPVVRPKIRNLASPNCVKPKIFFDTDDDDDMPHSTSRWRDTANDNEGHSDGLARRGRGESSSGYPEPKYPEDKREARSDQVKPEKVPRRRRTMADPDFWTHSDDYYKYCDEDSDSDKEWIAALRRKYRSREQTLSSSGESWETLPGKEEREPPQAKVSASTGTSPGPGASASAGAGAGASAGSNGSNYLEEVREPSLQEEQASLEEGEIPWLQYHENDSSSEGDNDSGHELMQPGVFMLDGNNNLEDDSSVSEDLEVDWSLFDGFADGLGVAEAISYVDPQFLTYMALEERLAQAMETALAHLESLAVDVEVANPPASKESIDALPEILVTEDHGAVGQEMCCPICCSEYVKGEVATELPCHHYFHKPCVSIWLQKSGTCPVCRCMFPPPL

SEQ ID NO: 7990 - protein, 1208 aa, Homo sapiens
MDSLPDEFFVRHPAVEDQRKEETENKLEKSSGQLNKQENDIPTDLVPVNLLLEVKKLLNAINTLPKGVVPHIKKFLQEDFSFQTMQREVAANSQNGEEIVPALTLRFLITQLEAALRNIQAGNYTAHQINIGYYLTLLFLYGVALTERGKKEDYTEAENKFLVMKMMIQENEICENFMSLVYFGRGLLRCAQKRYNGGLLEFHKSLQEIGDKNDHWFDIDPTEDEDLPTTFKDLLNNFIKTTESNIMKQTICSYLDCERSCEADILKNTSYKGFFQLMCSKSCCVYFHKICWKKFKNLKYPGENDQSFSGKKCLKEGCTGDMVRMLQCDVPGIVKILFEVVRKDEYITIENLGASYRKLISLKITDTDIRPKISLKFNTKDEMPIFKLDYNYFYHLLHIIIISGTDIVRQIFDEAMPPPLLKKELLIHKNVLESYYNHLWTNHPLGGSWHLLYPPNKELPQSKQFDLCLLLALIKHLNVFPAPKKGWNMEPPSSDISKSADILRLCKYRDILLSEILMNGLTESQFNSIWKKVSDILLRLGMMQEDIDKVKENPIENISLDYHQLSVYLGIPVPEIIQRMLSCYQQGIALQSITGSQRIEIEELQNEEEELSPPLMEYNINVKSHPEIQFAEINKDGTSIPSESSTESLKDLQEVKSKQRKKKKTKNKKNKDSKEDQVPYVVEKEEQLRKEQANPHSVSRLIKDDASDVQEDSAMEDKFYSLDELHILDMIEQGSAGKVTTDYGETEKERLARQRQLYKLHYQCEDFKRQLRTVTFRWQENQMQIKKKDKIIASLNQQVAFGINKVSKLQRQIHAKDNEIKNLKEQLSMKRSQWEMEKHNLESTMKTYVSKLNAETSRALTAEVYFLQCRRDFGLLHLEQTEKECLNQLARVTHMAASNLESLQLKAAVDSWNAIVADVRNKIAFLRTQYNEQINKVKQGFALSTLPPVQLPPPPPSPEILMQQFLGRPLVKESFFRPILTVPQMPAVCPGVVSATGQPRAPLMTGIAWALPAPVGDAVPPSAGLRSDPSIMNWERITDRLKTAFPQQTRKELTDFLRKLKDAYGKSLSELTFDEIVCKISQFIDPKKSQSQGKSVSNVNCVSPSHSPSQPDAAQPPKPAWRPLTSQGPATWEGASNPDEEEEEEEPCVICHENLSPENLSVLPCAHKFHAQCIRPWLMQQGTCPTCRLHVLLPEEFPGHPSRQLPKI

SEQ ID NO: 7991 - protein, 1201 aa, Homo sapiens
MPRGEAPGPGRRGAKDEALGEESGERWSPEFHLQRKLADSSHSEQQDRNRVSEELIMVVQEMKKYFPSERRNKPSTLDALNYALRCVHSVQANSEFFQILSQNGAPQADVSMYSLEELATIASEHTSKNTDTFVAVFSFLSGRLVHISEQAALILNRKKDVLASSHFVDLLAPQDMRVFYAHTARAQLPFWNNWTQRAARYECAPVKPFFCRIRGGEDRKQEKCHSPFRIIPYLIHVHHPAQPELESEPCCLTVVEKIHSGYEAPRIPVNKRIFTTTHTPGCVFLEVDEKAVPLLGYLPQDLIGTSILSYLHPEDRSLMVAIHQKVLKYAGHPPFEHSPIRFCTQNGDYIILDSSWSSFVNPWSRKISFIIGRHKVRTSPLNEDVFATKIKKMNDNDKDITELQEQIYKLLLQPVHVSVSSGYGSLGSSGSQEQLVSIASSSEASGHRVEETKAEQMTLQQVYASVNKIKNLGQQLYIESMTKSSFKPVTGTRTEPNGGGECKTFTSFHQTLKNNSVYTEPCEDLRNDEHSPSYQQINCIDSVIRYLKSYNIPALKRKCISCTNTTSSSSEEDKQNHKADDVQALQAGLQIPAIPKSEMPTNGRSIDTGGGAPQILSTAMLSLGSGISQCGYSSTIVHVPPPETARDATLFCEPWTLNMQPAPLTSEEFKHVGLTAAVLSAHTQKEEQNYVDKFREKILSSPYSSYLQQESRSKAKYSYFQGDSTSKQTRSAGCRKGKHKRKKLPEPPDSSSSNTGSGPRRGAHQNAQPCCPSAASSPHTSSPTFPPAAMVPSQAPYLVPAFPLPAATSPGREYAAPGTAPEGLHGLPLSEGLQPYPAFPFPYLDTFMTVFLPDPPVCPLLSPSFLPCPFLGATASSAISPSMSSAMSPTLDPPPSVTSQRREEEKWEAQSEGHPFITSRSSSPLQLNLLQEEMPRPSESPDQMRRNTCPQTEYCVTGNNGSESSPATTGALSTGSPPRENPSHPTASALSTGSPPMKNPSHPTASALSTGSPPMKNPSHPTASTLSMGLPPSRTPSHPTATVLSTGSPPSESPSRTGSAASGSSDSSIYLTSSVYSSKISQNGQQSQDVQKKETFPNVAEEPIWRMIRQTPERILMTYQVPERVKEVVLKEDLEKLESMRQQQPQFSHGQKEELAKVYNWIQSQTVTQEIDIQACVTCENEDSADGAATSCGQVLVEDSC

SEQ ID NO: 7992 - protein, 1163 aa, Homo sapiens
MVWCLGLAVLSLVISQGADGRGKPEVVSVVGRAGESVVLGCDLLPPAGRPPLHVIEWLRFGFLLPIFIQFGLYSPRIDPDYVGRVRLQKGASLQIEGLRVEDQGWYECRVFFLDQHIPEDDFANGSWVHLTVNSPPQFQETPPAVLEVQELEPVTLRCVARGSPLPHVTWKLRGKDLGQGQGQVQVQNGTLRIRRVERGSSGVYTCQASSTEGSATHATQLLVLGPPVIVVPPKNSTVNASQDVSLACHAEAYPANLTYSWFQDNINVFHISRLQPRVRILVDGSLRLLATQPDDAGCYTCVPSNGLLHPPSASAYLTVLCMPGVIRCPVRANPPLLFVSWTKDGKALQLDKFPGWSQGTEGSLIIALGNEDALGEYSCTPYNSLGTAGPSPVTRVLLKAPPAFIERPKEEYFQEVGRELLIPCSAQGDPPPVVSWTKVGRGLQGQAQVDSNSSLILRPLTKEAHGHWECSASNAVARVATSTNVYVLGTSPHVVTNVSVVALPKGANVSWEPGFDGGYLQRFSVWYTPLAKRPDRMHHDWVSLAVPVGAAHLLVPGLQPHTQYQFSVLAQNKLGSGPFSEIVLSAPEGLPTTPAAPGLPPTEIPPPLSPPRGLVAVRTPRGVLLHWDPPELVPKRLDGYVLEGRQGSQGWEVLDPAVAGTETELLVPGLIKDVLYEFRLVAFAGSFVSDPSNTANVSTSGLEVYPSRTQLPGLLPQPVLAGVVGGVCFLGVAVLVSILAGCLLNRRRAARRRRKRLRQDPPLIFSPTGKSAAPSALGSGSPDSVAKLKLQGSPVPSLRQSLLWGDPAGTPSPHPDPPSSRGPLPLEPICRGPDGRFVMGPTVAAPQERSGREQAEPRTPAQRLARSFDCSSSSPSGAPQPLCIEDISPVAPPPAAPPSPLPGPGPLLQYLSLPFFREMNVDGDWPPLEEPSPAAPPDYMDTRRCPTSSFLRSPETPPVSPRESLPGAVVGAGATAEPPYTALADWTLRERLLPGLLPAAPRGSLTSQSSGRGSASFLRPPSTAPSAGGSYLSPAPGDTSSWASGPERWPRREHVVTVSKRRNTSVDENYEWDSEFPGDMELLETLHLGLASSRLRPEAEPELGVKTPEEGCLLNTAHVTGPEARCAALREEFLAFRRRRDATRARLPAYRQPVPHPEQATLL

SEQ ID NO: 7993 - protein, 563 aa, Homo sapiens
MDVGELLSYQPNRGTKRPRDDEEEEQKMRRKQTGTRERGRYREEEMTVVEEADDDKKRLLQIIDRDGEEEEEEEEPLDESSVKKMILTFEKRSYKNQELRIKFPDNPEKFMESELDLNDIIQEMHVVATMPDLYHLLVELNAVQSLLGLLGHDNTDVSIAVVDLLQELTDIDTLHESEEGAEVLIDALVDGQVVALLVQNLERLDESVKEEADGVHNTLAIVENMAEFRPEMCTEGAQQGLLQWLLKRLKAKMPFDANKLYCSEVLAILLQDNDENRELLGELDGIDVLLQQLSVFKRHNPSTAEEQEMMENLFDSLCSCLMLSSNRERFLKGEGLQLMNLMLREKKISRSSALKVLDHAMIGPEGTDNCHKFVDILGLRTIFPLFMKSPRKIKKVGTTEKEHEEHVCSILASLLRNLRGQQRTRLLNKFTENDSEKVDRLMELHFKYLGAMQVADKKIEGEKHDMVRRGEIIDNDTEEEFYLRRLDAGLFVLQHICYIMAEICNANVPQIRQRVHQILNMRGSSIKIVRHIIKEYAENIGDGRSPEFRENEQKRILGLLENF

SEQ ID NO: 7994 - protein, 124 aa, Homo sapiens
MADEEEDPTFEEENEEIGGGAEGGQGKRKRLFSKELRCMMYGFGDDQNPYTESVDILEDLVIEFITEMTHKAMSIGRQGRVQVEDIVFLIRKDPRKFARVKDLLTMNEELKRARKAFDEANYGS

SEQ ID NO: 7995 - protein, 1043 aa, Homo sapiens
MAMALELQAQASPQPEPEELLIVKLEEDSWGSESKLWEKDRGSVSGPEASRQRFRQFQYRDAAGPHEAFSQLWALCCRWLRPEIRLKEQILELLVLEQFLTILPREVQTWVQARHPESGEEAVALVEDWHRETRTAGQSGLELHTEETRPLKTGEEAQSFQLQPVDPWPEGQSQKKGVKNTCPDLPNHLNAEVAPQPLKESAVLTPRVPTLPKMGSVGDWEVTAESQEALGPGKHAEKELCKDPPGDDCGNSVCLGVPVSKPSNTSEKEQGPEFWGLSLINSGKRSTADYSLDNEPAQALTWRDSRAWEEQYQWDVEDMKVSGVHWGYEETKTFLAILSESPFSEKLRTCHQNRQVYRAIAEQLRARGFLRTLEQCRYRVKNLLRNYRKAKSSHPPGTCPFYEELEALVRARTAIRATDGPGEAVALPRLGYSDAEMDEQEEGGWDPEEMAEDCNGAGLVNVESTQGPRIAGAPALFQSRIAGVHWGYEETKAFLAILSESPFSEKLRTCHQNSQVYRAIAERLCALGFLRTLEQCRYRFKNLLRSYRKAKSSHPPGTCPFYEELDSLMRARAAVRAMGTVREAAGLPRCGQSSAETDAQEAWGEVANEDAVKPSTLCPKAPDMGFEMRHEDEDQISEQDIFEGLPGALSKCPTEAVCQPLDWGEDSENENEDEGQWGNPSQEQWQESSSEEDLEKLIDHQGLYLAEKPYKCDTCMKSFSRSSHFIAHQRIHTGEKPYKCLECGKNFSDRSNLNTHQRIHTGEKPYKCLECGKSFSDHSNLITHQRIHTGEKPYKCGECWKSFNQSSNLLKHQRIHLGGNPDQCSEPGGNFAQSPSFSAHWRNSTEETAPEQPQSISKDLNSPGPHSTNSGEKLYECSECGRSFSKSSALISHQRIHTGEKPYECAECGKSFSKSSTLANHQRTHTGEKPYKCVDCGKCFSERSKLITHQRVHTGEKPYKCLECGKFFRDRSNLITHQRIHTGEKPYKCRECGKCFNQSSSLIIHQRIHTGEKPYKCTECGKDFNNSSHFSAHRRTHAGGKAS

SEQ ID NO: 7996 - protein, 197 aa, Homo sapiens
MPPAGLRRAAPLTAIALLVLGAPLVLAGEDCLWYLDRNGSWHPGFNCEFFTFCCGTCYHRYCCRDLTLLITERQQKHCLAFSPKTIAGIASAVILFVAVVATTICCFLCSCCYLYRRRQQLQSPFEGQEIPMTGIPVQPVYPYPQDPKAGPAPPQPGFIYPPSGPAPQYPLYPAGPPVYNPAAPPPYMPPQPSYPGA

SEQ ID NO: 7997 - protein, 266 aa, Homo sapiens
MQGSTRRMGVMTDVHRRFLQLLMTHGVLEEWDVKRLQTHCYKVHDRNATVDKLEDFINNINSVLESLYIEIKRGVTEDDGRPIYALVNLATTSISKMATDFAENELDLFRKALELIIDSETGFASSTNILNLVDQLKGKKMRKKEAEQVLQKFVQNKWLIEKEGEFTLHGRAILEMEQYIRETYPDAVKICNICHSLLIQGQSCETCGIRMHLPCVAKYFQSNAEPRCPHCNDYWPHEIPKVFDPEKERESGVLKSNKKSLRSRQH

SEQ ID NO: 7998 - protein, 1135 aa, Homo sapiens
MHQMNAKMHFRFVFALLIVSFNHDVLGKNLKYRIYEEQRVGSVIARLSEDVADVLLKLPNPSTVRFRAMQRGNSPLLVVNEDNGEISIGATIDREQLCQKNLNCSIEFDVITLPTEHLQLFHIEVEVLDINDNSPQFSRSLIPIEISESAAVGTRIPLDSAFDPDVGENSLHTYSLSANDFFNIEVRTRTDGAKYAELIVVRELDRELKSSYELQLTASDMGVPQRSGSSILKISISDSNDNSPAFEQQSYIIQLLENSPVGTLLLDLNATDPDEGANGKIVYSFSSHVSPKIMETFKIDSERGHLTLFKQVDYEITKSYEIDVQAQDLGPNSIPAHCKIIIKVVDVNDNKPEININLMSPGKEEISYIFEGDPIDTFVALVRVQDKDSGLNGEIVCKLHGHGHFKLQKTYENNYLILTNATLDREKRSEYSLTVIAEDRGTPSLSTVKHFTVQINDINDNPPHFQRSRYEFVISENNSPGAYITTVTATDPDLGENGQVTYTILESFILGSSITTYVTIDPSNGAIYALRIFDHEEVSQITFVVEARDGGSPKQLVSNTTVVLTIIDENDNVPVVIGPALRNNTAEITIPKGAESGFHVTRIRAIDRDSGVNAELSCAIVAGNEENIFIIDPRSCDIHTNVSMDSVPYTEWELSVIIQDKGNPQLHTKVLLKCMIFEYAESVTSTAMTSVSQASLDVSMIIIISLGAICAVLLVIMVLFATRCNREKKDTRSYNCRVAESTYQHHPKRPSRQIHKGDITLVPTINGTLPIRSHHRSSPSSSPTLERGQMGSRQSHNSHQSLNSLVTISSNHVPENFSLELTHATPAVEQVSQLLSMLHQGQYQPRPSFRGNKYSRSYRYALQDMDKFSLKDSGRGDSEAGDSDYDLGRDSPIDRLLGEGFSDLFLTDGRIPAAMRLCTEECRVLGHSDQCWMPPLPSPSSDYRSNMFIPGEEFPTQPQQQHPHQSLEDDAQPADSGEKKKSFSTFGKDSPNDEDTGDTSTSSLLSEMSSVFQRLLPPSLDTYSECSEVDRSNSLERRKGPLPAKTVGYPQGVAAWAASTHFQNPTTNCGPPLGTHSSVQPSSKWLPAMEEIPENYEEDDFDNVLNHLNDGKHELMDASELVAEINKLLQDVRQS

SEQ ID NO: 7999 - protein, 1023 aa, Homo sapiens
MWDQRLVRLALLQHLRAFYGIKVKGVRGQCDRRRHETAATEIGGKIFGVPFNALPHSAVPEYGHIPSFLVDACTSLEDHIHTEGLFRKSGSVIRLKALKNKVDHGEGCLSSAPPCDIAGLLKQFFRELPEPILPADLHEALLKAQQLGTEEKNKATLLLSCLLADHTVHVLRYFFNFLRNVSLRSSENKMDSSNLAVIFAPNLLQTSEGHEKMSSNTEKKLRLQAAVVQTLIDYASDIGRVPDFILEKIPAMLGIDGLCATPSLEGFEEGEYETPGEYKRKRRQSVGDFVSGALNKFKPNRTPSITPQEERIAQLSESPVILTPNAKRTLPVDSSHGFSSKKRKSIKHNFNFELLPSNLFNSSSTPVSVHIDTSSEGSSQSSLSPVLIGGNHLITAGVPRRSKRIAGKKVCRVESGKAGCFSPKISHKEKVRRSLRLKFNLGKNGREVNGCSGVNRYESVGWRLANQQSLKNRIESVKTGLLFSPDVDEKLPKKGSEKISKSEETLLTPERLVGTNYRMSWTGPNNSSFQEVDANEASSMVENLEVENSLEPDIMVEKSPATSCELTPSNLNNKHNSNITSSPLSGDENNMTKETLVKVQKAFSESGSNLHALMNQRQSSVTNVGKVKLTEPSYLEDSPEENLFETNDLTIVESKEKYEHHTGKGEKCFSERDFSPLQTQTFNRETTIKCYSTQMKMEHEKDIHSNMPKDYLSKQEFSSDEEIKKQQSPKDKLNNKLKENENMMEGNLPKCAAHSKDEARSSFSQQSTCVVTNLSKPRPMRIAKQQSLETCEKTVSESSQMTEHRKVSDHIQWFNKLSLNEPNRIKVKSPLKFQRTPVRQSVRRINSLLEYSRQPTGHKLASLGDTASPLVKSVSCDGALSSCIESASKDSSVSCIKSGPKEQKSMSCEESNIGAISKSSMELPSKSFLKMRKHPDSVNASLRSTTVYKQKILSDGQVKVPLDDLTNHDIVKPVVNNNMGISSGINNRVLRRPSERGRAWYKGSPKHPIGKTQLLPTSKPVDL

SEQ ID NO: 8000 - protein, 341 aa, Homo sapiens
MVGEMETKEKPKPTPDYLMQLMNDKKLMSSLPNFCGIFNHLERLLDEEISRVRKDMYNDTLNGSTEKRSAELPDAVGPIVQLQEKLYVPVKEYPDFNFVGRILGPRGLTAKQLEAETGCKIMVRGKGSMRDKKKEEQNRGKPNWEHLNEDLHVLITVEDAQNRAEIKLKRAVEEVKKLLVPAAEGEDSLKKMQLMELAILNGTYRDANIKSPALAFSLAATAQAAPRIITGPAPVLPPAALRTPTPAGPTIMPLIRQIQTAVMPNGTPHPTAAIVPPGPEAGLIYTPYEYPYTLAPATSILEYPIEPSGVLGAVATKVRRHDMRVHPYQRIVTADRAATGN

SEQ ID NO: 8001 - protein, 1329 aa, Homo sapiens
MDLLSGTYIFAVLLACVVFHSGAQEKNYTIREEMPENVLIGDLLKDLNLSLIPNKSLTTAMQFKLVYKTGDVPLIRIEEDTGEIFTTGARIDREKLCAGIPRDEHCFYEVEVAILPDEIFRLVKIRFLIEDINDNAPLFPATVINISIPENSAINSKYTLPAAVDPDVGINGVQNYELIKSQNIFGLDVIETPEGDKMPQLIVQKELDREEKDTYVMKVKVEDGGFPQRSSTAILQVSVTDTNDNHPVFKETEIEVSIPENAPVGTSVTQLHATDADIGENAKIHFSFSNLVSNIARRLFHLNATTGLITIKEPLDREETPNHKLLVLASDGGLMPARAMVLVNVTDVNDNVPSIDIRYIVNPVNDTVVLSENIPLNTKIALITVTDKDADHNGRVTCFTDHEIPFRLRPVFSNQFLLETAAYLDYESTKEYAIKLLAADAGKPPLNQSAMLFIKVKDENDNAPVFTQSFVTVSIPENNSPGIQLTKVSAMDADSGPNAKINYLLGPDAPPEFSLDCRTGMLTVVKKLDREKEDKYLFTILAKDNGVPPLTSNVTVFVSIIDQNDNSPVFTHNEYNFYVPENLPRHGTVGLITVTDPDYGDNSAVTLSILDENDDFTIDSQTGVIRPNISFDREKQESYTFYVKAEDGGRVSRSSSAKVTINVVDVNDNKPVFIVPPSNCSYELVLPSTNPGTVVFQVIAVDNDTGMNAEVRYSIVGGNTRDLFAIDQETGNITLMEKCDVTDLGLHRVLVKANDLGQPDSLFSVVIVNLFVNESVTNATLINELVRKSTEAPVTPNTEIADVSSPTSDYVKILVAAVAGTITVVVVIFITAVVRCRQAPHLKAAQKNKQNSEWATPNPENRQMIMMKKKKKKKKHSPKNLLLNFVTIEETKADDVDSDGNRVTLDLPIDLEEQTMGKYNWVTTPTTFKPDSPDLARHYKSASPQPAFQIQPETPLNSKHHIIQELPLDNTFVACDSISKCSSSSSDPYSVSDCGYPVTTFEVPVSVHTRPPMKEVVRSCTPMKESTTMEIWIHPQPQSQRRVTFHLPEGSQESSSDGGLGDHDAGSLTSTSHGLPLGYPQEEYFDRATPSNRTEGDGNSDPESTAEITVQPTVEEASDNCTQECLIYGHSDACWMPASLDHSSSSQAQASALCHSPPLSQASTQHHSPRVTQTIALCHSPPVTQTIALCHSPPPIQVSALHHSPPLVQATALHHSPPSAQASALCYSPPLAQAAAISHSSPLPQVIALHRSQAQSSVSLQQGWVQGADGLCSVDQGVQGSATSQFYTMSERLHPSDDSIKVIPLTTFTPRQQARPSRGDSPIMEEHPL

SEQ ID NO: 8002 - protein, 435 aa, Homo sapiens
MLPARCARLLTPHLLLVLVQLSPARGHRTTGPRFLISDRDPQCNLHCSRTQPKPICASDGRSYESMCEYQRAKCRDPTLGVVHRGRCKDAGQSKCRLERAQALEQAKKPQEAVFVPECGEDGSFTQVQCHTYTGYCWCVTPDGKPISGSSVQNKTPVCSGSVTDKPLSQGNSGRKDDGSKPTPTMETQPVFDGDEITAPTLWIKHLVIKDSKLNNTNIRNSEKVYSCDQERQSALEEAQQNPREGIVIPECAPGGLYKPVQCHQSTGYCWCVLVDTGRPLPGTSTRYVMPSCESDARAKTTEADDPFKDRELPGCPEGKKMEFITSLLDALTTDMVQAINSAAPTGGGRFSEPDPSHTLEERVVHWYFSQLDSNSSNDINKREMKPFKRYVKKKAKPKKCARRFTDYCDLNKDKVISLPELKGCLGVSKEVGRLV

SEQ ID NO: 8003 - protein, 453 aa, Homo sapiens
MARKVVSRKRKAPASPGAGSDAQGPQFGWDHSLHKRKRLPPVKRSLVYYLKNREVRLQNETSYSRVLHGYAAQQLPSLLKEREFHLGTLNKVFASQWLNHRQVVCGTKCNTLFVVDVQTSQITKIPILKDREPGGVTQQGCGIHAIELNPSRTLLATGGDNPNSLAIYRLPTLDPVCVGDDGHKDWIFSIAWISDTMAVSGSRDGSMGLWEVTDDVLTKSDARHNVSRVPVYAHITHKALKDIPKEDTNPDNCKVRALAFNNKNKELGAVSLDGYFHLWKAENTLSKLLSTKLPYCRENVCLAYGSEWSVYAVGSQAHVSFLDPRQPSYNVKSVCSRERGSGIRSVSFYEHIITVGTGQGSLLFYDIRAQRFLEERLSACYGSKPRLAGENLKLTTGKGWLNHDETWRNYFSDIDFFPNAVYTHCYDSSGTKLFVAGGPLPSGLHGNYAGLWS

SEQ ID NO: 8004 - protein, 402 aa, Homo sapiens
MPFITYLSGLLTAQMLSDDQLISGVEIRCEEKGRCPSTCHLCRRPGKEQLSPTPVLLEINRVVPLYTLIQDNGTKEAFKSALMSSYWCSGKGDVIDDWCRCDLSAFDANGLPNCSPLLQPVLRLSPTVEPSSTVVSLEWVDVQPAIGTKVSDYILQHKKVDEYTDTDLYTGEFLSFADDLLSGLGTSCVAAGRSHGEVPEVSIYSVIFKCLEPDGLYKFTLYAVDTRGRHSELSTVTLRTACPLVDDNKAEEIADKIYNLYNGYTSGKEQQMAYNTLMEVSASMLFRVQHHYNSHYEKFGDFVWRSEDELGPRKAHLILRRLERVSSHCSSLLRSAYIQSRVETVPYLFCRSEEVRPAGMVWYSILKDTKITCEEKMVSMARNTYGESKGRYYLTLSKVSPF

SEQ ID NO: 8005 - protein, 444 aa, Homo sapiens
MPRSGAPKERPAEPLTPPPSYGHQPQTGSGESSGASGDKDHLYSTVCKPRSPKPAAPAAPPFSSSSGVLGTGLCELDRLLQELNATQFNITDEIMSQFPSSKVASGEQKEDQSEDKKRPSLPSSPSPGLPKASATSATLELDRLMASLSDFRVQNHLPASGPTQPPVVSSTNEGSPSPPEPTGKGSLDTMLGLLQSDLSRRGVPTQAKGLCGSCNKPIAGQVVTALGRAWHPEHFVCGGCSTALGGSSFFEKDGAPFCPECYFERFSPRCGFCNQPIRHKMVTALGTHWHPEHFCCVSCGEPFGDEGFHEREGRPYCRRDFLQLFAPRCQGCQGPILDNYISALSALWHPDCFVCRECFAPFSGGSFFEHEGRPLCENHFHARRGSLCATCGLPVTGRCVSALGRRFHPDHFTCTFCLRPLTKGSFQERAGKPYCQPCFLKLFG

SEQ ID NO: 8006 - protein, 1629 aa, Homo sapiens
MERCSRCHRLLLLLPLVLGLSAAPGWAGAPPVDVLRALRFPSLPDGVRRAKGICPADVAYRVARPAQLSAPTRQLFPGGFPKDFSLLTVVRTRPGLQAPLLTLYSAQGVRQLGLELGRPVRFLYEDQTGRPQPPSQPVFRGLSLADGKWHRVAVAVKGQSVTLIVDCKKRVTRPLPRSARPVLDTHGVIIFGARILDEEVFEGDVQELAIVPGVQAAYESCEQKELECEGGQRERPQNQQPHRAQRSPQQQPSRLHRPQNQEPQSQAAHGPRGLKGEKGEPAVLEPGMLVEGPPGPEGPAGLIGPPGIQGNPGPVGDPGERGPPGRAGLPGSDGAPGPPGTSLMLPFRFGSGGGDKGPVVAAQEAQAQAILQQARLALRGPPGPMGYTGRPGPLGQPGSPGLKGESGDLGPQGPRGPQGLTGPPGKAGRRGRAGADGARGMPGDPGVKGDRGFDGLPGLPGEKGHRGDTGAQGLPGPPGEDGERGDDGEIGPRGLPGESGPRGLLGPKGPPGIPGPPGVRGMDGPQGPKGSLGPQGEPGPPGQQGTPGTQGLPGPQGAIGPHGEKGPQGKPGLPGMPGSDGPPGHPGKEGPPGTKGNQGPSGPQGPLGYPGPRGVKGVDGIRGLKGHKGEKGEDGFPGFKGDIGVKGDRGEVGVPGSRGEDGPEGPKGRTGPTGDPGPPGLMGEKGKLGVPGLPGYPGRQGPKGSLGFPGFPGASGEKGARGLSGKSGPRGERGPTGPRGQRGPRGATGKSGAKGTSGGDGPHGPPGERGLPGPQGPNGFPGPKGPPGPPGKDGLPGHPGQRGEVGFQGKTGPPGPPGVVGPQGAAGETGPMGERGHPGPPGPPGEQGLPGTAGKEGTKGDPGPPGAPGKDGPAGLRGFPGERGLPGTAGGPGLKGNEGPSGPPGPAGSPGERGAAGSGGPIGPPGRPGPQGPPGAAGEKGVPGEKGPIGPTGRDGVQGPVGLPGPAGPPGVAGEDGDKGEVGDPGQKGTKGNKGEHGPPGPPGPIGPVGQPGAAGADGEPGARGPQGHFGAKGDEGTRGFNGPPGPIGLQGLPGPSGEKGETGDVGPMGPPGPPGPRGPAGPNGADGPQGPPGGVGNLGPPGEKGEPGESGSPGIQGEPGVKGPRGERGEKGESGQPGEPGPPGPKGPTGDDGPKGNPGPVGFPGDPGPPGEGGPRGQDGAKGDRGEDGEPGQPGSPGPTGENGPPGPLGKRGPAGSPGSEGRQGGKGAKGDPGAIGAPGKTGPVGPAGPAGKPGPDGLRGLPGSVGQQGRPGATGQAGPPGPVGPPGLPGLRGDAGAKGEKGHPGLIGLIGPPGEQGEKGDRGLPGPQGSPGQKGEMGIPGASGPIGPGGPPGLPGPAGPKGAKGATGPGGPKGEKGVQGPPGHPGPPGEVIQPLPIQMPKKTRRSVDGSRLMQEDEAIPTGGAPGSPGGLEEIFGSLDSLREEIEQMRRPTGTQDSPARTCQDLKLCHPELPDGEYWVDPNQGCARDAFRVFCNFTAGGETCVTPRDDVTQFSYVDSEGSPVGVVQLTFLRLLSVSAHQDVSYPCSGAARDGPLRLRGANEDELSPETSPYVKEFRDGCQTQQGRTVLEVRTPVLEQLPVLDASFSDLGAPPRRGGVLLGPVCFMG

SEQ ID NO: 8007 - protein, 400 aa, Homo sapiens
MTSYSYRQSSATSSFGGLGGGSVRFGPGVAFRAPSIHGGSGGRGVSVSSARFVSSSSSGAYGGGYGGVLTASDGLLAGNEKLTMQNLNDRLASYLDKVRALEAANGELEVKIRDWYQKQGPGPSRDYSHYYTTIQDLRDKILGATIENSRIVLQIDNARLAADDFRTKFETEQALRMSVEADINGLRRVLDELTLARTDLEMQIEGLKEELAYLKKNHEEEISTLRGQVGGQVSVEVDSAPGTDLAKILSDMRSQYEVMAEQNRKDAEAWFTSRTEELNREVAGHTEQLQMSRSEVTDLRRTLQGLEIELQSQLSMKAALEDTLAETEARFGAQLAHIQALISGIEAQLGDVRADSERQNQEYQRLMDIKSRLEQEIATYRSLLEGQEDHYNNLSASKVL

SEQ ID NO: 8008 - protein, 553 aa, Homo sapiens
MPLPWSLALPLLLSWVAGGFGNAASARHHGLLASARQPGVCHYGTKLACCYGWRRNSKGVCEATCEPGCKFGECVGPNKCRCFPGYTGKTCSQDVNECGMKPRPCQHRCVNTHGSYKCFCLSGHMLMPDATCVNSRTCAMINCQYSCEDTEEGPQCLCPSSGLRLAPNGRDCLDIDECASGKVICPYNRRCVNTFGSYYCKCHIGFELQYISGRYDCIDINECTMDSHTCSHHANCFNTQGSFKCKCKQGYKGNGLRCSAIPENSVKEVLRAPGTIKDRIKKLLAHKNSMKKKAKIKNVTPEPTRTPTPKVNLQPFNYEEIVSRGGNSHGGKKGNEEKMKEGLEDEKREEKALKNDIEERSLRGDVFFPKVNEAGEFGLILVQRKALTSKLEHKDLNISVDCSFNHGICDWKQDREDDFDWNPADRDNAIGFYMAVPALAGHKKDIGRLKLLLPDLQPQSNFCLLFDYRLAGDKVGKLRVFVKNSNNALAWEKTTSEDEKWKTGKIQLYQGTDATKSIIFEAERGKGKTGEIAVDGVLLVSGLCPDSLLSVDD

SEQ ID NO: 8009 - protein, 372 aa, Homo sapiens
MKAGATSMWASCCGLLNEVMGTGAVRGQQSAFAGATGPFRFTPNPEFSTYPPAATEGPNIVCKACGLSFSVFRKKHVCCDCKKDFCSVCSVLQENLRRCSTCHLLQETAFQRPQLMRLKVKDLRQYLILRNIPIDTCREKEDLVDLVLCHHGLGSEDDMDTSSLNSSRSQTSSFFTRSFFSNYTAPSATMSSFQGELMDGDQTSRSGVPAQVQSEITSANTEDDDDDDDEDDDDEEENAEDRNPGLSKERVRASLSDLSSLDDVEGMSVRQLKEILARNFVNYSGCCEKWELVEKVNRLYKENEENQKSYGERLQLQDEEDDSLCRICMDAVIDCVLLECGHMVTCTKCGKRMSECPICRQYVVRAVHVFKS

SEQ ID NO: 8010 - protein, 1011 aa, Homo sapiens
MQKPSGLKPPGRGGKHSSPMGRTSTGSASSSAAVAASSKEGSPLHKQSSGPSSSPAAAAAPEKPGPKAAEVGDDFLGDFVVGERVWVNGVKPGVVQYLGETQFAPGQWAGVVLDDPVGKNDGAVGGVRYFECPALQGIFTRPSKLTRQPTAEGSGSDAHSVESLTAQNLSLHSGTATPPLTSRVIPLRESVLNSSVKTGNESGSNLSDSGSVKRGEKDLRLGDRVLVGGTKTGVVRYVGETDFAKGEWCGVELDEPLGKNDGAVAGTRYFQCPPKFGLFAPIHKVIRIGFPSTSPAKAKKTKRMAMGVSALTHSPSSSSISSVSSVASSVGGRPSRSGLLTETSSRYARKISGTTALQEALKEKQQHIEQLLAERDLERAEVAKATSHICEVEKEIALLKAQHEQYVAEAEEKLQRARLLVESVRKEKVDLSNQLEEERRKVEDLQFRVEEESITKGDLELTTVAEKSRVLQLEEELTLRRGEIEELQQCLLHSGPPPPDHPDAAEILRLRERLLSASKEHQRESGVLRDKYEKALKAYQAEVDKLRAANEKYAQEVAGLKDKVQQATSENMGLMDNWKSKLDSLASDHQKSLEDLKATLNSGPGAQQKEIGELKAVMEGIKMEHQLELGNLQAKHDLETAMHVKEKEALREKLQEAQEELAGLQRHWRAQLEVQASQHRLELQEAQDQRRDAELRVHELEKLDVEYRGQAQAIEFLKEQISLAEKKMLDYERLQRAEAQGKQEVESLREKLLVAENRLQAVEALCSSQHTHMIESNDISEETIRTKETVEGLQDKLNKRDKEVTALTSQTEMLRAQVSALESKCKSGEKKVDALLKEKRRLEAELETVSRKTHDASGQLVLISQELLRKERSLNELRVLLLEANRHSPGPERDLSREVHKAEWRIKEQKLKDDIRGLREKLTGLDKEKSLSDQRRYSLIDRSSAPELLRLQHQLMSTEDALRDALDQAQQVEKLMEAMRSCPDKAQTIGNSGSANGIHQQDKAQKQEDKH

SEQ ID NO: 8011 - protein, 134 aa, Homo sapiens
MRQKAVSLFLCYLLLFTCSGVEAGENAGKKKCSESSDSGSGFWKALTFMAVGGGLAVAGLPALGFTGAGIAANSVAASLMSWSAILNGGGVPAGGLVATLQSLGAGGSSVVIGNIGALMGYATHKYLDSEEDEE

SEQ ID NO: 8012 - protein, 1115 aa, Homo sapiens
MRRLSLWWLLSRVCLLLPPPCALVLAGVPSSSSHPQPCQILKRIGHAVRVGAVHLQPWTTAPRAASRAPDDSRAGAQRDEPEPGTRRSPAPSPGARWLGSTLHGRGPPGSRKPGEGARAEALWPRDALLFAVDNLNRVEGLLPYNLSLEVVMAIEAGLGDLPLLPFSSPSSPWSSDPFSFLQSVCHTVVVQGVSALLAFPQSQGEMMELDLVSLVLHIPVISIVRHEFPRESQNPLHLQLSLENSLSSDADVTVSILTMNNWYNFSLLLCQEDWNITDFLLLTQNNSKFHLGSIINITANLPSTQDLLSFLQIQLESIKNSTPTVVMFGCDMESIRRIFEITTQFGVMPPELRWVLGDSQNVEELRTEGLPLGLIAHGKTTQSVFEHYVQDAMELVARAVATATMIQPELALIPSTMNCMEVETTNLTSGQYLSRFLANTTFRGLSGSIRVKGSTIVSSENNFFIWNLQHDPMGKPMWTRLGSWQGGKIVMDYGIWPEQAQRHKTHFQHPSKLHLRVVTLIEHPFVFTREVDDEGLCPAGQLCLDPMTNDSSTLDSLFSSLHSSNDTVPIKFKKCCYGYCIDLLEKIAEDMNFDFDLYIVGDGKYGAWKNGHWTGLVGDLLRGTAHMAVTSFSINTARSQVIDFTSPFFSTSLGILVRTRDTAAPIGAFMWPLHWTMWLGIFVALHITAVFLTLYEWKSPFGLTPKGRNRSKVFSFSSALNICYALLFGRTVAIKPPKCWTGRFLMNLWAIFCMFCLSTYTANLAAVMVGEKIYEELSGIHDPKLHHPSQGFRFGTVRESSAEDYVRQSFPEMHEYMRRYNVPATPDGVEYLKNDPEKLDAFIMDKALLDYEVSIDADCKLLTVGKPFAIEGYGIGLPPNSPLTANISELISQYKSHGFMDMLHDKWYRVVPCGKRSFAVTETLQMGIKHFSGLFVLLCIGFGLSILTTIGEHIVYRLLLPRIKNKSKLQYWLHTSQRLHRAINTSFIEEKQQHFKTKRVEKRSNVGPRQLTVWNTSNLSHDNRRKYIFSDEEGQNQLGIRIHQDIPLPPRRRELPALRTTNGKADSLNVSRNSVMQELSELEKQIQVIRQELQLAVSRKTELEEYQRTSRTCES

SEQ ID NO: 8013 - protein, 508 aa, Homo sapiens
MLLWSLLVIFDAVTEQADSLTLVAPSSVFEGDSIVLKCQGEQNWKIQKMAYHKDNKELSVFKKFSDFLIQSAVLSDSGNYFCSTKGQLFLWDKTSNIVKIKVQELFQRPVLTASSFQPIEGGPVSLKCETRLSPQRLDVQLQFCFFRENQVLGSGWSSSPELQISAVWSEDTGSYWCKAETVTHRIRKQSLQSQIHVQRIPISNVSLEIRAPGGQVTEGQKLILLCSVAGGTGNVTFSWYREATGTSMGKKTQRSLSAELEIPAVKESDAGKYYCRADNGHVPIQSKVVNIPVRIPVSRPVLTLRSPGAQAAVGDLLELHCEALRGSPPILYQFYHEDVTLGNSSAPSGGGASFNLSLTAEHSGNYSCEANNGLGAQCSEAVPVSISGPDGYRRDLMTAGVLWGLFGVLGFTGVALLLYALFHKISGESSATNEPRGASRPNPQEFTYSSPTPDMEELQPVYVNVGSVDVDVVYSQVWSMQQPESSANIRTLLENKDSQVIYSSVKKS

SEQ ID NO: 8014 - protein, 88 aa, Homo sapiens
MVPLCQVEVLYFAKSAEITGVRSETISVPQEIKALQLWKEIETRHPGLADVRNQIIFAVRQEYVELGDQLLVLQPGDEIAVIPPISGG

SEQ ID NO: 8015 - protein, 124 aa, Homo sapiens
MYKLASCCLLFIGFLNPLLSLPLLDSREISFQLSAPHEDARLTPEELERASLLQILPEMLGAERGDILRKADSSTNIFNPRGNLRKFQDFSGQDPNILLSHLLARIWKPYKKRETPDCFWKYCV

SEQ ID NO: 8016 - protein, 202 aa, Homo sapiens
MSLAGLVLAPFTAGTSLALTAAGVGLGAASAVTGITTSIVEHSYTSSAEAEASRLTATSIDRLKVFKEVMRDITPNLLSLLNNYYEATQTIGSEIRAIRQARARARLPVTTWRISAGSGGQAERTIAGTTRAVSRGARILSATTSGIFLALDVVNLVYESKHLHEGAKSASAEELRRQAQELEENLMELTQIYQRLNPCHTH

SEQ ID NO: 8017 - protein, 839 aa, Homo sapiens
MAQFDTEYQRLEASYSDSPPGEEDLLVHVAEGSKSPWHHIENLDLFFSRVYNLHQKNGFTCMLIGEIFELMQFLFVVAFTTFLVSCVDYDILFANKMVNHSLHPTEPVKVTLPDAFLPAQVCSARIQENGSLITILVIAGVFWIHRLIKFIYNICCYWEIHSFYLHALRIPMSALPYCTWQEVQARIVQTQKEHQICIHKRELTELDIYHRILRFQNYMVALVNKSLLPLRFRLPGLGEAVFFTRGLKYNFELILFWGPGSLFLNEWSLKAEYKRGGQRLELAQRLSNRILWIGIANFLLCPLILIWQILYAFFSYAEVLKREPGALGARCWSLYGRCYLRHFNELEHELQSRLNRGYKPASKYMNCFLSPLLTLLAKNGAFFAGSILAVLIALTIYDEDVLAVEHVLTTVTLLGVTVTVCRSFIPDQHMVFCPEQLLRVILAHIHYMPDHWQGNAHRSQTRDEFAQLFQYKAVFILEELLSPIVTPLILIFCLRPRALEIIDFFRNFTVEVVGVGDTCSFAQMDVRQHGHPQWLSAGQTEASVYQQAEDGKTELSLMHFAITNPGWQPPRESTAFLGFLKEQVQRDGAAASLAQGGLLPENALFTSIQSLQSESEPLSLIANVVAGSSCRGPPLPRDLQGSRHRAEVASALRSFSPLQPGQAPTGRAHSTMTGSGVDARTASSGSSVWEGQLQSLVLSEYASTEMSLHALYMHQLHKQQAQAEPERHVWHRRESDESGESAPDEGGEGARAPQSIPRSASYPCAAPRPGAPETTALHGGFQRRYGGITDPGTVPRVPSHFSRLPLGGWAEDGQSASRHPEPVPEEGSEDELPPQVHKV

SEQ ID NO: 8018 - protein, 1516 aa, Homo sapiens
MDSPPKLTGETLIVHHIPLVHCQVPDRQCCGGAGGGGGSTRPNPFCPPELGITQPDQDLGQADSLLFSSLHSTPGGTARSIDSTKSRSRDGRGPGAPKRHNPFLLQEGVGEPGLGDLYDDSIGDSATQQSFHLHGTGQPNFHLSSFQLPPSGPRVGRPWGTTRSRAGVVEGQEQEPVMTLDTQQCGTSHCCRPELEAETMELDECGGPGGSGSGGGASDTSGFSFDQEWKLSSDESPRNPGCSGSGDQHCRCSSTSSQSEAADQSMGYVSDSSCNSSDGVLVTFSTLYNKMHGTPRANLNSAPQSCSDSSFCSHSDPGAFYLDLQPSPFESKMSYESHHPESGGREGGYGCPHASSPELDANCNSYRPHCEPCPAVADLTACFQSQARLVVATQNYYKLVTCDLSSQSSPSPAGSSITSCSEEHTKISPPPGPGPDPGPSQPSEYYLFQKPEVQPEEQEAVSSSTQAAAAVGPTVLEGQVYTNTSPPNLSTGRQRSRSYDRSLQRSPPVRLGSLERMLSCPVRLSEGPAAMAGPGSPPRRVTSFAELAKGRKKTGGSGSPPLRVSVGDSSQEFSPIQEAQQDRGAPLDEGTCCSHSLPPMPLGPGMDLLGPDPSPPWSTQVCQGPHSSEMPPAGLRATGQGPLAQLMDPGPALPGSPANSHTQRDARARADGGGTESRPVLRYSKEQRPTTLPIQPFVFQHHFPKQLAKARALHSLSQLYSLSGCSRTQQPAPLAAPAAQVSVPAPSGEPQASTPRATGRGARKAGSEPETSRPSPLGSYSPIRSVGPFGPSTDSSASTSCSPPPEQPTATESLPPWSHSCPSAVRPATSQQPQKEDQKILTLTEYRLHGTGSLPPLGSWRSGLSRAESLARGGGEGSMATRPSNANHLSPQALKWREYRRKNPLGPPGLSGSLDRRSQEARLARRNPIFEFPGSLSAASHLNCRLNGQAVKPLPLTCPDFQDPFSLTEKPPAEFCLSPDGSSEAISIDLLQKKGLVKAVNIAVDLIVAHFGTSRDPGVKAKLGNSSVSPNVGHLVLKYLCPAVRAVLEDGLKAFVLDVIIGQRKNMPWSVVEASTQLGPSTKVLHGLYNKVSQFPELTSHTMRFNAFILGLLNIRSLEFWFNHLYNHEDIIQTHYQPWGFLSAAHTVCPGLFEELLLLLQPLALLPFSLDLLFQHRLLQSGQQQRQHKELLRVSQDLLLSAHSTLQLARARGQEGPGDVDRAAQGERVKGVGASEGGEEEEEEEETEEVAEAAGGSGRARWARGGQAGWWYQLMQSSQVYIDGSIEGSRFPRGSSNSSSEKKKGAGGGGPPQAPPPREGVVEGAEACPASEEALGRERGWPFWMGSPPDSVLAELRRSREREGPAASPAENEEGASEPSPGGIKWGHLFGSRKAQREARPTNRLPSDWLSLDKSMFQLVAQTVGSRREPEPKESLQEPHSPALPSSPPCEVQALCHHLATGPGQLSFHKGDILRVLGRAGGDWLRCSRGPDSGLVPLAYVTLTPTPSPTPGSSQN

SEQ ID NO: 8019 - protein, 645 aa, Homo sapiens
MNASSEGESFAGSVQIPGGTTVLVELTPDIHICGICKQQFNNLDAFVAHKQSGCQLTGTSAAAPSTVQFVSEETVPATQTQTTTRTITSETQTITVSAPEFVFEHGYQTYLPTESNENQTATVISLPAKSRTKKPTTPPAQKRLNCCYPGCQFKTAYGMKDMERHLKIHTGDKPHKCEVCGKCFSRKDKLKTHMRCHTGVKPYKCKTCDYAAADSSSLNKHLRIHSDERPFKCQICPYASRNSSQLTVHLRSHTASELDDDVPKANCLSTESTDTPKAPVITLPSEAREQMATLGERTFNCCYPGCHFKTVHGMKDLDRHLRIHTGDKPHKCEFCDKCFSRKDNLTMHMRCHTSVKPHKCHLCDYAAVDSSSLKKHLRIHSDERPYKCQLCPYASRNSSQLTVHLRSHTGDTPFQCWLCSAKFKISSDLKRHMIVHSGEKPFKCEFCDVRCTMKANLKSHIRIKHTFKCLHCAFQGRDRADLLEHSRLHQADHPEKCPECSYSCSSAAALRVHSRVHCKDRPFKCDFCSFDTKRPSSLAKHVDKVHRDEAKTENRAPLGKEGLREGSSQHVAKIVTQRAFRCETCGASFVRDDSLRCHKKQHSDQSENKNSDLVTFPPESGASGQLSTLVSVGQLEAPLEPSQDL

SEQ ID NO: 8020 - protein, 1028 aa, Homo sapiens
MRAARALLPLLLQACWTAAQDEPETPRAVAFQDCPVDLFFVLDTSESVALRLKPYGALVDKVKSFTKRFIDNLRDRYYRCDRNLVWNAGALHYSDEVEIIQGLTRMPGGRDALKSSVDAVKYFGKGTYTDCAIKKGLEQLLVGGSHLKENKYLIVVTDGHPLEGYKEPCGGLEDAVNEAKHLGVKVFSVAITPDHLEPRLSIIATDHTYRRNFTAADWGQSRDAEEAISQTIDTIVDMIKNNVEQVCCSFECQPARGPPGLRGDPGFEGERGKPGLPGEKGEAGDPGRPGDLGPVGYQGMKGEKGSRGEKGSRGPKGYKGEKGKRGIDGVDGVKGEMGYPGLPGCKGSPGFDGIQGPPGPKGDPGAFGLKGEKGEPGADGEAGRPGSSGPSGDEGQPGEPGPPGEKGEAGDEGNPGPDGAPGERGGPGERGPRGTPGTRGPRGDPGEAGPQGDQGREGPVGVPGDPGEAGPIGPKGYRGDEGPPGSEGARGAPGPAGPPGDPGLMGERGEDGPAGNGTEGFPGFPGYPGNRGAPGINGTKGYPGLKGDEGEAGDPGDDNNDIAPRGVKGAKGYRGPEGPQGPPGHQGPPGPDECEILDIIMKMCSCCECKCGPIDLLFVLDSSESIGLQNFEIAKDFVVKVIDRLSRDELVKFEPGQSYAGVVQYSHSQMQEHVSLRSPSIRNVQELKEAIKSLQWMAGGTFTGEALQYTRDQLLPPSPNNRIALVITDGRSDTQRDTTPLNVLCSPGIQVVSVGIKDVFDFIPGSDQLNVISCQGLAPSQGRPGLSLVKENYAELLEDAFLKNVTAQICIDKKCPDYTCPITFSSPADITILLDGSASVGSHNFDTTKRFAKRLAERFLTAGRTDPAHDVRVAVVQYSGTGQQRPERASLQFLQNYTALASAVDAMDFINDATDVNDALGYVTRFYREASSGAAKKRLLLFSDGNSQGATPAAIEKAVQEAQRAGIEIFVVVVGRQVNEPHIRVLVTGKTAEYDVAYGESHLFRVPSYQALLRGVFHQTVSRKVALG

SEQ ID NO: 8021 - protein, 1040 aa, Homo sapiens
MLEDISEEDIWEYKSKRKPKRVDPNNGSKNILKSVEKATDGKYQSKRSRNRKRAAEAKEVKDHEVPLGNAGCQTSVASSQNSSCGDGIQQTQDKETTPGKLCRTQKSQHVSPKIRPVYDGYCPNCQMPFSSLIGQTPRWHVFECLDSPPRSETECPDGLLCTSTIPFHYKRYTHFLLAQSRAGDHPFSSPSPASGGSFSETKSGVLCSLEERWSSYQNQTDNSVSNDPLLMTQYFKKSPSLTEASEKISTHIQTSQQALQFTDFVENDKLVGVALRLANNSEHINLPLPENDFSDCEISYSPLQSDEDTHDIDEKPDDSQEQLFFTESSKDGSLEEDDDSCGFFKKRHGPLLKDQDESCPKVNSFLTRDKYDEGLYRFNSLNDLSQPISQNNESTLPYDLACTGGDFVLFPPALAGKLAASVHQATKAKPDEPEFHSAQSNKQKQVIEESSVYNQVSLPLVKSLMLKPFESQVEGYLSSQPTQNTIRKLSSENLNAKNNTNSACFCRKALEGVPVGKATILNTENLSSTPAPKYLKILPSGLKYNARHPSTKVMKQMDIGVYFGLPPKRKEEKLLGESALEGINLNPVPSPNQKRSSQCKRKAEKSLSDLEFDASTLHESQLSVELSSERSQRQKKRCRKSNSLQEGACQKRSDHLINTESEAVNLSKVKVFTKSAHGGLQRGNKKIPESSNVGGSRKKTCPFYKKIPGTGFTVDAFQYGVVEGCTAYFLTHFHSDHYAGLSKHFTFPVYCSEITGNLLKNKLHVQEQYIHPLPLDTECIVNGVKVVLLDANHCPGAVMILFYLPNGTVILHTGDFRADPSMERSLLADQKVHMLYLDTTYCSPEYTFPSQQEVIRFAINTAFEAVTLNPHALVVCGTYSIGKEKVFLAIADVLGSKVGMSQEKYKTLQCLNIPEINSLITTDMCSSLVHLLPMMQINFKGLQSHLKKCGGKYNQILAFRPTGWTHSNKFTRIADVIPQTKGNISIYGIPYSEHSSYLEMKRFVQWLKPQKIIPTVNVGTWKSRSTMEKYFREWKLEAGY

SEQ ID NO: 8022 - protein, 563 aa, Homo sapiens
MANAEVSVPVGDVVVVPTEGNEGENPEDTKTQVILQLQPVQQGIYEAGSENNTAVVAVETHTIHKIEEGIDTGTIEANEDMEIAYPITCGESKAILLWKKFVCPGINVKCVKFNDQLISPKHFVHLAGKSTLKDWKRAIRLGGIMLRKMMDSGQIDFYQHDKVCSNTCRSTKFDLLISSARAPVPGQQTSVVQTPTSADGSITQIAISEESMEEAGLEWNSALTAAVTMATEEGVKKDSEEISEDTLMFWKGIADVGLMEEVVCNIQKEIEELLRGVQQRLIQAPFQVTDAAVLNNVAHTFGLMDTVKKVLDNRRNQVEQGEEQFLYTLTDLERQLEEQKKQGQDHRLKSQTVQNVVLMPVSTPKPPKRPRLQRPASTTVLSPSPPVQQPQFTVISPITITPVGQSFSMGNIPVATLSQGSSPVTVHTLPSGPQLFRYATVVSSAKSSSPDTVTIHPSSSLALLSSTAMQDGSTLGNMTTMVSPVELVAMESGLTSAIQAVESTSEDGQTIIEIDPAPDPEAEDTEGKAVILETELRTEEKVVAEMEEHQHQVHNVEIVVLED

SEQ ID NO: 8023 - protein, 581 aa, Homo sapiens
MGFNVIRLLSGSAVALVIAPTVLLTMLSSAERGCPKGCRCEGKMVYCESQKLQEIPSSISAGCLGLSLRYNSLQKLKYNQFKGLNQLTWLYLDHNHISNIDENAFNGIRRLKELILSSNRISYFLNNTFRPVTNLRNLDLSYNQLHSLGSEQFRGLRKLLSLHLRSNSLRTIPVRIFQDCRNLELLDLGYNRIRSLARNVFAGMIRLKELHLEHNQFSKLNLALFPRLVSLQNLYLQWNKISVIGQTMSWTWSSLQRLDLSGNEIEAFSGPSVFQCVPNLQRLNLDSNKLTFIGQEILDSWISLNDISLAGNIWECSRNICSLVNWLKSFKGLRENTIICASPKELQGVNVIDAVKNYSICGKSTTERFDLARALPKPTFKPKLPRPKHESKPPLPPTVGATEPGPETDADAEHISFHKIIAGSVALFLSVLVILLVIYVSWKRYPASMKQLQQRSLMRRHRKKKRQSLKQMTPSTQEFYVDYKPTNTETSEMLLNGTGPCTYNKSGSRECEIPLSMNVSTFLAYDQPTISYCGVHHELLSHKSFETNAQEDTMETHLETELDLSTITTAGRISDHKQQLA

SEQ ID NO: 8024 - protein, 761 aa, Homo sapiens
MLSLKKYLTEGLLQFTILLSLIGVRVDVDTYLTSQLPPLREIILGPSSAYTQTQFHNLRNTLDGYGIHPKSIDLDNYFTARRLLSQVRALDRFQVPTTEVNAWLVHRDPEGSVSGSQPNSGLALESSSGLQDVTGPDNGVRESETEQGFGEDLEDLGAVAPPVSGDLTKEDIDLGAGREVFDYSHRQKEQDVEKELRDGGEQDTWAGEGAEALARNLLVDGETGESFPAQVPSGEDQTALSLEECLRLLEATCPFGENAEFPADISSITEAVPSESEPPALQNNLLSPLLTGTESPFDLEQQWQDLMSIMEMQAMEVNTSASEILYSAPPGDPLSTNYSLAPNTPINQNVSLHQASLGGCSQDFLLFSPEVESLPVASSSTLLPLAPSNSTSLNSTFGSTNLTGLFFPPQLNGTANDTAGPELPDPLGGLLDEAMLDEISLMDLAIEEGFNPVQASQLEEEFDSDSGLSLDSSHSPSSLSSSEGSSSSSSSSSSSSSSASSSASSSFSEEGAVGYSSDSETLDLEEAEGAVGYQPEYSKFCRMSYQDPAQLSCLPYLEHVGHNHTYNMAPSALDSADLPPPSALKKGSKEKQADFLDKQMSRDEHRARAMKIPFTNDKIINLPVEEFNELLSKYQLSEAQLSLIRDIRRRGKNKMAAQNCRKRKLDTILNLERDVEDLQRDKARLLREKVEFLRSLRQMKQKVQSLYQEVFGRLRDENGRPYSPSQYALQYAGDGSVLLIPRTMADQQARRQERKPKDRRK

SEQ ID NO: 8025 - protein, 567 aa, Homo sapiens
MWLRAFILATLSASAAWGHPSSPPVVDTVHGKVLGKFVSLEGFAQPVAIFLGIPFAKPPLGPLRFTPPQPAEPWSFVKNATSYPPMCTQDPKAGQLLSELFTNRKENIPLKLSEDCLYLNIYTPADLTKKNRLPVMVWIHGGGLMVGAASTYDGLALAAHENVVVVTIQYRLGIWGFFSTGDEHSRGNWGHLDQVAALRWVQDNIASFGGNPGSVTIFGESAGGESVSVLVLSPLAKNLFHRAISESGVALTSVLVKKGDVKPLAEQIAITAGCKTTTSAVMVHCLRQKTEEELLETTLKMKFLSLDLQGDPRESQPLLGTVIDGMLLLKTPEELQAERNFHTVPYMVGINKQEFGWLIPMQLMSYPLSEGQLDQKTAMSLLWKSYPLVCIAKELIPEATEKYLGGTDDTVKKKDLFLDLIADVMFGVPSVIVARNHRDAGAPTYMYEFQYRPSFSSDMKPKTVIGDHGDELFSVFGAPFLKEGASEEEIRLSKMVMKFWANFARNGNPNGEGLPHWPEYNQKEGYLQIGANTQAAQKLKDKEVAFWTNLFAKKAVEKPPQTEHIEL

SEQ ID NO: 8026 - protein, 370 aa, Homo sapiens
MPTETLQTGSMVKPVSPAGTFTSAVPLRILNKGPDYFRRQAEPNPKRLSAVERLEADKAKYVKSQEVINAKQEPVKPAVLAKPPVCPAAKRALGSPTLKVFGNHAKTESGVQRENLKLEILKNIINSSEGSSSGSGHKHSSRNWPPHRSEATDLHRHSFAESLKVYPTQGRRSPQEGGSHVGRRLLEQSAESFLHVSHSSSDIRKVTSVKPLKAIPCSSSAPPLPPKPKIAAIASMKSPEADPVEPACGVSRRPSLQRSKSDLSDRYFRVDADVERFFNYCGLDPEELENLGMENFARANSDIISLNFRSASMISSDCEQSQDSNSDLRNDDSANDRVPYGISAIERNARIIKWLYSIKQARESQKVSHV

SEQ ID NO: 8027 - protein, 338 aa, Homo sapiens
MARDLIGPALPPGFKARGTAEDEERDPSPGPALPPNYKSSSSDSSDSDEDSSSLYEEGNQESEEDDSGPTARKQRKNQDDDDDDDDGFFGPALPPGFKKQDDSPPRPIIGPALPPGFIKSTQKSDKGRDDPGQQETDSSEDEDIIGPMPAKGPVNYNVTTEFEKRAQRMKEKLTKGDDDSSKPIVRESWMTELPPEMKDFGLGPRTFKRRADDTSGDRSIWTDTPADRERKAKETQEARKSSSKKDEEHILSGRDKRLAEQVSSYNESKRSESLMDIHHKKLKSKAAEDKNKPQERIPFDRDKDLKVNRFDEAQKKALIKKSRELNTRFSHGKGNMFL

SEQ ID NO: 8028 - protein, 406 aa, Homo sapiens
MMEGLDDGPDFLSEEDRGLKAINVDLQSDAALQVDISDALSERDKVKFTVHTKSSLPNFKQNEFSVVRQHEEFIWLHDSFVENEDYAGYIIPPAPPRPDFDASREKLQKLGEGEGSMTKEEFTKMKQELEAEYLAIFKKTVAMHEVFLCRVAAHPILRRDLNFHVFLEYNQDLSVRGKNKKEKLEDFFKNMVKSADGVIVSGVKDVDDFFEHERTFLLEYHNRVKDASAKSDRMTRSHKSAADDYNRIGSSLYALGTQDSTDICKFFLKVSELFDKTRKIEARVSADEDLKLSDLLKYYLRESQAAKDLLYRRSRSLVDYENANKALDKARAKNKDVLQAETSQQLCCQKFEKISESAKQELIDFKTRRVAAFRKNLVELAELELKHAKGNLQLLQNCLAVLNGDT

SEQ ID NO: 8029 - protein, 90 aa, Homo sapiens
MPKRKAEGDAKGDKAKVKDEPQRRSARLSAKPAPPKPEPKPKKAPAKKGEKVPKGKKGKADAGKEGNNPAENGDAKTDQAQKAEGAGDAK

SEQ ID NO: 8030 - protein, 582 aa, Homo sapiens
MIFLTALPLFWIMISASRGGHWGAWMPSSISAFEGTCVSIPCRFDFPDELRPAVVHGVWYFNSPYPKNYPPVVFKSRTQVVHESFQGRSRLLGDLGLRNCTLLLSNVSPELGGKYYFRGDLGGYNQYTFSEHSVLDIVNTPNIVVPPEVVAGTEVEVSCMVPDNCPELRPELSWLGHEGLGEPAVLGRLREDEGTWVQVSLLHFVPTREANGHRLGCQASFPNTTLQFEGYASMDVKYPPVIVEMNSSVEAIEGSHVSLLCGADSNPPPLLTWMRDGTVLREAVAESLLLELEEVTPAEDGVYACLAENAYGQDNRTVGLSVMYAPWKPTVNGTMVAVEGETVSILCSTQSNPDPILTIFKEKQILSTVIYESELQLELPAVSPEDDGEYWCVAENQYGQRATAFNLSVEFAPVLLLESHCAAARDTVQCLCVVKSNPEPSVAFELPSRNVTVNESEREFVYSERSGLVLTSILTLRGQAQAPPRVICTARNLYGAKSLELPFQGAHRLMWAKIGPVGAVVAFAILIAIVCYITQTRRKKNVTESPSFSAGDNPPVLFSSDFRISGAPEKYESKEVSTLESH

SEQ ID NO: 8031 - protein, 1711 aa, Homo sapiens
MSAKVRLKKLEQLLLDGPWRNESALSVETLLDVLVCLYTECSHSALRRDKYVAEFLEWAKPFTQLVKEMQLHREDFEIIKVIGRGAFGEVAVVKMKNTERIYAMKILNKWEMLKRAETACFREERDVLVNGDCQWITALHYAFQDENHLYLVMDYYVGGDLLTLLSKFEDKLPEDMARFYIGEMVLAIDSIHQLHYVHRDIKPDNVLLDVNGHIRLADFGSCLKMNDDGTVQSSVAVGTPDYISPEILQAMEDGMGKYGPECDWWSLGVCMYEMLYGETPFYAESLVETYGKIMNHEERFQFPSHVTDVSEEAKDLIQRLICSRERRLGQNGIEDFKKHAFFEGLNWENIRNLEAPYIPDVSSPSDTSNFDVDDDVLRNTEILPPGSHTGFSGLHLPFIGFTFTTESCFSDRGSLKSIMQSNTLTKDEDVQRDLEHSLQMEAYERRIRRLEQEKLELSRKLQESTQTVQSLHGSSRALSNSNRDKEIKKLNEEIERLKNKIADSNRLERQLEDTVALRQEREDSTQRLRGLEKQHRVVRQEKEELHKQLVEASERLKSQAKELKDAHQQRKLALQEFSELNERMAELRAQKQKVSRQLRDKEEEMEVATQKVDAMRQEMRRAEKLRKELEAQLDDAVAEASKERKLREHSENFCKQMESELEALKVKQGGRGAGATLEHQQEISKIKSELEKKVLFYEEELVRREASHVLEVKNVKKEVHDSESHQLALQKEILMLKDKLEKSKRERHNEMEEAVGTIKDKYERERAMLFDENKKLTAENEKLCSFVDKLTAQNRQLEDELQDLAAKKESVAHWEAQIAEIIQWVSDEKDARGYLQALASKMTEELEALRSSSLGSRTLDPLWKVRRSQKLDMSARLELQSALEAEIRAKQLVQEELRKVKDANLTLESKLKDSEAKNRELLEEMEILKKKMEEKFRADTGLKLPDFQDSIFEYFNTAPLAHDLTFRTSSASEQETQAPKPEASPSMSVAASEQQEDMARPPQRPSAVPLPTTQALALAGPKPKAHQFSIKSFSSPTQCSHCTSLMVGLIRQGYACEVCSFACHVSCKDGAPQVCPIPPEQSKRPLGVDVQRGIGTAYKGHVKVPKPTGVKKGWQRAYAVVCDCKLFLYDLPEGKSTQPGVIASQVLDLRDDEFSVSSVLASDVIHATRRDIPCIFRVTASLLGAPSKTSSLLILTENENEKRKWVGILEGLQSILHKNRLRNQVVHVPLEAYDSSLPLIKAILTAAIVDADRIAVGLEEGLYVIEVTRDVIVRAADCKKVHQIELAPREKIVILLCGRNHHVHLYPWSSLDGAEGSFDIKLPETKGCQLMATATLKRNSGTCLFVAVKRLILCYEIQRTKPFHRKFNEIVAPGSVQCLAVLRDRLCVGYPSGFCLLSIQGDGQPLNLVNPNDPSLAFLSQQSFDALCAVELESEEYLLCFSHMGLYVDPQGRRARAQELMWPAAPVACSCSPTHVTVYSEYGVDVFDVRTMEWVQTIGLRRIRPLNSEGTLNLLNCEPPRLIYFKSKFSGAVLNVPDTSDNSKKQMLRTRSKRRFVFKVPEEERLQQRREMLRDPELRSKMISNPTNFNHVAHMGPGDGMQVLMDLPLSAVPPSQEERPGPAPTNLARQPPSRNKPYISWPSSGGSEPSVTVPLRSMSDPDQDFDKEPDSDSTKHSTPSNSSNPSGPPSPNSPHRSQLPLEGLEQPACDT

SEQ ID NO: 8032 - protein, 1069 aa, Homo sapiens
MLRMRTAGWARGWCLGCCLLLPLSLSLAAAKQLLRYRLAEEGPADVRIGNVASDLGIVTGSGEVTFSLESGSEYLKIDNLTGELSTSERRIDREKLPQCQMIFDENECFLDFEVSVIGPSQSWVDLFEGQVIVLDINDNTPTFPSPVLTLTVEENRPVGTLYLLPTATDRDFGRNGIERYELLQEPGGGGSGGESRRAGAADSAPYPGGGGNGASGGGSGGSKRRLDASEGGGGTNPGGRSSVFELQVADTPDGEKQPQLIVKGALDREQRDSYELTLRVRDGGDPPRSSQAILRVLITDVNDNSPRFEKSVYEADLAENSAPGTPILQLRAADLDVGVNGQIEYVFGAATESVRRLLRLDETSGWLSVLHRIDREEVNQLRFTVMARDRGQPPKTDKATVVLNIKDENDNVPSIEIRKIGRIPLKDGVANVAEDVLVDTPIALVQVSDRDQGENGVVTCTVVGDVPFQLKPASDTEGDQNKKKYFLHTSTPLDYEATREFNVVIVAVDSGSPSLSSNNSLIVKVGDTNDNPPMFGQSVVEVYFPENNIPGERVATVLATDADSGKNAEIAYSLDSSVMGIFAIDPDSGDILVNTVLDREQTDRYEFKVNAKDKGIPVLQGSTTVIVQVADKNDNDPKFMQDVFTFYVKENLQPNSPVGMVTVMDADKGRNAEMSLYIEENNNIFSIENDTGTIYSTMSFDREHQTTYTFRVKAVDGGDPPRSATATVSLFVMDENDNAPTVTLPKNISYTLLPPSSNVRTVVATVLATDSDDGINADLNYSIVGGNPFKLFEIDPTSGVVSLVGKLTQKHYGLHRLVVQVNDSGQPSQSTTTLVHVFVNESVSNATAIDSQIARSLHIPLTQDIAGDPSYEISKQRLSIVIGVVAGIMTVILIILIVVMARYCRSKNKNGYEAGKKDHEDFFTPQQHDKSKKPKKDKKNKKSKQPLYSSIVTVEASKPNGQRYDSVNEKLSDSPSMGRYRSVNGGPGSPDLARHYKSSSPLPTVQLHPQSPTAGKKHQAVQDLPPANTFVGAGDNISIGSDHCSEYSCQTNNKYSKQMRLHPYITVFG

SEQ ID NO: 8033 - protein, 341 aa, Homo sapiens
MEPAFGEVNQLGGVFVNGRPLPNAIRLRIVELAQLGIRPCDISRQLRVSHGCVSKILARYNETGSILPGAIGGSKPRVTTPTVVKHIRTYKQRDPGIFAWEIRDRLLADGVCDKYNVPSVSSISRILRNKIGNLAQQGHYDSYKQHQPTPQPALPYNHIYSYPSPITAAAAKVPTPPGVPAIPGSVAMPRTWPSSHSVTDILGIRSITDQVSDSSPYHSPKVEEWSSLGRNNFPAAAPHAVNGLEKGALEQEAKYGQAPNGLPAVGSFVSASSMAPYPTPAQVSPYMTYSAAPSGYVAGHGWQHAGGTSLSPHNCDIPASLAFKGMQAAREGSHSVTASAL

SEQ ID NO: 8034 - protein, 967 aa, Homo sapiens
MGPGQPASTCVHLAPRTQLDGRSDPKVLQTQNQLQFNRNVPTHSSNLAIRYSCPHAIRIEKLKHSYNESYHCKDADCRVGPDLGSSVSFSVISQERLSYAVHLARRDVKRRQFEKHIKEHHLRSQPQSSQKCGHTKYKIPDHRVERKESKSQAACQCSHQPSKVEISSSGAKVYLYSSHPGQSDLTVPNSPPTHDPGLQPHPRIGDHKNISEQKSLLEVQRLQKELSSCIHKIEEVTKKDRLEEALDPDEERRIRIRRQEQAARSARMLYVLQQQVKEIQEELDKLSPHKIKHTKKSWAMSKLAAAHRGAIRALQMFVTQFTDRGEHPLPARCKELGSLIRQLSLCSVKLDADPSVPDVVIDILQQIEALESLLEKKLSPKKVKKCFSEIRSRFPIGSQKALERWPSTSPKGERRPLTAKDTFPQETSRPSVAKQLLADKYQPDTELPETQRLQSELDVLDADIVLEEGPFILDQSASFKDEVLAVAKTKAGKKKPVTENVPFRKKDTLAPARQQGLRKAERGRQSQPHSKSRVQQTTVSSRLKMNRQPVKDRKAPWIPPNPTSPPASPKCAAWLKVKTSPRDATKEPLQQEDPQEESHLTGAVEHEAARLAWLDAETSKRLKELEELKAKEIDSMQKQRLDWLDAETSRRTKELNELKAEEMYRLQQLSVSATHLADKVEEAVLDRLKPLLVKAQRVNSTTEANIHLKDGSSVNTAKAQPAQEVAAVDFESNNIRQLDDFLEDCASELWAVTHAKILGSETLATVEDSKDSPDLEIMMRRMEEMEKYQESVRQRYNKIAYADPRLWMQEENNDQKISAISEKPLSPHPIRITKTVDRKDPAVNIMLERPCNGNSLDESVGTEEGSEKREAPLLSLAEDSQQKEGRAPLFVPPGMQHSIGDYCSRFEQYLRIISHEAVGSFNPWLIAESFSEELVDEALGAVAAELQDMCEDYAEAVFTSEFLEAAT

SEQ ID NO: 8035 - protein, 1016 aa, Homo sapiens
MSQGPPTGESSEPEAKVLHTKRLYRAVVEAVHRLDLILCNKTAYQEVFKPENISLRNKLRELCVKLMFLHPVDYGRKAEELLWRKVYYEVIQLIKTNKKHIHSRSTLECAYRTHLVAGIGFYQHLLLYIQSHYQLELQCCIDWTHVTDPLIGCKKPVSASGKEMDWAQMACHRCLVYLGDLSRYQNELAGVDTELLAERFYYQALSVAPQIGMPFNQLGTLAGSKYYNVEAMYCYLRCIQSEVSFEGAYGNLKRLYDKAAKMYHQLKKCETRKLSPGKKRCKDIKRLLVNFMYLQSLLQPKSSSVDSELTSLCQSVLEDFNLCLFYLPSSPNLSLASEDEEEYESGYAFLPDLLIFQMVIICLMCVHSLERAGSKQYSAAIAFTLALFSHLVNHVNIRLQAELEEGENPVPAFQSDGTDEPESKEPVEKEEEPDPEPPPVTPQVGEGRKSRKFSRLSCLRRRRHPPKVGDDSDLSEGFESDSSHDSARASEGSDSGSDKSLEGGGTAFDAETDSEMNSQESRSDLEDMEEEEGTRSPTLEPPRGRSEAPDSLNGPLGPSEASIASNLQAMSTQMFQTKRCFRLAPTFSNLLLQPTTNPHTSASHRPCVNGDVDKPSEPASEEGSESEGSESSGRSCRNERSIQEKLQVLMAEGLLPAVKVFLDWLRTNPDLIIVCAQSSQSLWNRLSVLLNLLPAAGELQESGLALCPEVQDLLEGCELPDLPSSLLLPEDMALRNLPPLRAAHRRFNFDTDRPLLSTLEESVVRICCIRSFGHFIARLQGSILQFNPEVGIFVSIAQSEQESLLQQAQAQFRMAQEEARRNRLMRDMAQLRLQLEVSQLEGSLQQPKAQSAMSPYLVPDTQALCHHLPVIRQLATSGRFIVIIPRTVIDGLDLLKKEHPGARDGIRYLEAEFKKGNRYIRCQKEVGKSFERHKLKRQDADAWTLYKILDSCKQLTLAQGAGEEDPSGMVTIITGLPLDNPSVLSGPMQAALQAAAHASVDIKNVLDFYKQWKEIG

SEQ ID NO: 8036 - protein, 611 aa, Homo sapiens
MSCKKQRSRKHSVNEKCNMKIEHYFSPVSKEQQNNCSTSLMRMESRGDPRATTNTQAQRFHSPKKNPEDQTMPQNRTIYVTLKVNHRRNQDMKLKLTHSENSSLYMALNTLQAVRKEIETHQGQEMLVRGTEGIKEYINLGMPLSCFPEGGQVVITFSQSKSKQKEDNHIFGRQDKASTECVKFYIHAIGIGKCKRRIVKCGKLHKKGRKLCVYAFKGETIKDALCKDGRFLSFLENDDWKLIENNDTILESTQPVDELEGRYFQVEVEKRMVPSAAASQNPESEKRNTCVLREQIVAQYPSLKRESEKIIENFKKKMKVKNGETLFELHRTTFGKVTKNSSSIKVVKLLVRLSDSVGYLFWDSATTGYATCFVFKGLFILTCRHVIDSIVGDGIEPSKWATIIGQCVRVTFGYEELKDKETNYFFVEPWFEIHNEELDYAVLKLKENGQQVPMELYNGITPVPLSGLIHIIGHPYGEKKQIDACAVIPQGQRAKKCQERVQSKKAESPEYVHMYTQRSFQKIVHNPDVITYDTEFFFGASGSPVFDSKGSLVAMHAAGFAYTYQNETRSIIEFGSTMESILLDIKQRHKPWYEEVFVNQQDVEMMSDEDL

SEQ ID NO: 8037 - protein, 285 aa, Homo sapiens
MPAATVDHSQRICEVWACNLDEEMKKIRQVIRKYNYVAMDTEFPGVVARPIGEFRSNADYQYQLLRCNVDLLKIIQLGLTFMNEQGEYPPGTSTWQFNFKFNLTEDMYAQDSIELLTTSGIQFKKHEEEGIETQYFAELLMTSGVVLCEGVKWLSFHSGYDFGYLIKILTNSNLPEEELDFFEILRLFFPVIYDVKYLMKSCKNLKGGLQEVAEQLELERIGPQHQAGSDSLLTGMAFFKMREMFFEDHIDDAKYCGHLYGLGSGSSYVQNGTGNAYEEEANKQS

SEQ ID NO: 8038 - protein, 189 aa, Homo sapiens
MGLGARGAWAALLLGTLQVLALLGAAHESAAMAETLQHVPSDHTNETSNSTVKPPTSVASDSSNTTVTTMKPTAASNTTTPGMVSTNMTSTTLKSTPKTTSVSQNTSQISTSTMTVTHNSSVTSAASSVTITTTMHSEAKKGSKFDTGSFVGGIVLTLGVLSILYIGCKMYYSRRGIRYRTIDEHDAII

SEQ ID NO: 8039 - protein, 471 aa, Homo sapiens
MADERKDEAKAPHWTSAPLTEASAHSHPPEIKDQGGAGEGLVRSANGFPYREDEEGAFGEHGSQGTYSNTKENGINGELTSADRETAEEVSARIVQVVTAEAVAVLKGEQEKEAQHKDQTAALPLAAEETANLPPSPPPSPASEQTVTVEEAAGGESALAPSVFKQAKDKVSDGVTKSPEKRSSLPRPSSILPPRRGVSGDRDENSFSLNSSISSSARRTTRSEPIRRAGKSGTSTPTTPGSTAITPGTPPSYSSRTPGTPGTPSYPRTPHTPGTPKSAILVPSEKKVAIIRTPPKSPATPKQLRLINQPLPDLKNVKSKIGSTDNIKYQPKGGQVQIVTKKIDLSHVTSKCGSLKNIRHRPGGGRVKIESVKLDFKEKAQAKVGSLDNAHHVPGGGNVKIDSQKLNFREHAKARVDHGAEIITQSPGRSSVASPRRLSNVSSSGSINLLESPQLATLAEDVTAALAKQGL

SEQ ID NO: 8040 - protein, 175 aa, Homo sapiens
MEERGDSEPTPGCSGLGPGGVRGFGDGGGAPSWAPEDAWMGTHPKYLEMMELDIGDATQVYVAFLVYLDLMESKSWHEVNCVGLPELQLICLVGTEIEGEGLQTVVPTPITASLSHNRIREILKASRKLQGDPDLPMSFTLAIVESDSTIVYYKLTDGFMLPDPQVSFENISLRR

SEQ ID NO: 8041 - protein, 243 aa, Homo sapiens
MRSRKLTGAVRSSARLKARSCSAARLASAQEVAGSTSAKTACLTSSSHKATDTRTSKKFKCDKGHLVKSELQKLVPKNDSASLPKVTPETPCENEFAEGSALLPGSEAGVSVQQGAASLPLGGCRVVSDSRLAKTRDGLSVPKHSAGSGAEESNSSSTVQKQNEPGLQTEDVQKPPLQMDNSVFLDDDSNQPMPVSRFFGNVELMQDLPPASSSCPSMSRREFRKMHFRAKDDDDDDDDDAEM

SEQ ID NO: 8042 - protein, 288 aa, Homo sapiens
MGRLTEAAAAGSGSRAAGWAGSPPTLLPLSPTSPRCAATMASSDEDGTNGGASEAGEDREAPGERRRLGVLATAWLTFYDIAMTAGWLVLAIAMVRFYMEKGTHRGLYKSIQKTLKFFQTFALLEIVHCLIGIVPTSVIVTGVQVSSRIFMVWLITHSIKPIQNEESVVLFLVAWTVTEITRYSFYTFSLLDHLPYFIKWARYNFFIILYPVGVAGELLTIYAALPHVKKTGMFSIRLPNKYNVSFDYYYFLLITMASYIPLFPQLYFHMLRQRRKVLHGEVIVEKDD

SEQ ID NO: 8043 - protein, 51 aa, Homo sapiens [sequence omitted]

SEQ ID NO: 8044 - protein, 879 aa, Homo sapiens
MKMLTRLQVLTLALFSKGFLLSLGDHNFLRREIKIEGDLVLGGLFPINEKGTGTEECGRINEDRGIQRLEAMLFAIDEINKDDYLLPGVKLGVHILDTCSRDTYALEQSLEFVRASLTKVDEAEYMCPDGSYAIQENIPLLIAGVIGGSYSSVSIQVANLLRLFQIPQISYASTSAKLSDKSRYDYFARTVPPDFYQAKAMAEILRFFNWTYVSTVASEGDYGETGIEAFEQEARLRNICIATAEKVGRSNIRKSYDSVIRELLQKPNARVVVLFMRSDDSRELIAAASRANASFTWVASDGWGAQESIIKGSEHVAYGAITLELASQPVRQFDRYFQSLNPYNNHRNPWFRDFWEQKFQCSLQNKRNHRRVCDKHLAIDSSNYEQESKIMFVVNAVYAMAHALHKMQRTLCPNTTKLCDAMKILDGKKLYKDYLLKINFTAPFNPNKDADSIVKFDTFGDGMGRYNVFNFQNVGGKYSYLKVGHWAETLSLDVNSIHWSRNSVPTSQCSDPCAPNEMKNMQPGDVCCWICIPCEPYEYLADEFTCMDCGSGQWPTADLTGCYDLPEDYIRWEDAWAIGPVTIACLGFMCTCMVVTVFIKHNNTPLVKASGRELCYILLFGVGLSYCMTFFFIAKPSPVICALRRLGLGSSFAICYSALLTKTNCIARIFDGVKNGAQRPKFISPSSQVFICLGLILVQIVMVSVWLILEAPGTRRYTLAEKRETVILKCNVKDSSMLISLTYDVILVILCTVYAFKTRKCPENFNEAKFIGFTMYTTCIIWLAFLPIFYVTSSDYRVQTTTMCISVSLSGFVVLGCLFAPKVHIILFQPQKNVVTHRLHLNRFSVSGTGTTYSQSSASTYVPTVCNGREVLDSTTSSL

SEQ ID NO: 8045 - protein, 676 aa, Homo sapiens
MAKVNITRDLIRRQIKERGALSFERRYHVTDPFIRRLGLEAELQGHSGCVNCLEWNEKGDLLASGSDDQHTIVWDPLHHKKLLSMHTGHTANIFSVKFLPHAGDRILITGAADSKVHVHDLTVKETIHMFGDHTNRVKRIATAPMWPNTFWSAAEDGLIRQYDLRENSKHSEVLIDLTEYCGQLVEAKCLTVNPQDNNCLAVGASGPFVRLYDIRMIHNHRKSMKQSPSAGVHTFCDRQKPLPDGAAQYYVAGHLPVKLPDYNNRLRVLVATYVTFSPNGTELLVNMGGEQVYLFDLTYKQRPYTFLLPRKCHSSGVQNGKMSTNGVSNGVSNGLHLHSNGFRLPESRGHVSPQVELPPYLERVKQQANEAFACQQWTQAIQLYSKAVQRAPHNAMLYGNRAAAYMKRKWDGDHYDALRDCLKAISLNPCHLKAHFRLARCLFELKYVAEALECLDDFKGKFPEQAHSSACDALGRDITAALFSKNDGEEKKGPGGGAPVRLRSTSRKDSISEDEMVLRERSYDYQFRYCGHCNTTTDIKEANFFGSNAQYIVSGSDDGSFFIWEKETTNLVRVLQGDESIVNCLQPHPSYCFLATSGIDPVVRLWNPRPESEDLTGRVVEDMEGASQANQRRMNADPLEVMLLNMGYRITGLSSGGAGASDDEDSSEGQVQCRPS

SEQ ID NO: 8046 - protein, 399 aa, Homo sapiens
MERKNPSRESPRRLSAKVGKGTEMKKVARQLGMAAAESDKDSGFSDGSSECLSSAEQMESEDMLSALGWSREDRPRQNSKTAKNAFPTLSPMVVMKNVLVKQGSSSSQLQSWTVQPSFEVISAQPQLLFLHPPVPSPVSPCHTGEKKSDSRNYLPILNSYTKIAPHPGKRGLSLGPEEKGTSGVQKKICTERLGPSLSSSEPTKAGAVPSSPSTPAPPSAKLAEDSALQGVPSLVAGGSPQTLQPVSSSHVAKAPSLTFASPASPVCASDSTLHGLESNSPLSPLSANYSSPLWAAEHLCRSPDIFSEQRQSKHRRFQNTLVVLHKSGLLEITLKTKELIRQNQATQVELDQLKEQTQLFIEATKSRAPQAWAKLQASLTPGSSNTGSDLEAFSDHPAI

SEQ ID NO: 8047 - protein, 1015 aa, Homo sapiens
MWRLRRAAVACEVCQSLVKHSSGIKGSLPLQKLHLVSRSIYHSHHPTLKLQRPQLRTSFQQFSSLTNLPLRKLKFSPIKYGYQPRRNFWPARLATRLLKLRYLILGSAVGGGYTAKKTFDQWKDMIPDLSEYKWIVPDIVWEIDEYIDFEKIRKALPSSEDLVKLAPDFDKIVESLSLLKDFFTSGHKLVSEVIGASDLLLLLGSPEETAFRATDRGSESDKHFRKGLLGELILLQQQIQEHEEEARRAAGQYSTSYAQQKRKVSDKEKIDQLQEELLHTQLKYQRILERLEKENKELRKLVLQKDDKGIHHRKLKKSLIDMYSEVLDVLSDYDASYNTQDHLPRVVVVGDQSAGKTSVLEMIAQARIFPRGSGEMMTRSPVKVTLSEGPHHVALFKDSSREFDLTKEEDLAALRHEIELRMRKNVKEGCTVSPETISLNVKGPGLQRMVLVDLPGVINTVTSGMAPDTKETIFSISKAYMQNPNAIILCIQDGSVDAERSIVTDLVSQMDPHGRRTIFVLTKVDLAEKNVASPSRIQQIIEGKLFPMKALGYFAVVTGKGNSSESIEAIREYEEEFFQNSKLLKTSMLKAHQVTTRNLSLAVSDCFWKMVRESVEQQADSFKATRFNLETEWKNNYPRLRELDRNELFEKAKNEILDEVISLSQVTPKHWEEILQQSLWERVSTHVIENIYLPAAQTMNSGTFNTTVDIKLKQWTDKQLPNKAVEVAWETLQEEFSRFMTEPKGKEHDDIFDKLKEAVKEESIKRHKWNDFAEDSLRVIQHNALEDRSISDKQQWDAAIYFMEEALQARLKDTENAIENMVGPDWKKRWLYWKNRTQEQCVHNETKNELEKMLKCNEEHPAYLASDEITTVRKNLESRGVEVDPSLIKDTWHQVYRRHFLKTALNHCNLCRRGFYYYQRHFVDSELECNDVVLFWRIQRMLAITANTLRQQLTNTEVRRLEKNVKEVLEDFAEDGEKKIKLLTGKRVQLAEDLKKVREIQEKLDAFIEALHQEK

SEQ ID NO: 8048 - protein, 263 aa, Homo sapiens
MALASVLERPLPVNQRGFFGLGGRADLLDLGPGSLSDGLSLAAPGWGVPEEPGIEMLHGTTTLAFKFRHGVIVAADSRATAGAYIASQTVKKVIEINPYLLGTMAGGAADCSFWERLLARQCRIYELRNKERISVAAASKLLANMVYQYKGMGLSMGTMICGWDKRGPGLYYVDSEGNRISGATFSVGSGSVYAYGVMDRGYSYDLEVEQAYDLARRAIYQATYRDAYSGGAVNLYHVREDGWIRVSSDNVADLHEKYSGSTP

SEQ ID NO: 8049 - protein, 731 aa, Homo sapiens
MSNPGTRRNGSSIKIRLTVLCAKNLAKKDFFRLPDPFAKIVVDGSGQCHSTDTVKNTLDPKWNQHYDLYVGKTDSITISVWNHKKIHKKQGAGFLGCVRLLSNAISRLKDTGYQRLDLCKLNPSDTDAVRGQIVVSLQTRDRIGTGGSVVDCRGLLENEGTVYEDSGPGRPLSCFMEEPAPYTDSTGAAAGGGNCRFVESPSQDQRLQAQRLRNPDVRGSLQTPQNRPHGHQSPELPEGYEQRTTVQGQVYFLHTQTGVSTWHDPRIPRDLNSVNCDELGPLPPGWEVRSTVSGRIYFVDHNNRTTQFTDPRLHHIMNHQCQLKEPSQPLPLPSEGSLEDEELPAQRYERDLVQKLKVLRHELSLQQPQAGHCRIEVSREEIFEESYRQIMKMRPKDLKKRLMVKFRGEEGLDYGGVAREWLYLLCHEMLNPYYGLFQYSTDNIYMLQINPDSSINPDHLSYFHFVGRIMGLAVFHGHYINGGFTVPFYKQLLGKPIQLSDLESVDPELHKSLVWILENDITPVLDHTFCVEHNAFGRILQHELKPNGRNVPVTEENKKEYVRLYVNWRFMRGIEAQFLALQKGFNELIPQHLLKPFDQKELELIIGGLDKIDLNDWKSNTRLKHCVADSNIVRWFWQAVETFDEERRARLLQFVTGSTRVPLQGFKALQGSTGAAGPRLFTIHLIDANTDNLPKAHTCFNRIDIPPYESYEKLYEKLLTAVEETCGFAVE

SEQ ID NO: 8050 - protein, 1469 aa, Homo sapiens
MARLAAVLWNLCVTAVLVTSATQGLSRAGLPFGLMRRELACEGYPIELRCPGSDVIMVENANYGRTDDKICDADPFQMENVQCYLPDAFKIMSQRCNNRTQCVVVAGSDAFPDPCPGTYKYLEVQYDCVPYIFVCPGTLQKVLEPTSTHESEHQSGAWCKDPLQAGDRIYVMPWIPYRTDTLTEYASWEDYVAARHTTTYRLPNRVDGTGFVVYDGAVFYNKERTRNIVKYDLRTRIKSGETVINTANYHDTSPYRWGGKTDIDLAVDENGLWVIYATEGNNGRLVVSQLNPYTLRFEGTWETGYDKRSASNAFMVCGVLYVLRSVYVDDDSEAAGNRVDYAFNTNANREEPVSLTFPNPYQFISSVDYNPRDNQLYVWNNYFVVRYSLEFGPPDPSAGPATSPPLSTTTTARPTPLTSTASPAATTPLRRAPLTTHPVGAINQLGPDLPPATAPVPSTRRPPAPNLHVSPELFCEPREVRRVQWPATQQGMLVERPCPKGTRGIASFQCLPALGLWNPRGPDLSNCTSPWVNQVAQKIKSGENAANIASELARHTRGSIYAGDVSSSVKLMEQLLDILDAQLQALRPIERESAGKNYNKMHKRERTCKDYIKAVVETVDNLLRPEALESWKDMNATEQVHTATMLLDVLEEGAFLLADNVREPARFLAAKENVVLEVTVLNTEGQVQELVFPQEEYPRKNSIQLSAKTIKQNSRNGVVKVVFILYNNLGLFLSTENATVKLAGEAGPGGPGGASLVVNSQVIAASINKESSRVFLMDPVIFTVAHLEDKNHFNANCSFWNYSERSMLGYWSTQGCRLVESNKTHTTCACSHLTNFAVLMAHREIYQGRINELLLSVITWVGIVISLVCLAICISTFCFLRGLQTDRNTIHKNLCINLFLAELLFLVGIDKTQYEIACPIFAGLLHYFFLAAFSWLCLEGVHLYLLLVEVFESEYSRTKYYYLGGYCFPALVVGIAAAIDYRSYGTEKACWLRVDNYFIWSFIGPVSFVIVVNLVFLMVTLHKMIRSSSVLKPDSSRLDNIKSWALGAIALLFLLGLTWAFGLLFINKESVVMAYLFTTFNAFQGVFIFVFHCALQKKVHKEYSKCLRHSYCCIRSPPGGTHGSLKTSAMRSNTRYYTGTQSRIRRMWNDTVRKQTESSFMAGDINSTPTLNRGTMGNHLLTNPVLQPRGGTSPYNTLIAESVGFNPSSPPVFNSPGSYREPKHPLGGREACGMDTLPLNGNFNNSYSLRSGDFPPGDGGPEPPRGRNLADAAAFEKMIISELVHNNLRGSSSAAKGPPPPEPPVPPVPGGGGEEEAGGPGGADRAEIELLYKALEEPLLLPRAQSVLYQSDLDESESCTAEDGATSRPLSSPPGRDSLYASGANLRDSPSYPDSSPEGPSEALPPPPPAPPGPPEIYYTSRPPALVARNPLQGYYQVRRPSHEGYLAAPGLEGPGPDGDGQMQLVTSL

SEQ ID NO: 8051 - protein, 687 aa, Homo sapiens
MAEELVLERCDLELETNGRDHHTADLCREKLVVRRGQPFWLTLHFEGRNYEASVDSLTFSVVTGPAPSQEAGTKARFPLRDAVEEGDWTATVVDQQDCTLSLQLTTPANAPIGLYRLSLEASTGYQGSSFVLGHFILLFNAWCPADAVYLDSEEERQEYVLTQQGFIYQGSAKFIKNIPWNFGQFEDGILDICLILLDVNPKFLKNAGRDCSRRSSPVYVGRVVSGMVNCNDDQGVLLGRWDNNYGDGVSPMSWIGSVDILRRWKNHGCQRVKYGQCWVFAAVACTVLRCLGIPTRVVTNYNSAHDQNSNLLIEYFRNEFGEIQGDKSEMIWNFHCWVESWMTRPDLQPGYEGWQALDPTPQEKSEGTYCCGPVPVRAIKEGDLSTKYDAPFVFAEVNADVVDWIQQDDGSVHKSINRSLIVGLKISTKSVGRDEREDITHTYKYPEGSSEEREAFTRANHLNKLAEKEETGMAMRIRVGQSMNMGSDFDVFAHITNNTAEEYVCRLLLCARTVSYNGILGPECGTKYLLNLNLEPFSEKSVPLCILYEKYRDCLTESNLIKVRALLVEPVINSYLLAERDLYLENPEIKIRILGEPKQKRKLVAEVSLQNPLPVALEGCTFTVEGAGLTEEQKTVEIPDPVEAGEEVKVRMDLLPLHMGLHKLVVNFESDKLKAVKGFRNVIIGPA

SEQ ID NO: 8052 - protein, 190 aa, Homo sapiens
MNPQIRNPMKAMYPGTFYFQFKNLWEANDRNETWLCFTVEGIKRRSVVSWKTGVFRNQVDSETHCHAERCFLSWFCDDILSPNTKYQVTWYTSWSPCPDCAGEVAEFLARHSNVNLTIFTARLYYFQYPCYQEGLRSLSQEGVAVEIMDYEDFKYCWENFVYNDNEPFKPWKGLKTNFRLLKRRLRESLQ

SEQ ID NO: 8053 - protein, 1087 aa, Homo sapiens
MMTSVGTNRARGNWEQPQNQNQTQHKQRPQATAEQIRLAQMISDHNDADFEEKVKQLIDITGKNQDECVIALHDCNGDVNRAINVLLEGNPDTHSWEMVGKKKGVSGQKDGGQTESNEEGKENRDRDRDYSRRRGGPPRRGRGASRGREFRGQENGLDGTKSGGPSGRGTERGRRGRGRGRGGSGRRGGRFSAQGMGTFNPADYAEPANTDDNYGNSSGNTWNNTGHFEPDDGTSAWRTATEEWGTEDWNEDLSETKIFTASNVSSVPLPAENVTITAGQRIDLAVLLGKTPSTMENDSSNLDPSQAPSLAQPLVFSNSKQTAISQPASGNTFSHHSMVSMLGKGFGDVGEAKGGSTTGSQFLEQFKTAQALAQLAAQHSQSGSTTTSSWDMGSTTQSPSLVQYDLKNPSDSAVHSPFTKRQAFTPSSTMMEVFLQEKSPAVATSTAAPPPPSSPLPSKSTSAPQMSPGSSDNQSSSPQPAQQKLKQQKKKASLTSKIPALAVEMPGSADISGLNLQFGALQFGSEPVLSDYESTPTTSASSSQAPSSLYTSTASESSSTISSNQSQESGYQSGPIQSTTYTSQNNAQGPLYEQRSTQTRRYPSSISSSPQKDLTQAKNGFSSVQATQLQTTQSVEGATGSAVKSDSPSTSSIPPLNETVSAASLLTTTNQHSSSLGGLSHSEEIPNTTTTQHSSTLSTQQNTLSSSTSSGRTSTSTLLHTSVESEANLHSSSSTFSTTSSTVSAPPPVVSVSSSLNSGSSLGLSLGSNSTVTASTRSSVATTSGKAPPNLPPGVPPLLPNPYIMAPGLLHAYPPQVYGYDDLQMLQTRFPLDYYSIPFPTPTTPLTGRDGSLASNPYSGDLTKFGRGDASSPAPATTLAQPQQNQTQTHHTTQQTFLNPALPPGYSYTSLPYYTGVPGLPSTFQYGPAVFPVAPTSSKQHGVNVSVNASATPFQQPSGYGSHGYNTGVSVTSSNTGVPDISGSVYSKTQQSFEKQGFHSGTPAASFNLPSALGSGGPINPATAAAYPPAPFMHILTPHQQPHSQILHHHLQQDGQTGSGQRSQTSSIPQKPQTNKSAYNSYSWGAN

SEQ ID NO: 8054 - protein, 1128 aa, Homo sapiens
MSRSVLQPSQQKLAEKLTILNDRGVGMLTRLYNIKKACGDPKAKPSYLIDKNLESAVKFIVRKFPAVETRNNNQQLAQLQKEKSEILKNLALYYFTFVDVMEFKDHVCELLNTIDVCQVFFDITVNFDLTKNYLDLIITYTTLMILLSRIEERKAIIGLYNYAHEMTHGASDREYPRLGQMIVDYENPLKKMMEEFVPHSKSLSDALISLQMVYPRRNLSADQWRNAQLLSLISAPSTMLNPAQSDTMPCEYLSLDAMEKWIIFGFILCHGILNTDATALNLWKLALQSSSCLSLFRDEVFHIHKAAEDLFVNIRGYNKRINDIRECKEAAVSHAGSMHRERRKFLRSALKELATVLSDQPGLLGPKALFVFMALSFARDEIIWLLRHADNMPKKSADDFIDKHIAELIFYMEELRAHVRKYGPVMQRYYVQYLSGFDAVVLNELVQNLSVCPEDESIIMSSFVNTMTSLSVKQVEDGEVFDFRGMRLDWFRLQAYTSVSKASLGLADHRELGKMMNTIIFHTKMVDSLVEMLVETSDLSIFCFYSRAFEKMFQQCLELPSQSRYSIAFPLLCTHFMSCTHELCPEERHHIGDRSLSLCNMFLDEMAKQARNLITDICTEQCTLSDQLLPKHCAKTISQAVNKKSKKQTGKKGEPEREKPGVESMRKNRLVVTNLDKLHTALSELCFSINYVPNMVVWEHTFTPREYLTSHLEIRFTKSIVGMTMYNQATQEIAKPSELLTSVRAYMTVLQSIENYVQIDITRVFNNVLLQQTQHLDSHGEPTITSLYTNWYLETLLRQVSNGHIAYFPAMKAFVNLPTENELTFNAEEYSDISEMRSLSELLGPYGMKFLSESLMWHISSQVAELKKLVVENVDVLTQMRTSFDKPDQMAALFKRLSSVDSVLKRMTIIGVILSFRSLAQEALRDVLSYHIPFLVSSIEDFKDHIPRETDMKVAMNVYELSSAAGLPCEIDPALVVALSSQKSENISPEEEYKIACLLMVFVAVSLPTLASNVMSQYSPAIEGHCNNIHCLAKAINQIAAALFTIHKGSIEDRLKEFLALASSSLLKIGQETDKTTTRNRESVYLLLDMIVQESPFLTMDLLESCFPYVLLRNAYHAVYKQSVTSSA

SEQ ID NO: 8055 - protein, 323 aa, Homo sapiens
MWPLVAALLLGSACCGSAQLLFNKTKSVEFTFCNDTVVIPCFVTNMEAQNTTEVYVKWKFKGRDIYTFDGALNKSTVPTDFSSAKIEVSQLLKGDASLKMDKSDAVSHTGNYTCEVTELTREGETIIELKYRVVSWFSPNENILIVIFPIFAILLFWGQFGIKTLKYRSGGMDEKTIALLVAGLVITVIVIVGAILFVPGEYSLKNATGLGLIVTSTGILILLHYYVFSTAIGLTSFVIAILVIQVIAYILAVVGLSLCIAACIPMHGPLLISGLSILALAQLLGLVYMKFVASNQKTIQPPRKAVEEPLNAFKESKGMMNDE

SEQ ID NO: 8056 - protein, 1253 aa, Homo sapiens
MVVALRYVWPLLLCSPCLLIQIPEEYEGHHVMEPPVITEQSPRRLVVFPTDDISLKCEASGKPEVQFRWTRDGVHFKPKEELGVTVYQSPHSGSFTITGNNSNFAQRFQGIYRCFASNKLGTAMSHEIRLMAEGAPKWPKETVKPVEVEEGESVVLPCNPPPSAEPLRIYWMNSKILHIKQDERVTMGQNGNLYFANVLTSDNHSDYICHAHFPGTRTIIQKEPIDLRVKATNSMIDRKPRLLFPTNSSSHLVALQGQPLVLECIAEGFPTPTIKWLRPSGPMPADRVTYQNHNKTLQLLKVGEEDDGEYRCLAENSLGSARHAYYVTVEAAPYWLHKPQSHLYGPGETARLDCQVQGRPQPEVTWRINGIPVEELAKDQKYRIQRGALILSNVQPSDTMVTQCEARNRHGLLLANAYIYVVQLPAKILTADNQTYMAVQGSTAYLLCKAFGAPVPSVQWLDEDGTTVLQDERFFPYANGTLGIRDLQANDTGRYFCLAANDQNNVTIMANLKVKDATQITQGPRSTIEKKGSRVTFTCQASFDPSLQPSITWRGDGRDLQELGDSDKYFIEDGRLVIHSLDYSDQGNYSCVASTELDVVESRAQLLVVGSPGPVPRLVLSDLHLLTQSQVRVSWSPAEDHNAPIEKYDIEFEDKEMAPEKWYSLGKVPGNQTSTTLKLSPYVHYTFRVTAINKYGPGEPSPVSETVVTPEAAPEKNPVDVKGEGNETTNMVITWKPLRWMDWNAPQVQYRVQWRPQGTRGPWQEQIVSDPFLVVSNTSTFVPYEIKVQAVNSQGKGPEPQVTIGYSGEDYPQAIPELEGIEILNSSAVLVKWRPVDLAQVKGHLRGYNVTYWREGSQRKHSKRHIHKDHVVVPANTTSVILSGLRPYSSYHLEVQAFNGRGSGPASEFTFSTPEGVPGHPEALHLECQSNTSLLLRWQPPLSHNGVLTGYVLSYHPLDEGGKGQLSFNLRDPELRTHNLTDLSPHLRYRFQLQATTKEGPGEAIVREGGTMALSGISDFGNISATAGENYSVVSWVPKEGQCNFRFHILFKALGEEKGGASLSPQYVSYNQSSYTQWDLQPDTDYEIHLFKERMFRHQMAVKTNGTGRVRLPPAGFATEGWFIGFVSAIILLLLVLLILCFIKRSKGGKYSVKDKEDTQVDSEARPMKDETFGEYSDNEEKAFGSSQPSLNGDIKPLGSDDSLADYGGSVDVQFNEDGSFIGQYSGKKEKEAAGGNDSSGATSPINPAVALE

SEQ ID NO: 8057 - protein, 268 aa, Homo sapiens
MVALENPECGPEAAEGTPGGRRLLPLPSCLPALASSQVKRLSASRRKQHFINQAVRNSDLVPKAKGRKSLQRLENTQYLLTLLETDGGLPGLEDGDLAPPASPGIFAEACNNATYVEVWNDFMNRSGEEQERVLRYLEDEGRSKARRRGPGRGEDRRREDPAYTPRECFQRISRRLRAVLKRSRIPMETLETWEERLLRFFSVSPQAVYTAMLDNSFERLLLHAVCQYMDLISASADLEGKRQMKVSNRHLDFLPPGLLLSAYLEQHS

SEQ ID NO: 8058 - protein, 94 aa, Homo sapiens
SGFIGILIMMSMCREVHVYEYIPSVRQTELCHYHELYYDAACTLGAYHPLLYEKLLVQRLNMGTQGDLHRKGKVVLPGFQAVHCPAPSPVIPHS

SEQ ID NO: 8059 - protein, 860 aa, Homo sapiens
MEQVAEGARVTAVPVSAADSTEELAEVEEGVGVVGEDNDAAARGAEAFGDSEEDGEDVFEVEKILDMKTEGGKVLYKVRWKGYTSDDDTWEPEIHLEDCKEVLLEFRKKIAENKAKAVRKDIQRLSLNNDIFEANSDSDQQSETKEDTSPKKKKKKLRQREEKSPDDLKKKKAKAGKLKDKSKPDLESSLESLVFDLRTKKRISEAKEELKESKKPKKDEVKETKELKKVKKGEIRDLKTKTREDPKENRKTKKEKFVESQVESESSVLNDSPFPEDDSEGLHSDSREEKQNTKSARERAGQDMGLEHGFEKPLDSAMSAEEDTDVRGRRKKKTPRKAEDTRENRKLENKNAFLEKKTVPKKQRNQDRSKSAAELEKLMPVSAQTPKGRRLSGEERGLWSTDSAEEDKETKRNESKEKYQKRHDSDKEEKGRKEPKGLKTLKEIRNAFDLFKLTPEEKNDVSENNRKREEIPLDFKTIDDHKTKENKQSLKERRNTRDETDTWAYIAAEGDQEVLDSVCQADENSDGRQQILSLGMDLQLEWMKLEDFQKHLDGKDENFAATDAIPSNVLRDAVKNGDYITVKVALNSNEEYNLDQEDSSGMTLVMLAAAGGQDDLLRLLITKGAKVNGRQKNGTTALIHAAEKNFLTTVAILLEAGAFVNVQQSNGETALMKACKRGNSDIVRLVIECGADCNILSKHQNSALHFAKQSNNVLVYDLLKNHLETLSRVAEETIKDYFEARLALLEPVFPIACHRLCEGPDFSTDFNYKPPQNIPEGSGILLFIFHANFLGKEVIARLCGPCSVQAVVLNDKFQLPVFLDSHFVYSFSPVAGPNKLFIRLTEAPSAKVKLLIGAYRVQLQ

SEQ ID NO: 8060 - protein, 613 aa, Homo sapiens
MKECNATRRPQMSFLKMDMTQMEFPDASFQVVLDKGTLDAVLTDEEEKTLQQVDRMLAEVGRVLQVGGRYLCISLAQAHILKKAVGHFSREGWMVRVHQVANSQDQVLEAEPQFSLPVFAFIMTKFRPVPGSALQIFELCAQEQRKPVRLESAERLAEAVQERQQYAWLCSQLRRKARLGSVSLDLCDGDTGEPRYTLHVVDSPTVKPSRDNHFAIFIIPQGRETEWLFGMDEGRKQLAASAGFRRLITVALHRGQQYESMDHIQAELSARVMELAPAGMPTQQQVPFLSVGGDIGVRTVQHQDCSPLSGDYVIEDVQGDDKRYFRRLIFLSNRNVVQSEARLLKDVSHKAQKKRKKDRKKQRPADAEDLPAAPGQSIDKSYLCCEHHKAMIAGLALLRNPELLLEIPLALLVVGLGGGSLPLFVHDHFPKSCIDAVEIDPSMLEVATQWFGFSQSDRMKVHIADGLDYIASLAGGGEARPCYDVIMFDVDSKDPTLGMSCPPPAFVEQSFLQKVKSILTPEGVFILNLVCRDLGLKDSVLAGLKAVFPLLYVRRIEGEVNEILFCQLHPEQKLATPELLETAQALERTLRKPGRGWDDTYVLSDMLKTVKIV

SEQ ID NO: 8061 - protein, 1065 aa, Homo sapiens
MAPAPLGVPEEQLLGCRSRVLSRLLFIAQTALLLLPAAGAGLCPAPCSCRIPLLDCSRRKLPAPSWRALSGLLPPDTAILDFSHNRLSNWNISLESQTLQEVKMNYNELTEIPYFGEPTSNITLLSLVHNIIPEINAQALQFYPALESLDLSSNIISEIKTSSFPRMQLKYLNLSNNRITTLEAGCFDNLSSSLLVVKLNRNRMSMIPPKIFKLPHLQFLELKRNRIKIVEGLTFQGLDSLRSLKMQRNGISKLKDGAFFGLNNMEELELEHNNLTRVNKGWLYGLRMLQQLYVSQNAIERISPDAWEFCQRLSELDLSYNQLTRLDESAFVGLSLLERLNLGDNRVTHIADGVFRFLSNLQTLDLRNNEISWAIEDASEAFAGLTSLTKLILQGNQIKSITKKAFIGLESLEHLDLNNNAIMSIQENAFSQTHLKELILNTSSLLCDCHLKWLLQWLVDNNFQHSVNVSCAHPEWLAGQSILNVDLKDFVCDDFLKPQIRTHPETIIALRGMNVTLTCTAVSSSDSPMSTVWRKDSEILYDVDTENFVRYWQQAGEALEYTSILHLFNVNFTDEGKYQCIVTNHFGSNYSQKAKLTVNEMPSFLKTPMDLTIRTGAMARLECAAEGHPAPQISWQKDGGTDFPAARERRMHVMPEDDVFFIANVKIEDMGIYSCMAQNTAGGLSANASLTVLETPSFIRPLEDKTVTRGETAVLQCIAGGSPAPRLNWTKDDGPLLVTERHFFAAANQLLIIVDAGLEDAGKYTCIMSNTLGTERGHIYLNVISSPNCDSSQSSIGHEDDGWTTVGIVIIVVVCCVVGTSLIWVIVIYHMRRKNEDYSITNTEELNLPADIPSYLSSQGTLSEPQEGYSNSEAGSHQQLMPPANGYIHKGTDGGTGTRVICSDCYDNANIYSRTREYCPYTYIAEEDVLDQTLSSLMVQMPKETYLVHPPQDTTALESLIPSANREPSAFPTNHERISEKKLPSTQMSGETLQRPVWNINRELGLPHPPFSQQPVHESPQLHQNEGLAGREPDCSASSMSCHRLQDHAFDFSRTRNIQDGSEGT

SEQ ID NO: 8062 - protein, 745 aa, Homo sapiens
MFPLRALWLVWALLGVAGSCPEPCACVDKYAHQFADCAYKELREVPEGLPANVTTLSLSANKITVLRRGAFADVTQVTSLWLAHNEVRTVEPGALAVLSQLKNLDLSHNFISSFPWSDLRNLSALQLLKMNHNRLGSLPRDALGALPDLRSLRINNNRLRTLAPGTFDALSALSHLQLYHNPFHCGCGLVWLQAWAASTRVSLPEPDSIACASPPALQGVPVYRLPALPCAPPSVHLSAEPPLEAPGTPLRAGLAFVLHCIADGHPTPRLQWQLQIPGGTVVLEPPVLSGEDDGVGAEEGEGEGDGDLLTQTQAQTPTPAPAWPAPPATPRFLALANGSLLVPLLSAKEAGVYTCRAHNELGANSTSIRVAVAATGPPKHAPGAGGEPDGQAPTSERKSTAKGRGNSVLPSKPEGKIKGQGLAKVSILGETETEPEEDTSEGEEAEDQILADPAEEQRCGNGDPSRYVSNHAFNQSAELKPHVFELGVIALDVAEREARVQLTPLAARWGPGPGGAGGAPRPGRRPLRLLYLCPAGGGAAVQWSRVEEGVNAYWFRGLRPGTNYSVCLALAGEACHVQVVFSTKKELPSLLVIVAVSVFLLVLATVPLLGAACCHLLAKHPGKPYRLILRPQAPDPMEKRIAADFDPRASYLESEKSYPAGGEAGGEEPEDVQGEGLDEDAEQGDPSGDLQREESLAACSLVESQSKANQEEFEAGSEYSDRLPLGAEAVNIAQEINGNYRQTAG

SEQ ID NO: 8063 - protein, 836 aa, Homo sapiens
MARLGNCSLTWAALIILLLPGSLEECGHISVSAPIVHLGDPITASCIIKQNCSHLDPEPQILWRLGAELQPGGRQQRLSDGTQESIITLPHLNHTQAFLSCCLNWGNSLQILDQVELRAGYPPAIPHNLSCLMNLTTSSLICQWEPGPETHLPTSFTLKSFKSRGNCQTQGDSILDCVPKDGQSHCCIPRKHLLLYQNMGIWVQAENALGTSMSPQLCLDPMDVVKLEPPMLRTMDPSPEAAPPQAGCLQLCWEPWQPGLHINQKCELRHKPQRGEASWALVGPLPLEALQYELCGLLPATAYTLQIRCIRWPLPGHWSDWSPSLELRTTERAPTVRLDTWWRQRQLDPRTVQLFWKPVPLEEDSGRIQGYVVSWRPSGQAGAILPLCNTTELSCTFHLPSEAQEVALVAYNSAGTSRPTPVVFSESRGPALTRLHAMARDPHSLWVGWEPPNPWPQGYVIEWGLGPPSASNSNKTWRMEQNGRATGFLLKENIRPFQLYEIIVTPLYQDTMGPSQHVYAYSQEMAPSHAPELHLKHIGKTWAQLEWVPEPPELGKSPLTHYTIFWTNAQNQSFSAILNASSRGFVLHGLEPASLYHIHLMAASQAGATNSTVLTLMTLTPEGSELHIILGLFGLLLLLTCLCGTAWLCCSPNRKNPLWPSVPDPAHSSLGSWVPTIMEEDAFQLPGLGTPPITKLTVLEEDEKKPVPWESHNSSETCGLPTLVQTYVLQGDPRAVSTQPQSQSGTSDQVLYGQLLGSPTSPGPGHYLRCDSTQPLLAGLTPSPKSYENLWFQASPLGTLVTPAPSQEDDCVFGPLLNFPLLQGIRVHGMEALGSF

SEQ ID NO: 8064 - protein, 389 aa, Homo sapiens
MDSVSFEDVAVAFTQEEWALLDPSQKNLYRDVMQEIFRNLASVGNKSEDQNIQDDFKNPGRNLSSHVVERLFEIKEGSQYGETFSQDSNLNLNKKVSTGVKPCECSVCGKVFICHSALHRHILSHIGNKLFECEECPEKLYHCKQCGKAFISLTSVDRHMVTHTSNGPYKGPVYEKPFDFPSVFQMPQSTYTGEKTYKCKHCDKAFNYSSYLREHERTHTGEKPYACKKCGKSFTFSSSLRQHERSHTGEKPYECKECGKAFSRSTYLGIHERTHTGEKPYECIKCGKAFRCSRVLRVHERTHSGEKPYECKQCGKAFKYSSNLCEHERTHTGVKPYGCKECGKSFTSSSALRSHERTHTGEKPYECKKCGKAFSCSSSLRKHERAYMW

SEQ ID NO: 8065 - protein, 429 aa, Homo sapiens
MATEQRPFHLVVFGASGFTGQFVTEEVAREQVDPERSSRLPWAVAGRSREKLQRVLEKAALKLGRPTLSSEVGIIICDIANPASLDEMAKQATVVLNCVGPYRFYGEPVIKACIENGASCIDISGEPQFLELMQLKYHEKAADKGVYIIGSSGFDSIPADLGVIYTRNKMNGTLTAVESFLTIHSGPEGLSIHDGTWKSAIYGFGDQSNLRKLRNVSNLKPVPLIGPKLKRRWPISYCRELKGYSIPFMGSDVSVVRRTQRYLYENLEESPVQYAAYVTVGGITSVIKLMFAGLFFLFFVRFGIGRQLLIKFPWFFSFGYFSKQGPTQKQIDAASFTLTFFGQGYSQGTGTDKNKPNIKICTQVKGPEAGYVATPIAMVQAAMTLLSDASHLPKAGGVFTPGAAFSKTKLIDRLNKHGIEFSVISSSEV

SEQ ID NO: 8066 - protein, 396 aa, Homo sapiens
MWIPVVGLPRRLRLSALAGAGRFCILGSEAATRKHLPARNHCGLSDSSPQLWPEPDFRNPPRKASKASLDFKRYVTDRRLAETLAQIYLGKPSRPPHLLLECNPGPGILTQALLEAGAKVVALESDKTFIPHLESLGKNLDGKLRVIHCDFFKLDPRSGGVIKPPAMSSRGLFKNLGIEAVPWTADIPLKVVGMFPSRGEKRALWKLAYDLYSCTSIYKFGRIEVNMFIGEKEFQKLMADPGNPDLYHVLSVIWQLACEIKVLHMEPWSSFDIYTRKGPLENPKRRELLDQLQQKLYLIQMIPRQNLFTKNLTPMNYNIFFHLLKHCFGRRSATVIDHLRSLTPLDARDILMQIGKQEDEKVVNMHPQDFKTLFETIERSKDCAYKWLYDETLEDR

SEQ ID NO: 8067 - protein, 832 aa, Homo sapiens
MSAREVAVLLLWLSCYGSALWRYSTNSPNYRIFSTRSTIKLEYEGTLFTEWSVPETCFVLNKSSPTTELRCSSPGVHAIKPIVTGPDEEERYLFVESSHTCFLWYYRVRHFFNNFTQLITVWAYDPESADPDELLGNAEEPSINSIVLSTQMATLGQKPVIHTVLKRKVYSSNEKMRRGTWRIVVPMTKDDALKEIRGNQVTFQDCFIADFLILLTFPLLTIPEIPGYLPISSPRGSQLMASWDACVVASAVLVTDMETFHTTDSFKSWTRIRVPPDILSDDERRSVAHVILSRDGIVFLINGVLYIKSFRGFIRLGGIVNLPDGGITGISSRKWCWVNYLLKAKGRRSTFAVWTENEIYLGSILLKFARLVTTTELKNILSLSVTATLTIDRVEYTGHPLEIAVFLNYCTVCNVTKKIFLVIYNEDTKQWVSQDFTLDAPIDSVTMPHFTFSALPGLLLWNKHSIYYCYHNFTFTGILQTPAGHGNLSMLSNDSIIHEVFIDYYGDILVKMENNVIFYSKINTRDAVKLHLWTNYTTRAFIFLSTSGQTYFLYALDDGTIQIQDYPLHLEAQSIAFTTKDKCPYMAFHNNVAHVFYFLDKGEALTVWTQIVYPENTGLYVIVESYGPKILQESHEISFEAAFGYCTKTLTLTFYQNVDYERISDYFETQDKHTGLVLVQFRPSEYSKACPIAQKVFQIAVGCDDKKFIAIKGFSKKGCHHHDFSYVIEKSYLRHQPSKNLRVRYIWGEYGCPLRLDFTEKFQPVVQLFDDNGYVKDVEANFIVWEIHGRDDYSFNNTMAQSGCLHEAQTWKSMIELNKHLPLEEVWGPEFL

SEQ ID NO: 8068 - protein, 951 aa, Homo sapiens
MSAREVAVLLLWLSCYGSALWRYSTNSPNYRIFSTRSTIKLEYEGTLFTEWSVPETCFVLNKSSPTTELRCSSPGVHAIKPIVTGPDEEERYLFVESSHTCFLWYYRVRHFFNNFTQLITVWAYDPESADPDELLGNAEEPSINSIVLSTQMATLGQKPVIHTVLKRKVYSSNEKMRRGTWRIVVPMTKDDALKEIRGNQVTFQDCFIADFLILLTFPLLTIPEIPGYLPISSPRGSQLMASWDACVVASAVLVTDMETFHTTDSFKSWTRIRVPPDILSDDERRSVAHVILSRDGIVFLINGVLYIKSFRGFIRLGGIVNLPDGGITGISSRKWCWVNYLLKAKGRRSTFAVWTENEIYLGSILLKFARLVTTTELKNILSLSVTATLTIDRVEYTGHPLEIAVFLNYCTVCNVTKKIFLVIYNEDTKQWVSQDFTLDAPIDSVTMPHFTFSALPGLLLWNKHSIYYCYHNFTFTGILQTPAGHGNLSMLSNDSIIHEVFIDYYGDILVKMENNVIFYSKINTRDAVKLHLWTNYTTRAFIFLSTSGQTYFLYALDDGTIQIQDYPLHLEAQSIAFTTKDKCPYMAFHNNVAHVFYFLDKGEALTVWTQIVYPENTGLYVIVESYGPKILQESHEISFEAAFGYCTKTLTLTFYQNVDYERISDYFETQDKHTGLVLVQFRPSEYSKACPIAQKVFQIAVGCDDKKFIAIKGFSKKGCHHHDFSYVIEKSYLRHQPSKNLRVRYIWGEYGCPLRLDFTEKFQPVVQLFDDNGYVKDVEANFIVWEIHGRDDYSFNNTMAQSGCLHEAQTWKSMIELNKHLPLEEVWGPENYKHCFSYAIGKPGDLNQPYEIINSSNGNHIFWPMGHSGMYVFRVKILDPNYSFCNLTAMFAIETFGLIPSPSVYLVASFLFVLMLLFFTILVLSYFRYMRIYRRYIYEPLHKPQRKRKKN

SEQ ID NO: 8069 - protein, 456 aa, Homo sapiens
MAFAETYPAASSLPNGDCGRPRARPGGNRVTVVLGAQWGDEGKGKVVDLLAQDADIVCRCQGGNNAGHTVVVDSVEYDFHLLPSGIINPNVTAFIGNGVVIHLPGLFEEAEKNVQKGKGLEGWEKRLIISDRAHIVFDFHQAADGIQEQQRQEQAGKNLGTTKKGIGPVYSSKAARSGLRMCDLVSDFDGFSERFKVLANQYKSIYPTLEIDIEGELQKLKGYMEKIKPMVRDGVYFLYEALHGPPKKILVEGANAALLDIDFGTYPFVTSSNCTVGGVCTGLGMPPQNVGEVYGVVKAYTTRVGIGAFPTEQDNEIGELLQTRGREFGVTTGRKRRCGWLDLVLLKYAHMINGFTALALTKLDILDMFTEIKVGVAYKLDGEIIPHIPANQEVLNKVEVQYKTLPGWNTDISNARAFKELPVNAQNYVRFIEDELQIPVKWIGVGKSRESMIQLF

SEQ ID NO: 8070 - protein, 1584 aa, Homo sapiens
MSLTSWFLVSSGGTRHRLPREMIFVGRDDCELMLQSRSVDKQHAVINYDASTDEHLVKDLGSLNGTFVNDVRIPEQTYITLKLEDKLRFGYDTNLFTVVQGEMRVPEEALKHEKFTIQLQLSQKSSESELSKSASAKSIDSKVADAATEVQHKTTEALKSEEKAMDISAMPRGTPLYGQPSWWGDDEVDEKRAFKTNGKPEEKNHEAGTSGCGIDAKQVEEQSAAANEEVLFPFCREPSYFEIPTKEFQQPSQITESTIHEIPTKDTPSSHITGAGHASFTIEFDDSTPGKVTIRDHVTKFTSDQRHKSKKSSPGTQDLLGIQTGMMAPENKVADWLAQNNPPQMLWERTEEDSKSIKSDVPVYLKRLKGNKHDDGTQSDSENAGAHRRCSKRATLEEHLRRHHSEHKKLQKVQATEKHQDQAVTSSAHHRGGHGVPHGKLLKQKSEEPSVSIPFLQTALLRSSGSLGHRPSQEMDKMLKNQATSATSEKDNDDDQSDKGTYTIELENPNSEEVEARKMIDKVFGVDDNQDYNRPVINEKHKDLIKDWALSSAAAVMEERKPLTTSGFHHSEEGTSSSGSKRWVSQWASLAANHTRHDQEERIMEFSAPLPLENETEISESGMTVRSTGSATSLASQGERRRRTLPQLPNEEKSLESHRAKVVTQRSEIGEKQDTELQEKETPTQVYQKDKQDADRPLSKMNRAVNGETLKTGGDNKTLLHLGSSAPGKEKSETDKETSLVKQTLAKLQQQEQREEAQWTPTKLSSKNVSGQTDKCREETFKQESQPPEKNSGHSTSKGDRVAQSESKRRKAEEILKSQTPKGGDKKESSKSLVRQGSFTIEKPSPNIPIELIPHINKQTSSTPSSLALTSASRIRERSESLDPDSSMDTTLILKDTEAVMAFLEAKLREDNKTDEGPDTPSYNRDNSISPESDVDTASTISLVTGETERKSTQKRKSFTSLYKDRCSTGSPSKDVTKSSSSGAREKMEKKTKSRSTDVGSRADGRKFVQSSGRIRQPSVDLTDDDQTSSVPHSAISDIMSSDQETYSCKPHGRTPLTSADEHVHSKLEGSKVTKSKTSPVVSGSSSKSTTLPRPRPTRTSLLRRARLGEASDSELADADKASVASEVSTTSSTSKPPTGRRNISRIDLLAQPRRTRLGSLSARSDSEATISRSSASSRTAEAIIRSGARLVPSDKFSPRIRANSISRLSDSKVKSMTSAHGSASVNSRWRRFPTDYASTSEDEFGSNRNSPKHTRLRTSPALKTTRLQSAGSAMPTSSSFKHRIKEQEDYIRDWTAHREEIARISQDLALIAREINDVAGEIDSVTSSGTAPSTTVSTAATTPGSAIDTREELVDRVFDESLNFRKIPPLVHSKTPEGNNGRSGDPRPQAAEPPDHLTITRRRTWSRDEVMGDNLLLSSVFQFSKKIRQSIDKTAGKIRILFKDKDRNWDDIESKLRAESEVPIVKTSSMEISSILQELKRVEKQLQAINAMIDPDGTLEALNNMGFPSAMLPSPPKQKSSPVNNHHSPGQTPTLGQPEARALHPAAVSAAAEFENAESEADFSIHFNRFNPDGEEEDVTVQE

SEQ ID NO: 8071 - protein, 1460 aa, Homo sapiens
MSLTSWFLVSSGGTRHRLPREMIFVGRDDCELMLQSRSVDKQHAVINYDASTDEHLVKDLGSLNGTFVNDVRIPEQTYITLKLEDKLRFGYDTNLFTVVQGEMRVPEEALKHEKFTIQLQLSQKSSESELSKSASAKSIDSKVADAATEVQHKTTEALKSEEKAMDISAMPRGTPLYGQPSWWGDDEVDEKRAFKTNGKPEEKNHEAGTSGCGIDAKQVEEQSAAANEEVLFPFCREPSYFEIPTKEFQQPSQITESTIHEIPTKDTPSSHITGAGHASFTIEFDDSTPGKVTIRDHVTKFTSDQRHKSKKSSPGTQDLLGIQTGMMAPENKVADWLAQNNPPQMLWERTEEDSKSIKSDVPVYLKRLKGNKHDDGTQSDSENAGAHRRCSKRATLEEHLRRHHSEHKKLQKVQATEKHQDQAVVFGVDDNQDYNRPVINEKHKDLIKDWALSSAAAVMEERKPLTTSGFHHSEEGTSSSGSKRWVSQWASLAANHTRHDQEERIMEFSAPLPLENETEISESGMTVRSTGSATSLASQGERRRRTLPQLPNEEKSLESHRAKVVTQRSEIGEKQDTELQEKETPTQVYQKDKQDADRPLSKMNRAVNGETLKTGGDNKTLLHLGSSAPGKEKSETDKETSLVKQTLAKLQQQEQREEAQWTPTKLSSKNVSGQTDKCREETFKQESQPPEKNSGHSTSKGDRVAQSESKRRKAEEILKSQTPKGGDKKESSKSLVRQGSFTIEKPSPNIPIELIPHINKQTSSTPSSLALTSASRIRERSESLDPDSSMDTTLILKDTEAVMAFLEAKLREDNKTDEGPDTPSYNRDNSISPESDVDTASTISLVTGETERKSTQKRKSFTSLYKDRCSTGSPSKDVTKSSSSGAREKMEKKTKSRSTDVGSRADGRKFVQSSGRIRQPSVDLTDDDQTSSVPHSAISDIMSSDQETYSCKPHGRTPLTSADEHVHSKLEGSKVTKSKTSPVVSGSSSKSTTLPRPRPTRTSLLRRARLGEASDSELADADKASVASEVSTTSSTSKPPTGRRNISRIDLLAQPRRTRLGSLSARSDSEATISRSSASSRTAEAIIRSGARLVPSDKFSPRIRANSISRLSDSKVKSMTSAHGSASALKTTRLQSAGSAMPTSSSFKHRIKEQEDYIRDWTAHREEIARISQDLALIAREINDVAGEIDSVTSSGTAPSTTVSTAATTPGSAIDTREEVGDLHGEMHKLVDRVFDESLNFRKIPPLVHSKTPEGNNGRSGDPRPQAAEPPDHLTITRRRTWSRDEVMGDNLLLSSVFQFSKKIRQSIDKTAGKIRILFKDKDRNWDDIESKLRAESEVPIVKTSSMEISSILQELKRVEKQLQAINAMIDPDGTLEALNNMGFPSAMLPSPPKQKSSPVNNHHSPGQTPTLGQPEARALHPAAVSAAAEFENAESEADFSIHFNRFNPDGEEEDVTVQE

SEQ ID NO: 8072 - protein, 1486 aa, Homo sapiens
MSLTSWFLVSSGGTRHRLPREMIFVGRDDCELMLQSRSVDKQHAVINYDASTDEHLVKDLGSLNGTFVNDVRIPEQTYITLKLEDKLRFGYDTNLFTVVQGEMRVPEEALKHEKFTIQLQLSQKSSESELSKSASAKSIDSKVADAATEVQHKTTEALKSEEKAMDISAMPRGTPLYGQPSWWGDDEVDEKRAFKTNGKPEEKNHEAGTSGCGIDAKQVEEQSAAANEEVLFPFCREPSYFEIPTKEFQQPSQITESTIHEIPTKDTPSSHITGAGHASFTIEFDDSTPGKVTIRDHVTKFTSDQRHKSKKSSPGTQDLLGIQTGMMAPENKVADWLAQNNPPQMLWERTEEDSKSIKSDVPVYLKRLKGNKHDDGTQSDSENAGAHRRCSKRATLEEHLRRHHSEHKKLQKVQATEKHQDQAVVFGVDDNQDYNRPVINEKHKDLIKDWALSSAAAVMEERKPLTTSGFHHSEEGTSSSGSKRWVSQWASLAANHTRHDQEERIMEFSAPLPLENETEISESGMTVRSTGSATSLASQGERRRRTLPQLPNEEKSLESHRAKVVTQRSEIGEKQDTELQEKETPTQVYQKDKQDADRPLSKMNRAVNGETLKTGGDNKTLLHLGSSAPGKEKSETDKETSLVKQTLAKLQQQEQREEAQWTPTKLSSKNVSGQTDKCREETFKQESQPPEKNSGHSTSKGDRVAQSESKRRKAEEILKSQTPKGGDKKESSKSLVRQGSFTIEKPSPNIPIELIPHINKQTSSTPSSLALTSASRIRERSESLDPDSSMDTTLILKDTEAVMAFLEAKLREDNKTDEGPDTPSYNRDNSISPESDVDTASTISLVTGETERKSTQKRKSFTSLYKDRCSTGSPSKDVTKSSSSGAREKMEKKTKSRSTDVGSRADGRKFVQSSGRIRQPSVDLTDDDQTSSVPHSAISDIMSSDQETYSCKPHGRTPLTSADEHVHSKLEGSKVTKSKTSPVVSGSSSKSTTLPRPRPTRTSLLRRARLGEASDSELADADKASVASEVSTTSSTSKPPTGRRNISRIDLLAQPRRTRLGSLSARSDSEATISRSSASSRTAEAIIRSGARLVPSDKFSPRIRANSISRLSDSKVKSMTSAHGSASVNSRWRRFPTDYASTSEDEFGSNRNSPKHTRLRTSPALKTTRLQSAGSAMPTSSSFKHRIKEQEDYIRDWTAHREEIARISQDLALIAREINDVAGEIDSVTSSGTAPSTTVSTAATTPGSAIDTREELVDRVFDESLNFRKIPPLVHSKTPEGNNGRSGDPRPQAAEPPDHLTITRRRTWSRDEVMGDNLLLSSVFQFSKKIRQSIDKTAGKIRILFKDKDRNWDDIESKLRAESEVPIVKTSSMEISSILQELKRVEKQLQAINAMIDPDGTLEALNNMGFPSAMLPSPPKQKSSPVNNHHSPGQTPTLGQPEARALHPAAVSAAAEFENAESEADFSIHFNRFNPDGEEEDVTVQE

SEQ ID NO: 8073 - protein, 656 aa, Homo sapiens
MADNLPTEFDVVIIGTGLPESILAAACSRSGQRVLHIDSRSYYGGNWASFSFSGLLSWLKEYQQNNDIGEESTVVWQDLIHETEEAITLRKKDETIQHTEAFCYASQDMEDNVEEIGALQKNPSLGVSNTFTEVLDSALPEESQLSYFNSDEMPAKHTQKSDTEISLEVTDVEESVEKEKYCGDKTCMHTVSDKDGDKDESKSTVEDKADEPIRNRITYSQIVKEGRRFNIDLVSKLLYSQGLLIDLLIKSDVSRYVEFKNVTRILAFREGKVEQVPCSRADVFNSKELTMVEKRMLMKFLTFCLEYEQHPDEYQAFRQCSFSEYLKTKKLTPNLQHFVLHSIAMTSESSCTTIDGLNATKNFLQCLGRFGNTPFLFPLYGQGEIPQGFCRMCAVFGGIYCLRHKVQCFVVDKESGRCKAIIDHFGQRINAKYFIVEDSYLSEETCSNVQYKQISRAVLITDQSILKTDLDQQTSILIVPPAEPGACAVRVTELCSSTMTCMKDTYLVHLTCSSSKTAREDLESVVKKLFTPYTETEINEEELTKPRLLWALYFNMRDSSGISRSSYNGLPSNVYVCSGPDCGLGNEHAVKQAETLFQEIFPTEEFCPPPPNPEDIIFDGDDKQPEAPGTNNVVMAKLESSEESKNLESPEKHLQN

SEQ ID NO: 8074 - protein, 402 aa, Homo sapiens
MYSGNRSGGHGYWDGGGAAGAEGPAPAGTLSPAPLFSPGTYERLALLLGSIGLLGVGNNLLVLVLYYKFQRLRTPTHLLLVNISLSDLLVSLFGVTFTFVSCLRNGWVWDTVGCVWDGFSGSLFGIVSIATLTVLAYERYIRVVHARVINFSWAWRAITYIWLYSLAWAGAPLLGWNRYILDVHGLGCTVDWKSKDANDSSFVLFLFLGCLVVPLGVIAHCYGHILYSIRMLRCVEDLQTIQVIKILKYEKKLAKMCFLMIFTFLVCWMPYIVICFLVVNGHGHLVTPTISIVSYLFAKSNTVYNPVIYVFMIRKFRRSLLQLLCLRLLRCQRPAKDLPAAGSEMQIRPIVMSQKDGDRPKKKVTFNSSSIIFIITSDESLSVDDSDKTNGSKVDVIQVRPL

SEQ ID NO: 8075 - protein, 510 aa, Homo sapiens
MYRALRLLARSRPLVRAPAAALASAPGLGGAAVPSFWPPNAARMASQNSFRIEYDTFGELKVPNDKYYGAQTVRSTMNFKIGGVTERMPTPVIKAFGILKRAAAEVNQDYGLDPKIANAIMKAADEVAEGKLNDHFPLVVWQTGSGTQTNMNVNEVISNRAIEMLGGELGSKIPVHPNDHVNKSQSSNDTFPTAMHIAAAIEVHEVLLPGLQKLHDALDAKSKEFAQIIKIGRTHTQDAVPLTLGQEFSGYVQQVKYAMTRIKAAMPRIYELAAGGTAVGTGLNTRIGFAEKVAAKVAALTGLPFVTAPNKFEALAAHDALVELSGAMNTTACSLMKIANDIRFLGSGPRSGLGELILPENEPGSSIMPGKVNPTQCEAMTMVAAQVMGNHVAVTVGGSNGHFELNVFKPMMIKNVLHSARLLGDASVSFTENCVVGIQANTERINKLMNESLMLVTALNPHIGYDKAAKIAKTAHKNGSTLKETAIELGYLTAEQFDEWVKPKDMLGPK

SEQ ID NO: 8076 - protein, 540 aa, Homo sapiens
MWLLRCVLLCVSLSLAVSGQHKPEAPDYSSVLHCGPWSFQFAVNLNQEATSPPVLIAWDNQGLLHELQNDSDCGTWIRKGPGSSVVLEATYSSCYVTEWDSHYIMPVGVEGAGAAEHKVVTERKLLKCPMDLLARDAPDTDWCDSIPARDRLPCAPSPISRGDCEGLGCCYSSEEVNSCYYGNTVTLHCTREGHFSIAVSRNVTSPPLLLDSVRLALRNDSACNPVMATQAFVLFQFPFTSCGTTRQITGDRAVYENELVATRDVKNGSRGSVTRDSIFRLHVSCSYSVSSNSLPINVQVFTLPPPFPETQPGPLTLELQIAKDKNYGSYYGVGDYPVVKLLRDPIYVEVSILHRTDPYLGLLLQQCWATPSTDPLSQPQWPILVKGCPYIGDNYQTQLIPVQKALDLPFPSHHQRFSIFTFSFVNPTVEKQALRGPVHLHCSVSVCQPAETPSCVVTCPDLSRRRNFDNSSQNTTASVSSKGPMILLQATKDPPEKLRVPVDSKVLWVAGLSGTLILGALLVSYLAVKKQKSCPDQMCQ

SEQ ID NO: 8077 - protein, 1265 aa, Homo sapiens
MSPALQDLSQPEGLKKTLRDEINAILQKRIMVLDGGMGTMIQREKLNEEHFRGQEFKDHARPLKGNNDILSITQPDVIYQIHKEYLLAGADIIETNTFSSTSIAQADYGLEHLAYRMNMCSAGVARKAAEEVTLQTGIKRFVAGALGPTNKTLSVSPSVERPDYRNITFDELVEAYQEQAKGLLDGGVDILLIETIFDTANAKAALFALQNLFEEKYAPRPIFISGTIVDKSGRTLSGQTGEGFVISVSHGEPLCIGLNCALGAAEMRPFIEIIGKCTTAYVLCYPNAGLPNTFGDYDETPSMMAKHLKDFAMDGLVNIVGGCCGSTPDHIREIAEAVKNCKPRVPPATAFEGHMLLSGLEPFRIGPYTNFVNIGERCNVAGSRKFAKLIMAGNYEEALCVAKVQVEMGAQVLDVNMDDGMLDGPSAMTRFCNLIASEPDIAKVPLCIDSSNFAVIEAGLKCCQGKCIVNSISLKEGEDDFLEKARKIKKYGAAMVVMAFDEEGQATETDTKIRVCTRAYHLLVKKLGFNPNDIIFDPNILTIGTGMEEHNLYAINFIHATKVIKETLPGARISGGLSNLSFSFRGMEAIREAMHGVFLYHAIKSGMDMGIVNAGNLPVYDDIHKELLQLCEDLIWNKDPEATEKLLRYAQTQGTGGKKVIQTDEWRNGPVEERLEYALVKGIEKHIIEDTEEARLNQKKYPRPLNIIEGPLMNGMKIVGDLFGAGKMFLPQVIKSARVMKKAVGHLIPFMEKEREETRVLNGTVEEEDPYQGTIVLATVKGDVHDIGKNIVGVVLGCNNFRVIDLGVMTPCDKILKAALDHKADIIGLSGLITPSLDEMIFVAKEMERLAIRIPLLIGGATTSKTHTAVKIAPRYSAPVIHVLDASKSVVVCSQLLDENLKDEYFEEIMEEYEDIRQDHYESLKERRYLPLSQARKSGFQMDWLSEPHPVKPTFIGTQVFEDYDLQKLVDYIDWKPFFDVWQLRGKYPNRGFPKIFNDKTVGGEARKVYDDAHNMLNTLISQKKLRARGVVGFWPAQSIQDDIHLYAEAAVPQAAEPIATFYGLRQQAEKDSASTEPYYCLSDFIAPLHSGIRDYLGLFAVACFGVEELSKAYEDDGDDYSSIMVKALGDRLAEAFAEELHERVRRELWAYCGSEQLDVADLRRLRYKGIRPAPGYPSQPDHTEKLTMWRLADIEQSTGIRLTESLAMAPASAVSGLYFSNLKSKYFAVGKISKDQVEDYALRKNISVAEVEKWLGPILGYDTD

SEQ ID NO: 8078 - protein, 2144 aa, Homo sapiens
MTSLAQQLQRLALPQSDASLLSRDEVASLLFDPKEAATIDRDTAFAIGCTGLEELLGIDPSFEQFEAPLFSQLAKTLERSVQTKAVNKQLDENISLFLIHLSPYFLLKPAQKCLEWLIHRFHIHLYNQDSLIACVLPYHETRIFVRVIQLLKINNSKHRWFWLLPVKQSGVPLAKGTLITHCYKDLGFMDFICSLVTKSVKVFAEYPGSSAQLRVLLAFYASTIVSALVAAEDVSDNIIAKLFPYIQKGLKSSLPDYRAATYMIICQISVKVTMENTFVNSLASQIIKTLTKIPSLIKDGLSCLIVLLQRQKPESLGKKPFPHLCNVPDLITILHGISETYDVSPLLHYMLPHLVVSIIHHVTGEETEGMDGQIYKRHLEAILTKISLKNNLDHLLASLLFEEYISYSSQEEMDSNKVSLLNEQFLPLIRLLESKYPRTLDVVLEEHLKEIADLKKQELFHQFVSLSTSGGKYQFLADSDTSLMLSLNHPLAPVRILAMNHLKKIMKTSKEGVDESFIKEAVLARLGDDNIDVVLSAISAFEIFKEHFSSEVTISNLLNLFQRAELSKNGEWYEVLKIAADILIKEEILSENDQLSNQVVVCLLPFMVINNDDTESAEMKIAIYLSKSGICSLHPLLRGWEEALENVIKSTKPGKLIGVANQKMIELLADNINLGDPSSMLKMVEDLISVGEEESFNLKQKVTFHVILSVLVSCCSSLKETHFPFAIRVFSLLQKKIKKLESVITAVEIPSEWHIELMLDRGIPVELWAHYVEELNSTQRVAVEDSVFLVFSLKKFIYALKAPKSFPKGDIWWNPEQLKEDSRDYLHLLIGLFEMMLNGADAVHFRVLMKLFIKVHLEDVFQLFKFCSVLWTYGSSLSNPLNCSVKTVLQTQALYVGCAMLSSQKTQCKHQLASISSPVVTSLLINLGSPVKEVRRAAIQCLQALSGVASPFYLIIDHLISKAEEITSDAAYVIQDLATLFEELQREKKLKSHQKLSETLKNLLSCVYSCPSYIAKDLMKVLQGVNGEMVLSQLLPMAEQLLEKIQKEPTAVLKDEAMVLHLTLGKYNEFSVSLLNEDPKSLDIFIKAVHTTKELYAGMPTIQITALEKITKPFFAAISDEKVQQKLLRMLFDLLVNCKNSHCAQTVSSVFKGISVNAEQVRIELEPPDKAKPLGTVQQKRRQKMQQKKSQDLESVQEVGGSYWQRVTLILELLQHKKKLRSPQILVPTLFNLLSRCLEPLPQEQGNMEYTKQLILSCLLNICQKLSPDGGKIPKDILDEEKFNVELIVQCIRLSEMPQTHHHALLLLGTVAGIFPDKVLHNIMSIFTFMGANVMRLDDTYSFQVINKTVKMVIPALIQSDSGDSIEVSRNVEEIVVKIISVFVDALPHVPEHRRLPILVQLVDTLGAEKFLWILLILLFEQYVTKTVLAAAYGEKDAILEADTEFWFSVCCEFSVQHQIQSLMNILQYLLKLPEEKEETIPKAVSFNKSESQEEMLQVFNVETHTSKQLRHFKFLSVSFMSQLLSSNNFLKKVVESGGPEILKGLEERLLETVLGYISAVAQSMERNADKLTVKFWRALLSKAYDLLDKVNALLPTETFIPVIRGLVGNPLPSVRRKALDLLNNKLQQNISWKKTIVTRFLKLVPDLLAIVQRKKKEGEEEQAINRQTALYTLKLLCKNFGAENPDPFVPVLNTAVKLIAPERKEEKNVLGSALLCIAEVTSTLEALAIPQLPSLMPSLLTTMKNTSELVSSEVYLLSALAALQKVVETLPHFISPYLEGILSQVIHLEKITSEMGSASQANIRLTSLKKTLATTLAPRVLLPAIKKTYKQIEKNWKNHMGPFMSILQEHIGVMKKEELTSHQSQLTAFFLEALDFRAQHSENDLEEVGKTENCIIDCLVAMVVKLSEVTFRPLFFKLFDWAKTEDAPKDRLLTFYNLADCIAEKLKGLFTLFAGHLVKPFADTLNQVNISKTDEAFFDSENDPEKCCLLLQFILNCLYKIFLFDTQHFISKERAEALMMPLVDQLENRLGGEEKFQERVTKHLIPCIAQFSVAMADDSLWKPLNYQILLKTRDSSPKVRFAALITVLALAEKLKENYIVLLPESIPFLAELMEDECEEVEHQCQKTIQQLETVLGEPLQSYF

SEQ ID NO: 8079 - protein, 1114 aa, Homo sapiens
MLASSSRIRAAWTRALLLPLLLAGPVGCLSRQELFPFGPGQGDLELEDGDDFVSPALELSGALRFYDRSDIDAVYVTTNGIIATSEPPAKESHPGLFPPTFGAVAPFLADLDTTDGLGKVYYREDLSPSITQRAAECVHRGFPEISFQPSSAVVVTWESVAPYQGPSRDPDQKGKRNTFQAVLASSDSSSYAIFLYPEDGLQFHTTFSKKENNQVPAVVAFSQGSVGFLWKSNGAYNIFANDRESVENLAKSSNSGQQGVWVFEIGSPATTNGVVPADVILGTEDGAEYDDEDEDYDLATTRLGLEDVGTTPFSYKALRRGGADTYSVPSVLSPRRAATERPLGPPTERTRSFQLAVETFHQQHPQVIDVDEVEETGVVFSYNTDSRQTCANNRHQCSVHAECRDYATGFCCSCVAGYTGNGRQCVAEGSPQRVNGKVKGRIFVGSSQVPIVFENTDLHSYVVMNHGRSYTAISTIPETVGYSLLPLAPVGGIIGWMFAVEQDGFKNGFSITGGEFTRQAEVTFVGHPGNLVIKQRFSGIDEHGHLTIDTELEGRVPQIPFGSSVHIEPYTELYHYSTSVITSSSTREYTVTEPERDGASPSRIYTYQWRQTITFQECVHDDSRPALPSTQQLSVDSVFVLYNQEEKILRYALSNSIGPVREGSPDALQNPCYIGTHGCDTNAACRPGPRTQFTCECSIGFRGDGRTCYEVEKTRCQHEREHILGAAGATDPQRPIPPGLFVPECDAHGHYAPTQCHGSTGYCWCVDRDGREVEGTRTRPGMTPPCLSTVAPPIHQGPAVPTAVIPLPPGTHLLFAQTGKIERLPLEGNTMRKTEAKAFLHVPAKVIIGLAFDCVDKMVYWTDITEPSIGRASLHGGEPTTIIRQDLGSPEGIAVDHLGRNIFWTDSNLDRIEVAKLDGTQRRVLFETDLVNPRGIVTDSVRGNLYWTDWNRDNPKIETSYMDGTNRRILVQDDLGLPNGLTFDAFSSQLCWVDAGTNRAECLNPSQPSRRKALEGLQYPFAVTSYGKNLYFTDWKMNSVVALDLAISKETDAFQPHKQTRLYGITTALSQCPQGHNYCSVNNGGCTHLCLATPGSRTCRCPDNTLGVDCIEQK

SEQ ID NO: 8080 - protein, 500 aa, Homo sapiens
MRNWLVLLCPCVLGAALHLWLRLRSPPPACASGAGPADQLALFPQWKSTHYDVVVGVLSARNNHELRNVIRSTWMRHLLQHPTLSQRVLVKFIIGAHGCEVPVEDREDPYSCKLLNITNPVLNQEIEAFSLSEDTSSGLPEDRVVSVSFRVLYPIVITSLGVFYDANDVGFQRNITVKLYQAEQEEALFIARFSPPSCGVQVNKLWYKPVEQFILPESFEGTIVWESQDLHGLVSRNLHKVTVNDGGGVLRVITAGEGALPHEFLEGVEGVAGGFIYTIQEGDALLHNLHSRPQRLIDHIRNLHEEDALLKEESSIYDDIVFVDVVDTYRNVPAKLLNFYRWTVETTSFNLLLKTDDDCYIDLEAVFNRIVQKNLDGPNFWWGNFRLNWAVDRTGKWQELEYPSPAYPAFACGSGYVISKDIVKWLASNSGRLKTYQGEDVSMGIWMAAIGPKRYQDSLWLCEKTCETGMLSSPQYSPWELTELWKLKERCGDPCRCQAR

SEQ ID NO: 8081 - protein, 145 aa, Homo sapiens
MVGRNSAIAAGVCGALFIGYCIYFDRKRRSDPNFKNRLRERRKKQKLAKERAGLSKLPDLKDAEAVQKFFLEEIQLGEELLAQGEYEKGVDHLTNAIAVCGQPQQLLQVLQQTLPPPVFQMLLTKLPTISQRIVSAQSLAEDDVE

SEQ ID NO: 8082 - protein, 587 aa, Homo sapiens
MAAAVAVAAASRRQSCYLCDLPRMPWAMIWDFTEPVCRGCVNYEGADRVEFVIETARQLKRAHGCFPEGRSPPGAAASAAAKPPPLSAKDILLQQQQQLGHGGPEAAPRAPQALERYPLAAAAERPPRLGSDFGSSRPAASLAQPPTPQPPPVNGILVPNGFSKLEEPPELNRQSPNPRRGHAVPPTLVPLMNGSATPLPTALGLGGRAAASLAAVSGTAAASLGSAQPTDLGAHKRPASVSSSAAVEHEQREAAAKEKQPPPPAHRGPADSLSTAAGAAELSAEGAGKSRGSGEQDWVNRPKTVRDTLLALHQHGHSGPFESKFKKEPALTAGRLLGFEANGANGSKAVARTARKRKPSPEPEGEVGPPKINGEAQPWLSTSTEGLKIPMTPTSSFVSPPPPTASPHSNRTTPPEAAQNGQSPMAALILVADNAGGSHASKDANQVHSTTRRNSNSPPSPSSMNQRRLGPREVGGQGAGNTGGLEPVHPASLPDSSLATSAPLCCTLCHERLEDTHFVQCPSVPSHKFCFPCSRQSIKQQGASGEVYCPSGEKCPLVGSNVPWAFMQGEIATILAGDVKVKKERDS

SEQ ID NO: 8083 - protein, 571 aa, Homo sapiens
MAAAVAVAAASRRQSCYLCDLPRMPWAMIWDFTEPVCRGCVNYEGADRVEFVIETARQLKRAHGCFPEGRSPPGAAASAAAKPPPLSAKDILLQQQQQLGHGGPEAAPRAPQALERYPLAAAAERPPRLGSDFGSSRPAASLAQPPTPQPPPVNGILVPNGFSKLEEPPELNRQSPNPRRGHAVPPTLVPLMNGSATPLPTALGLGGRAAASLAAVSGTAAASLGSAQPTDLGAHKRPASVSSSAAVEHEQREAAAKEKQPPPPAHRGPADSLSTAAGAAELSAEGAGKSRGSGEQDWVNRPKTVRDTLLALHQHGHSGPFESKFKKEPALTAVARTARKRKPSPEPEGEVGPPKINGEAQPWLSTSTEGLKIPMTPTSSFVSPPPPTASPHSNRTTPPEAAQNGQSPMAALILVADNAGGSHASKDANQVHSTTRRNSNSPPSPSSMNQRRLGPREVGGQGAGNTGGLEPVHPASLPDSSLATSAPLCCTLCHERLEDTHFVQCPSVPSHKFCFPCSRQSIKQQGASGEVYCPSGEKCPLVGSNVPWAFMQGEIATILAGDVKVKKERDS

SEQ ID NO: 8084 - protein, 79 aa, Homo sapiens
MAAPSMKERQVCWGARDEYWKCLDENLEDASQCKKLRSSFESSCPQQWIKYFDKRRDYLKFKEKFEAGQFEPSETTAKS

SEQ ID NO: 8085 - protein, 125 aa, Homo sapiens
MGPGGPLLSPSRGFLLCKTGWHSNRLLGDCGPHTPVSTALSFIAVGMAAPSMKERQVCWGARDEYWKCLDENLEDASQCKKLRSSFESSCPQQWIKYFDKRRDYLKFKEKFEAGQFEPSETTAKS

SEQ ID NO: 8086 - protein, 336 aa, Homo sapiens
MLQSLAGSSCVRLVERHRSAWCFGFLVLGYLLYLVFGAVVFSSVELPYEDLLRQELRKLKRRFLEEHECLSEQQLEQFLGRVLEASNYGVSVLSNASGNWNWDFTSALFFASTVLSTTGYGHTVPLSDGGKAFCIIYSVIGIPFTLLFLTAVVQRITVHVTRRPVLYFHIRWGFSKQVVAIVHAVLLGFVTVSCFFFIPAAVFSVLEDDWNFLESFYFCFISLSTIGLGDYVPGEGYNQKFRELYKIGITCYLLLGLIAMLVVLETFCELHELKKFRKMFYVKKDKDEDQVHIIEHDQLSFSSITDQAAGMKEDQKQNEPFVATQSSACVDGPANH

SEQ ID NO: 8087 - protein, 190 aa, Homo sapiens
MARHVFLTGPPGVGKTTLIHKASEVLKSSGVPVDGFYTEEVRQGGRRIGFDVVTLSGTRGPLSRVGLEPPPGKRECRVGQYVVDLTSFEQLALPVLRNADCSSGPGQRVCVIDEIGKMELFSQLFIQAVRQTLSTPGTIILGTIPVPKGKPLALVEEIRNRKDVKVFNVTKENRNHLLPDIVTCVQSSRK

SEQ ID NO: 8088 - protein, 290 aa, Homo sapiens
MSNKEGSGGFRKRKHDNFPHNQRREGKDVNSSSPVMLAFKSFQQELDARHDKYERLVKLSRDITVESKRTIFLLHRITSAPDMEDILTESEIKLDGVRQKIFQVAQELSGEDMHQFHRAITTGLQEYVEAVSFQHFIKTRSLISMDEINKQLIFTTEDNGKENKTPSSDAQDKQFGTWRLRVTPVDYLLGVADLTGELMRMCINSVGNGDIDTPFEVSQFLRQVYDGFSFIGNTGPYEVSKKLYTLKQSLAKVENACYALKVRGSEIPKHMLADVFSVKTEMIDQEEGIS

SEQ ID NO: 8089 - protein, 426 aa, Homo sapiens
MANDSGGPGGPSPSERDRQYCELCGKMENLLRCSRCRSSFYCCKEHQRQDWKKHKLVCQGSEGALGHGVGPHQHSGPAPPAAVPPPRAGAREPRKAAARRDNASGDAAKGKVKAKPPADPAAAASPCRAAAGGQGSAVAAEAEPGKEEPPARSSLFQEKANLYPPSNTPGDALSPGGGLRPNGQTKPLPALKLALEYIVPCMNKHGICVVDDFLGKETGQQIGDEVRALHDTGKFTDGQLVSQKSDSSKDIRGDKITWIEGKEPGCETIGLLMSSMDDLIRHCNGKLGSYKINGRTKAMVACYPGNGTGYVRHVDNPNGDGRCVTCIYYLNKDWDAKVSGGILRIFPEGKAQFADIEPKFDRLLFFWSDRRNPHEVQPAYATRYAITVWYFDADERARAKVKYLTGEKGVRVELNKPSDSVGKDVF

SEQ ID NO: 8090 - protein, 725 aa, Homo sapiens
MAMAMSDSGASRLRRQLESGGFEARLYVKQLSQQSDGDRDLQEHRQRIQALAEETAQNLKRNVYQNYRQFIETAREISYLESEMYQLSHLLTEQKSSLESIPLTLLPAAAAAGAAAASGGEEGVGGAGGRDHLRGQAGFFSTPGGASRDGSGPGEEGKQRTLTTLLEKVEGCRHLLETPGQYLVYNGDLVEYDADHMAQLQRVHGFLMNDCLLVATWLPQRRGMYRYNALYSLDGLAVVNVKDNPPMKDMFKLLMFPESRIFQAENAKIKREWLEVLEDTKRALSEKRRREQEEAAAPRGPPQVTSKATNPFEDDEEEEPAVPEVEEEKVDLSMEWIQELPEDLDVCIAQRDFEGAVDLLDKLNHYLEDKPSPPPVKELRAKVEERVRQLTEVLVFELSPDRSLRGGPKATRRAVSQLIRLGQCTKACELFLRNRAAAVHTAIRQLRIEGATLLYIHKLCHVFFTSLLETAREFEIDFAGTDSGCYSAFVVWARSAMGMFVDAFSKQVFDSKESLSTAAECVKVAKEHCQQLGDIGLDLTFIIHALLVKDIQGALHSYKEIIIEATKHRNSEEMWRRMNLMTPEALGKLKEEMKSCGVSNFEQYTGDDCWVNLSYTVVAFTKQTMGFLEEALKLYFPELHMVLLESLVEIILVAVQHVDYSLRCEQDPEKKAFIRQNASFLYETVLPVVEKRFEEGVGKPAKQLQDLRNASRLIRVNPESTTSVV

SEQ ID NO: 8091 - protein, 680 aa, Homo sapiens
MESSSSSNSYFSVGPTSPSAVVLLYSKELKKWDEFEDILEERRHVSDLKFAMKCYTPLVYKGITPCKPIDIKCSVLNSEEIHYVIKQLSKESLQSVDVLREEVSEILDEMSHKLRLGAIRFCAFTLSKVFKQIFSKVCVNEEGIQKLQRAIQEHPVVLLPSHRSYIDFLMLSFLLYNYDLPVPVIAAGMDFLGMKMVGELLRMSGAFFMRRTFGGNKLYWAVFSEYVKTMLRNGYAPVEFFLEGTRSRSAKTLTPKFGLLNIVMEPFFKREVFDTYLVPISISYDKILEETLYVYELLGVPKPKESTTGLLKARKILSENFGSIHVYFGDPVSLRSLAAGRMSRSSYNLVPRYIPQKQSEDMHAFVTEVAYKMELLQIENMVLSPWTLIVAVLLQNRPSMDFDALVEKTLWLKGLTQAFGGFLIWPDNKPAEEVVPASILLHSNIASLVKDQVILKVDSGDSEVVDGLMLQHITLLMCSAYRNQLLNIFVRPSLVAVALQMTPGFRKEDVYSCFRFLRDVFADEFIFLPGNTLKDFEEGCYLLCKSEAIQVTTKDILVTEKGNTVLEFLVGLFKPFVESYQIICKYLLSEEEDHFSEEQYLAAVRKFTSQLLDQGTSQCYDVLSSDVQKNALAACVRLGVVEKKKINNNCIFNVNEPATTKLEEMLGCKTPIGKPATAKL

SEQ ID NO: 8092 - protein, 293 aa, Homo sapiens
MRVDSSADPTMSQEQGPGSSTPPSSPTLLDALLQNLYDFGGTEGETEQKKIIKKRENKKRDVMASAALAAEPSPLPGSLIRGQRKSASSFFKELREERHCAPSGTPTGPEILAAAVPPSSLKNNREQVEVVEFHSNKKRKLTPDHNKNTKQANPSVLERDVDTQEFNLEKARLEVHRFGITGYGKGKERILEQERAIMLGAKPPKKSYVNYKVLQEQIKEKKAAKEEEKRLAQETDIFKKKKRKGQEDRKSKKKSAPSILSNGRIGQVGKFKNGTLILSPVDIKKINSSRVAK

SEQ ID NO: 8093 - protein, 292 aa, Homo sapiens
MRVDSSADPTMSQEQGPGSSTPPSSPTLLDALLQNLYDFGGTEGETEQKKIIKKRENKKRDVMASAALAAEPSPLPGSLIRGQRKSASSFFKELREERHCAPSGTPTGPEILAAAVPPSSLKNNREQVEVVEFHSNKKRKLTPDHNKNTKANPSVLERDVDTQEFNLEKARLEVHRFGITGYGKGKERILEQERAIMLGAKPPKKSYVNYKVLQEQIKEKKAAKEEEKRLAQETDIFKKKKRKGQEDRKSKKKSAPSILSNGRIGQVGKFKNGTLILSPVDIKKINSSRVAK

SEQ ID NO: 8094 - protein, 860 aa, Homo sapiens
MAPAGCCCCCCFWGGAVAAAGAARRVLLLLLLGVLSAGLRPGALATEHYSPLSLLKQELQHRQQQEAPAGGGGCSPQSGDWGDQYSAECGESSFLNFHDSDCEPKGSSPCDSLLSLNTEKILSQAKSIAEQKRFPFATDNDSTNEELAIAYVLIGSGLYDEAIRHFSTMLQEEPDLVSAIYGRGIAYGKKGLHDIKNAELALFELSRVITLEPDRPEVFEQRAEILSPLGRINEAVNDLTKAIQLQPSARLYRHRGTLYFISEDYATAHEDFQQSLELNKNQPIAMLYKGLTFFHRGLLKEAIESFKEALKQKVDFIDAYKSLGQAYRELGNFEAATESFQKALLLNQNHVQTLQLRGMMLYHHGSLQEALKNFKRCLQLEPYNEVCQYMKGLSHVAMGQFYEGIKAQTKVMLNDPLPGQKASPEYLKVKYLREYSRYLHAHLDTPLTEYNIDVDLPGSFKDHWAKNLPFLIEDYEEQPGLQPHIKDVLHQNFESYKPEVQELICVADRLGSLMQYETPGFLPNKRIHRAMGLAALEVMQAVQRTWTNSKVRMNGKTRLMQWRDMFDIAVKWRRIADPDQPVLWLDQMPARSLSRGFNNHINLIRGQVINMRYLEYFEKILHFIKDRILVYHGANNPKGLLEVREALEKVHKVEDLLPIMKQFNTKTKDGFTVNTKVPSLKDQGKEYDGFTITITGDKVGNILFSVETQTTEERTQLYHAEIDALYKDLTAKGKVLILSSEFGEADAVCNLILSLVYYFYNLMPLSRGSSVIAYSVIVGALMASGKEVAGKIPKGKLVDFEAMTAPGSEAFSKVAKSWMNLKSISPSYKTLPSVSETFPTLRSMIEVLNTDSSPRCLKKL

SEQ ID NO: 8095 - protein, 806 aa, Homo sapiens
MAPAGCCCCCCFWGGAVAAAGAARRVLLLLLLGVLSAGLRPGALATEHYSPLSLLKQELQHRQQQEAPAGGGGCSPQSGDWGDQYSAECGESSFLNFHDSDCEPKGSSPCDSLLSLNTEKILSQAKSIAEQKRFPFATDNDSTNEELAIAYVLIGSGLYDEAIRHFSTMLQILSPLGRINEAVNDLTKAIQLQPSARLYRHRGTLYFISEDYATAHEDFQQSLELNKNQPIAMLYKGLTFFHRGLLKEAIESFKEALKQKVDFIDAYKSLGQAYRELGNFEAATESFQKALLLNQNHVQTLQLRGMMLYHHGSLQEALKNFKRCLQLEPYNEVCQYMKGLSHVAMGQFYEGIKAQTKVMLNDPLPGQKASPEYLKVKYLREYSRYLHAHLDTPLTEYNIDVDLPGSFKDHWAKNLPFLIEDYEEQPGLQPHIKDVLHQNFESYKPEVQELICVADRLGSLMQYETPGFLPNKRIHRAMGLAALEVMQAVQRTWTNSKVRMNGKTRLMQWRDMFDIAVKWRRIADPDQPVLWLDQMPARSLSRGFNNHINLIRGQVINMRYLEYFEKILHFIKDRILVYHGANNPKGLLEVREALEKVHKVEDLLPIMKFNTKTKDGFTVNTKVPSLKDQGKEYDGFTITITGDKVGNILFSVETQTTEERTQLYHAEIDALYKDLTAKGKVLILSSEFGEADAVCNLILSLVYYFYNLMPLSRGSSVIAYSVIVGALMASGKEVAGKIPKGKLVDFEAMTAPGSEAFSKVAKSWMNLKSISPSYKTLPSVSETFPTLRSMIEVLNTDSSPRCLKKL

SEQ ID NO: 8096 - protein, 327 aa, Homo sapiens
MASMAAAIAASRSAVMSGNRPLDDRERKRFTYFSSLSPMARKIMQDKEKIREKYGPEWARLPPAQQDEIIDRCLVGPRAPAPRDPGDSEELTRFPGLRGPTGQKVVRFGDEDLTWQDEHSAPFSWETKSQMEFSISALSIQEPSNGTAASEPRPLSKASQGSQALKSSQGSRSSSLDALGPTRKEEEASFWKINAERSRGEGPEAEFQSLTPSQIKSMEKGEKVLPPCYRQEPAPKDREAKVERPSTLRQEQRPLPNVSTERERPQPVQAFSSALHEAAPSQLEGKLPSPDVRQDDGEDTLFSEPKFAQVSSSNVVLKTGFDFLDNW

SEQ ID NO: 8097 - protein, 485 aa, Homo sapiens
MRKRAPQSEMAPAGVSLRATILCLLAWAGLAAGDRVYIHPFHLVIHNESTCEQLAKANAGKPKDPTFIPAPIQAKTSPVDEKALQDQLVLVAAKLDTEDKLRAAMVGMLANFLGFRIYGMHSELWGVVHGATVLSPTAVFGTLASLYLGALDHTADRLQAILGVPWKDKNCTSRLDAHKVLSALQAVQGLLVAQGRADSQAQLLLSTVVGVFTAPGLHLKQPFVQGLALYTPVVLPRSLDFTELDVAAEKIDRFMQAVTGWKTGCSLMGASVDSTLAFNTYVHFQGKMKGFSLLAEPQEFWVDNSTSVSVPMLSGMGTFQHWSDIQDNFSVTQVPFTESACLLLIQPHYASDLDKVEGLTFQQNSLNWMKKLSPRTIHLTMPQLVLQGSYDLQDLLAQAELPAILHTELNLQKLSNDRIRVGEVLNSIFFELEADEREPTESTQQLNKPEVLEVTLNRPFLFAVYDQSATALHFLGRVANPLSTA

SEQ ID NO: 8098 - protein, 571 aa, Homo sapiens
MRRRSRMLLCFAFLWVLGIAYYMYSGGGSALAGGAGGGAGRKEDWNEIDPIKKKDLHHSNGEEKAQSMETLPPGKVRWPDFNQEAYVGGTMVRSGQDPYARNKFNQVESDKLRMDRAIPDTRHDQCQRKQWRVDLPATSVVITFHNEARSALLRTVVSVLKKSPPHLIKEIILVDDYSNDPEDGALLGKIEKVRVLRNDRREGLMRSRVRGADAAQAKVLTFLDSHCECNEHWLEPLLERVAEDRTRVVSPIIDVINMDNFQYVGASADLKGGFDWNLVFKWDYMTPEQRRSRQGNPVAPIKTPMIAGGLFVMDKFYFEELGKYDMMMDVWGGENLEISFRVWQCGGSLEIIPCSRVGHVFRKQHPYTFPGGSGTVFARNTRRAAEVWMDEYKNFYYAAVPSARNVPYGNIQSRLELRKKLSCKPFKWYLENVYPELRVPDHQDIAFGALQQGTNCLDTLGHFADGVVGVYECHNAGGNQEWALTKEKSVKHMDLCLTVVDRAPGSLIKLQGCRENDSRQKWEQIEGNSKLRHVGSNLCLDSRTAKSGGLSVEVCGPALSQQWKFTLNLQQ

SEQ ID NO: 8099 - protein, 738 aa, Homo sapiens
MRGPPAWPLRLLEPPSPAEPGRLLPVACVWAAASRVPGSLSPFTGLRPARLWGAGPALLWGVGAARRWRSGCRGGGPGASRGVLGLARLLGLWARGPGSCRCGAFAGPGAPRLPRARFPGGPAAAAWAGDEAWRRGPAAPPGDKGRLRPAAAGLPEARKLLGLAYPERRRLAAAVGFLTMSSVISMSAPFFLGKIIDVIYTNPTVDYSDNLTRLCLGLSAVFLCGAAANAIRVYLMQTSGQRIVNRLRTSLFSSILRQEVAFFDKTRTGELINRLSSDTALLGRSVTENLSDGLRAGAQASVGISMMFFVSPNLATFVLSVVPPVSIIAVIYGRYLRKLTKVTQDSLAQATQLAEERIGNVRTVRAFGKEMTEIEKYASKVDHVMQLARKEAFARAGFFGATGLSGNLIVLSVLYKGGLLMGSAHMTVGELSSFLMYAFWVGISIGGLSSFYSELMKGLGAGGRLWELLEREPKLPFNEGVILNEKSFQGALEFKNVHFAYPARPEVPIFQDFSLSIPSGSVTALVGPSGSGKSTVLSLLLRLYDPASGTISLDGHDIRQLNPVWLRSKIGTVSQEPILFSCSIAENIAYGADDPSSVTAEEIQRVAEVANAVAFIRNFPQGFNTVVGEKGVLLSGGQKQRIAIARALLKNPKILLLDEATSALDAENEYLVQEALDRLMDGRTVLVIAHRLSTIKNANMVAVLDQGKITEYGKHEELLSKPNGIYRKLMNKQSFISA

SEQ ID NO: 8100 - protein, 218 aa, Homo sapiens
MSQTAMSETYDFLFKFLVIGNAGTGKSCLLHQFIEKKFKDDSNHTIGVEFGSKIINVGGKYVKLQIWDTAGQERFRSVTRSYYRGAAGALLVYDITSRETYNALTNWLTDARMLASQNIVIILCGNKKDLDADREVTFLEASRFAQENELMFLETSALTGENVEEAFVQCARKILNKIESGELDPERMGSGIQYGDAALRQLRSPRRAQAPNAQECGC

SEQ ID NO: 8101 - protein, 258 aa, Homo sapiens
MPPQQGDPAFPDRCEAPPVPPRRERGGRGGRGPGEPGGRGRAGGAEGRGVKCVLVGDGAVGKTSLVVSYTTNGYPTEYIPTAFDNFSAVVSVDGRPVRLQLCDTAGQDEFDKLRPLCYTNTDIFLLCFSVVSPSSFQNVSEKWVPEIRCHCPKAPIILVGTQSDLREDVKVLIELDKCKEKPVPEEAAKLCAEEIKAASYIECSALTQKNLKEVFDAAIVAGIQYSDTQQQPKKSKSRTPDKMKNLSKSWWKKYCCFV

SEQ ID NO: 8102 - protein, 130 aa, Homo sapiens
MSGRGKQGGKARAKAKSRSSRAGLQFPVGRVHRLLRKGNYSERVGAGAPVYLAAVLEYLTAEILELAGNAARDNKKTRIIPRHLQLAIRNDEELNKLLGRVTIAQGGVLPNIQAVLLPKKTESHHKAKGK

SEQ ID NO: 8103 - protein, 356 aa, Homo sapiens
MATAALLRGATPGRGGPVWRWRLRAAPRCRLAHSSCSPGGDPTAGAAWACFRLDGRTLLRVRGPDAAPFLLGLLTNELPLPSPAAAGAPPAARAGYAHFLNVQGRTLYDVILYGLQEHSEVSGFLLECDSSVQGALQKHLALYRIRRKVTVEPHPELRVWAVLPSSPEACGAASLQERAGAAAILIRDPRTARMGWRLLTQDEGPALVPGGRLGDLWDYHQHRYLQGVPEGVRDLPPGVALPLESNLAFMNGVSFTKGCYIGQELTARTHHMGVIRKRLFPVRFLDPLPTSGITPGATVLTASGQTVGKFRAGQGNVGLALLWSEKIKGPLHIRASEGAQVALAASVPDWWPTVSK

SEQ ID NO: 8104 - protein, 242 aa, Homo sapiens
MSGPRPVVLSGPSGAGKSTLLKRLLQEHSGIFGFSVSHTTRNPRPGEENGKDYYFVTREVMQRDIAAGDFIEHAEFSGNLYGTSKVAVQAVQAMNRICVLDVDLQGVRNIKATDLRPIYISVQPPSLHVLRLRQRNTETEESLVKRLAAAQADMESSKEPGLFDVVIINDSLDQAYAELKEALSEVGPSLCLPGQGPRGGLGARPLLSMRPLRKSRKLKGPAPEACCLFSAPRAHTGPGQQH

SEQ ID NO: 8105 - protein, 164 aa, Homo sapiens
MAAVGSLLGLAASSWLGGQNASDHSLWLLRKPRGSSCPGTGHQLCRLRQSTVKATGPALRRLHTSSWRADSSRASLTRVHRQAYARLYPVLLVKQDGSTIHIRYREPRRMLAMPIDLDTLSPEERRARLRKREAQLQSRKEYEQELSDDLHVERYRQFWTRTKK

SEQ ID NO: 8106 - protein, 723 aa, Homo sapiens
MGSRCALALAVLSALLCQVWSSGVFELKLQEFVNKKGLLGNRNCCRGGAGPPPCACRTFFRVCLKHYQASVSPEPPCTYGSAVTPVLGVDSFSLPDGGGADSAFSNPIRFPFGFTWPGTFSLIIEALHTDSPDDLATENPERLISRLATQRHLTVGEEWSQDLHSSGRTDLKYSYRFVCDEHYYGEGCSVFCRPRDDAFGHFTCGERGEKVCNPGWKGPYCTEPICLPGCDEQHGFCDKPGECKCRVGWQGRYCDECIRYPGCLHGTCQQPWQCNCQEGWGGLFCNQDLNYCTHHKPCKNGATCTNTGQGSYTCSCRPGYTGATCELGIDECDPSPCKNGGSCTDLENSYSCTCPPGFYGKICELSAMTCADGPCFNGGRCSDSPDGGYSCRCPVGYSGFNCEKKIDYCSSSPCSNGAKCVDLGDAYLCRCQAGFSGRHCDDNVDDCASSPCANGGTCRDGVNDFSCTCPPGYTGRNCSAPVSRCEHAPCHNGATCHERGHRYVCECARGYGGPNCQFLLPELPPGPAVVDLTEKLEGQGGPFPWVAVCAGVILVLMLLLGCAAVVVCVRLRLQKHRPPADPCRGETETMNNLANCQREKDISVSIIGATQIKNTNKKADFHGDHSADKNGFKARYPAVDYNLVQDLKGDDTAVRDAHSKRDTKCQPQGSSGEEKGTPTTLRGGEASERKRPDSGCSTSKDTKYQSVYVISEEKDECVIATEV

SEQ ID NO: 8107 - protein, 326 aa, Homo sapiens
MAAPASVMGPLGPSALGLLLLLLVVAPPRVAALVHRQPENQGISLTGSVACGRPSMEGKILGGVPAPERKWPWQVSVHYAGLHVCGGSILNEYWVLSAAHCFHRDKNIKIYDMYVGLVNLRVAGNHTQWYEVNRVILHPTYEMYHPIGGDVALVQLKTRIVFSESVLPVCLATPEVNLTSANCWATGWGLVSKQGETSDELQEMQLPLILEPWCHLLYGHMSYIMPDMLCAGDILNAKTVCEGDSGGPLVCEFNRSWLQIGIVSWGRGCSNPLYPGVYASVSYFSKWICDNIEITPTPAQPAPALSPALGPTLSVLMAMLAGWSVL

SEQ ID NO: 8108 - protein, 1638 aa, Homo sapiens
MSGEVRLRQLEQFILDGPAQTNGQCFSVETLLDILICLYDECNNSPLRREKNILEYLEWAKPFTSKVKQMRLHREDFEILKVIGRGAFGEVAVVKLKNADKVFAMKILNKWEMLKRAETACFREERDVLVNGDNKWITTLHYAFQDDNNLYLVMDYYVGGDLLTLLSKFEDRLPEDMARFYLAEMVIAIDSVHQLHYVHRDIKPDNILMDMNGHIRLADFGSCLKLMEDGTVQSSVAVGTPDYISPEILQAMEDGKGRYGPECDWWSLGVCMYEMLYGETPFYAESLVETYGKIMNHKERFQFPAQVTDVSENAKDLIRRLICSREHRLGQNGIEDFKKHPFFSGIDWDNIRNCEAPYIPEVSSPTDTSNFDVDDDCLKNSETMPPPTHTAFSGHHLPFVGFTYTSSCVLSDRSCLRVTAGPTSLDLDVNVQRTLDNNLATEAYERRIKRLEQEKLELSRKLQESTQTVQALQYSTVDGPLTASKDLEIKNLKEEIEKLRKQVTESSHLEQQLEEANAVRQELDDAFRQIKAYEKQIKTLQQEREDLNKLEVHTEALAAEASKDRKLREQSEHYSKQLENELEGLKQKQISYSPGVCSIEHQQEITKLKTDLEKKSIFYEEELSKREGIHANEIKNLKKELHDSEGQQLALNKEIMILKDKLEKTRRESQSEREEFESEFKQQYEREKVLLTEENKKLTSELDKLTTLYENLSIHNQQLEEEVKDLADKKESVAHWEAQITEIIQWVSDEKDARGYLQALASKMTEELEALRNSSLGTRATDMPWKMRRFAKLDMSARLELQSALDAEIRAKQAIQEELNKVKASNIITECKLKDSEKKNLELLSEIEQLIKDTEELRSEKGIEHQDSQHSFLAFLNTPTDALDQFETVDSTPLSVHTPTLRKKGCPGSTGFPPKRKTHQFFVKSFTTPTKCHQCTSLMVGLIRQGCSCEVCGFSCHITCVNKAPTTCPVPPEQTKGPLGIDPQKGIGTAYEGHVRIPKPAGVKKGWQRALAIVCDFKLFLYDIAEGKASQPSVVISQVIDMRDEEFSVSSVLASDVIHASRKDIPCIFRVTASQLSASNNKCSILMLADTENEKNKWVGVLSELHKILKKNKFRDRSVYVPKEAYDSTLPLIKTTQAAAIIDHERIALGNEEGLFVVHVTKDEIIRVGDNKKIHQIELIPNDQLVAVISGRNRHVRLFPMSALDGRETDFYKLSETKGCQTVTSGKVRHGALTCLCVAMKRQVLCYELFQSKTRHRKFKEIQVPYNVQWMAIFSEQLCVGFQSGFLRYPLNGEGNPYSMLHSNDHTLSFIAHQPMDAICAVEISSKEYLLCFNSIGIYTDCQGRRSRQQELMWPANPSSCCYNAPYLSVYSENAVDIFDVNSMEWIQTLPLKKVRPLNNEGSLNLLGLETIRLIYFKNKMAEGDELVVPETSDNSRKQMVRNINNKRRYSFRVPEEERMQQRREMLRDPEMRNKLISNPTNFNHIAHMGPGDGIQILKDLPMNPRPQESRTVFSGSVSIPSITKSRPEPGRSMSASSGLSARSSAQNGSALKREFSGGSYSAKRQPMPSPSEGSLSSGGMDQGSDAPARDFDGEDSDSPRHSTASNSSNLSSPPSPASPRKTKSLSLESTDRGSWDP

SEQ ID NO: 8109 - protein, 1719 aa, Homo sapiens
MSGEVRLRQLEQFILDGPAQTNGQCFSVETLLDILICLYDECNNSPLRREKNILEYLEWAKPFTSKVKQMRLHREDFEILKVIGRGAFGEVAVVKLKNADKVFAMKILNKWEMLKRAETACFREERDVLVNGDNKWITTLHYAFQDDNNLYLVMDYYVGGDLLTLLSKFEDRLPEDMARFYLAEMVIAIDSVHQLHYVHRDIKPDNILMDMNGHIRLADFGSCLKLMEDGTVQSSVAVGTPDYISPEILQAMEDGKGRYGPECDWWSLGVCMYEMLYGETPFYAESLVETYGKIMNHKERFQFPAQVTDVSENAKDLIRRLICSREHRLGQNGIEDFKKHPFFSGIDWDNIRNCEAPYIPEVSSPTDTSNFDVDDDCLKNSETMPPPTHTAFSGHHLPFVGFTYTSSCVLSDRSCLRVTAGPTSLDLDVNVQRTLDNNLATEAYERRIKRLEQEKLELSRKLQESTQTVQALQYSTVDGPLTASKDLEIKNLKEEIEKLRKQVTESSHLEQQLEEANAVRQELDDAFRQIKAYEKQIKTLQQEREDLNKELVQASERLKNQSKELKDAHCQRKLAMQEFMEINERLTELHTQKQKLARHVRDKEEEVDLVMQKVESLRQELRRTERAKKELEVHTEALAAEASKDRKLREQSEHYSKQLENELEGLKQKQISYSPGVCSIEHQQEITKLKTDLEKKSIFYEEELSKREGIHANEIKNLKKELHDSEGQQLALNKEIMILKDKLEKTRRESQSEREEFESEFKQQYEREKVLLTEENKKLTSELDKLTTLYENLSIHNQQLEEEVKDLADKKESVAHWEAQITEIIQWVSDEKDARGYLQALASKMTEELEALRNSSLGTRATDMPWKMRRFAKLDMSARLELQSALDAEIRAKQAIQEELNKVKASNIITECKLKDSEKKNLELLSEIEQLIKDTEELRSEKGIEHQDSQHSFLAFLNTPTDALDQFETVDSTPLSVHTPTLRKKGCPGSTGFPPKRKTHQFFVKSFTTPTKCHQCTSLMVGLIRQGCSCEVCGFSCHITCVNKAPTTCPVPPEQTKGPLGIDPQKGIGTAYEGHVRIPKPAGVKKGWQRALAIVCDFKLFLYDIAEGKASQPSVVISQVIDMRDEEFSVSSVLASDVIHASRKDIPCIFRVTASQLSASNNKCSILMLADTENEKNKWVGVLSELHKILKKNKFRDRSVYVPKEAYDSTLPLIKTTQAAAIIDHERIALGNEEGLFVVHVTKDEIIRVGDNKKIHQIELIPNDQLVAVISGRNRHVRLFPMSALDGRETDFYKLSETKGCQTVTSGKVRHGALTCLCVAMKRQVLCYELFQSKTRHRKFKEIQVPYNVQWMAIFSEQLCVGFQSGFLRYPLNGEGNPYSMLHSNDHTLSFIAHQPMDAICAVEISSKEYLLCFNSIGIYTDCQGRRSRQQELMWPANPSSCCYNAPYLSVYSENAVDIFDVNSMEWIQTLPLKKVRPLNNEGSLNLLGLETIRLIYFKNKMAEGDELVVPETSDNSRKQMVRNINNKRRYSFRVPEEERMQQRREMLRDPEMRNKLISNPTNFNHIAHMGPGDGIQILKDLPMNPRPQESRTVFSGSVSIPSITKSRPEPGRSMSASSGLSARSSAQNGSALKREFSGGSYSAKRQPMPSPSEGSLSSGGMDQGSDAPARDFDGEDSDSPRHSTASNSSNLSSPPSPASPRKTKSLSLESTDRGSWDP

SEQ ID NO: 8110 - protein, 647 aa, Homo sapiens
MAAILGDTIMVAKGLVKLTQAAVETHLQHLGIGGELIMAARALQSTAVEQIGMFLGKVQGQDKHEEYFAENFGGPEGEFHFSVPHAAGASTDFSSASAPDQSAPPSLGHAHSEGPAPAYVASGPFREAGFPGQASSPLGRANGRLFANPRDSFSAMGFQRRFFHQDQSPVGGLTAEDIEKARQAKARPENKQHKQTLSEHARERKVPVTRIGRLANFGGLAVGLGFGALAEVAKKSLRSEDPSGKKAVLGSSPFLSEANAERIVRTLCKVRGAALKLGQMLSIQDDAFINPHLAKIFERVRQSADFMPLKQMMKTLNNDLGPNWRDKLEYFEERPFAAASIGQVHLARMKGGREVAMKIQYPGVAQSINSDVNNLMAVLNMSNMLPEGLFPEHLIDVLRRELALECDYQREAACARKFRDLLKGHPFFYVPEIVDELCSPHVLTTELVSGFPLDQAEGLSQEIRNEICYNILVLCLRELFEFHFMQTDPNWSNFFYDPQQHKVALLDFGATREYDRSFTDLYIQIIRAAADRDRETVRAKSIEMKFLTGYEVKVMEDAHLDAILILGEAFASDEPFDFGTQSTTEKIHNLIPVMLRHRLVPPPEETYSLHRKMGGSFLICSKLKARFPCKAMFEEAYSNYCKRQAQQ

SEQ ID NO: 8111 - protein, 448 aa, Homo sapiens
MLTFMASDSEEEVCDERTSLMSAESPTPRSCQEGRQGPEDGENTAQWRSQENEEDGEEDPDRYVCSGVPGRPPGLEEELTLKYGAKHVIMLFVPVTLCMIVVVATIKSVRFYTEKNGQLIYTPFTEDTPSVGQRLLNSVLNTLIMISVIVVMTIFLVVLYKYRCYKFIHGWLIMSSLMLLFLFTYIYLGEVLKTYNVAMDYPTLLLTVWNFGAVGMVCIHWKGPLVLQQAYLIMISALMALVFIKYLPEWSAWVILGAISVYDLVAVLCPKGPLRMLVETAQERNEPIFPALIYSSAMVWTVGMAKLDPSSQGALQLPYDPEMEEDSYDSFGEPSYPEVFEPPLTGYPGEELEEEEERGVKLGLGDFIFYSVLVGKAAATGSGDWNTTLACFVAILIGLCLTLLLLAVFKKALPALPISITFGLIFYFSTDNLVRPFMDTLASHQLYI

SEQ ID NO: 8112 - protein, 1172 aa, Homo sapiens
MVWRLVLLALWVWPSTQAGHQDKDTTFDLFSISNINRKTIGAKQFRGPDPGVPAYRFVRFDYIPPVNADDLSKITKIMRQKEGFFLTAQLKQDGKSRGTLLALEGPGLSQRQFEIVSNGPADTLDLTYWIDGTRHVVSLEDVGLADSQWKNVTVQVAGETYSLHVGCDLIDSFALDEPFYEHLQAEKSRMYVAKGSARESHFRGLLQNVHLVFENSVEDILSKKGCQQGQGAEINAISENTETLRLGPHVTTEYVGPSSERRPEVCERSCEELGNMVQELSGLHVLVNQLSENLKRVSNDNQFLWELIGGPPKTRNMSACWQDGRFFAENETWVVDSCTTCTCKKFKTICHQITCPPATCASPSFVEGECCPSCLHSVDGEEGWSPWAEWTQCSVTCGSGTQQRGRSCDVTSNTCLGPSIQTRACSLSKCDTRIRQDGGWSHWSPWSSCSVTCGVGNITRIRLCNSPVPQMGGKNCKGSGRETKACQGAPCPIDGRWSPWSPWSACTVTCAGGIRERTRVCNSPEPQYGGKACVGDVQERQMCNKRSCPVDGCLSNPCFPGAQCSSFPDGSWSCGSCPVGFLGNGTHCEDLDECALVPDICFSTSKVPRCVNTQPGFHCLPCPPRYRGNQPVGVGLEAAKTEKQVCEPENPCKDKTHNCHKHAECIYLGHFSDPMYKCECQTGYAGDGLICGEDSDLDGWPNLNLVCATNATYHCIKDNCPHLPNSGQEDFDKDGIGDACDDDDDNDGVTDEKDNCQLLFNPRQADYDKDEVGDRCDNCPYVHNPAQIDTDNNGEGDACSVDIDGDDVFNERDNCPYVYNTDQRDTDGDGVGDHCDNCPLVHNPDQTDVDNDLVGDQCDNNEDIDDDGHQNNQDNCPYISNANQADHDRDGQGDACDPDDDNDGVPDDRDNCRLVFNPDQEDLDGDGRGDICKDDFDNDNIPDIDDVCPENNAISETDFRNFQMVPLDPKGTTQIDPNWVIRHQGKELVQTANSDPGIAVGFDEFGSVDFSGTFYVNTDRDDDYAGFVFGYQSSSRFYVVMWKQVTQTYWEDQPTRAYGYSGVSLKVVNSTTGTGEHLRNALWHTGNTPGQVRTLWHDPRNIGWKDYTAYRWHLTHRPKTGYIRVLVHEGKQVMADSGPIYDQTYAGGRLGLFVFSQEMVYFSDLKYECRDI

SEQ ID NO: 8113 - protein, 528 aa, Homo sapiens
MAAVLNAERLEVSVDGLTLSPDPEERPGAEGAPLLPPPLPPPSPPGSGRGPGASGEQPEPGEAAAGGAAEEARRLEQRWGFGLEELYGLALRFFKEKDGKAFHPTYEEKLKLVALHKQVLMGPYNPDTCPEVGFFDVLGNDRRREWAALGNMSKEDAMVEFVKLLNRCCHLFSTYVASHKIEKEEQEKKRKEEEERRRREEEERERLQKEEEKRRREEEERLRREEEERRRIEEERLRLEQQKQQIMAALNSQTAVQFQQYAAQQYPGNYEQQQILIRQLQEQHYQQYMQQLYQVQLAQQQAALQKQQEVVVAGSSLPTSSKVNATVPSNMMSVNGQAKTHTDSSEKELEPEAAEEALENGPKESLPVIAAPSMWTRPQIKDFKEKIQQDADSVITVGRGEVVTVRVPTHEEGSYLFWEFATDNYDIGFGVYFEWTDSPNTAVSVHVSESSDDDEEEEENIGCEEKAKKNANKPLLDEIVPVYRRDCHEEVYAGSHQYPGRGVYLLKFDNSYSLWRSKSVYYRVYYTR

SEQ ID NO: 8114 - protein, 136 aa, Homo sapiens; identical to SEQ ID NO: 1518

SEQ ID NO: 8115 - protein, 366 aa, Homo sapiens
MWPLWLCWALWVLPLAGPGAALTEEQLLGSLLRQLQLSEVPVLDRADMEKLVIPAHVRAQYVVLLRRSHGDRSRGKRFSQSFREVAGRFLASEASTHLLVFGMEQRLPPNSELVQAVLRLFQEPVPKAALHRHGRLSPRSAQARVTVEWLRVRDDGSNRTSLIDSRLVSVHESGWKAFDVTEAVNFWQQLSRPRQPLLLQVSVQREHLGPLASGAHKLVRFASQGAPAGLGEPQLELHTLDLRDYGAQGDCDPEAPMTEGTRCCRQEMYIDLQGMKWAKNWVLEPPGFLAYECVGTCQQPPEALAFNWPFLGPRQCIASETASLPMIVSIKEGGRTRPQVVSLPNMRVQKCSCASDGALVPRRLQP

SEQ ID NO: 8116 - protein, 570 aa, Homo sapiens
MSEQSICQARAAVMVYDDANKKWVPAGGSTGFSRVHIYHHTGNNTFRVVGRKIQDHQVVINCAIPKGLKYNQATQTFHQWRDARQVYGLNFGSKEDANVFASAMMHALEVLNSQETGPTLPRQNSQLPAQVQNGPSQEELEIQRRQLQEQQRQKELERERLERERMERERLERERLERERLERERLEQEQLERERQERERQERLERQERLERQERLERQERLDRERQERQERERLERLERERQERERQEQLEREQLEWERERRISSAAAPASVETPLNSVLGDSSASEPGLQAASQPAETPSQQGIVLGPLAPPPPPPLPPGPAQASVALPPPPGPPPPPPLPSTGPPPPPPPPPLPNQVPPPPPPPPAPPLPASGFFLASMSEDNRPLTGLAAAIAGAKLRKVSRMEDTSFPSGGNAIGVNSASSKTDTGRGNGPLPLGGSGLMEEMSALLARRRRIAEKGSTIETEQKEDKGEDSEPVTSKASSTSTPEPTRKPWERTNTMNGSKSPVISRPKSTPLSQPSANGVQTEGLDYDRLKQDILDEMRKELTKLKEELIDAIRQELSKSNTA

SEQ ID NO: 8117 - protein, 591 aa, Homo sapiens
MSEQSICQARAAVMVYDDANKKWVPAGGSTGFSRVHIYHHTGNNTFRVVGRKIQDHQVVINCAIPKGLKYNQATQTFHQWRDARQVYGLNFGSKEDANVFASAMMHALEVLNSQETGPTLPRQNSQLPAQVQNGPSQEELEIQRRQLQEQQRQKELERERLERERMERERLERERLERERLERERLEQEQLERERQERERQERLERQERLERQERLERQERLDRERQERQERERLERLERERQERERQEQLEREQLEWERERRISSAAAPASVETPLNSVLGDSSASEPGLQAASQPAETPSQQGIVLGPLAPPPPPPLPPGPAQASVALPPPPGPPPPPPLPSTGPPPPPPPPPLPNQVPPPPPPPPAPPLPASGFFLASMSEDNRPLTGLAAAIAGAKLRKVSRMEDTSFPSGGNAIGVNSASSKTDTGRGNGPLPLGGSGLMEEMSALLARRRRIAEKGSTIETEQKEDKGEDSEPVTSKASSTSTPEPTRKPWERTNTMNGSKSPVISRRDSPRKNQIVFDNRSYDSLHRPKSTPLSQPSANGVQTEGLDYDRLKQDILDEMRKELTKLKEELIDAIRQELSKSNTA

SEQ ID NO: 8118 - protein, 399 aa, Homo sapiens
MAATAAAVVAEEDTELRDLLVQTLENSGVLNRIKAELRAAVFLALEEQEKVENKTPLVNESLKKFLNTKDGRLVASLVAEFLQFFNLDFTLAVFQPETSTLQGLEGRENLARDLGIIEAEGTVGGPLLLEVIRRCQQKEKGPTTGEGALDLSDVHSPPKSPEGKTSAQTTPSKIPRYKGQGKKKTSGQKAGDKKANDEANQSDTSVSLSEPKSKSSLHLLSHETKIGSFLSNRTLDGKDKAGLCPDEDDMEGDSFFDDPIPKPEKTYGLRKEPRKQAGSLASLSDAPPLKSGLSSLAGAPSLKDSESKRGNTVLKDLKLISDKIGSLGLGTGEDDDYVDDFNSTSHRSEKSEISIGEEIEEDLSVEIDDINTSDKLDDLTQDLTVSQLSDVADYLEDVA

SEQ ID NO: 8119 - protein, 228 aa, Homo sapiens
METFIPIDLTTENQEMDKEETKTKPRLLRYEEKKYEDVKPLETQPAEIAEKETLEYKTVRTFSESLKSEKTEDYLRESIIQQHMVSPEPASLKEKGKSRRKKDQTHACPNVRKARPVSYDRTEPKDDDVIRNIIRLREKLGWQTILPQHSLKYGSSKIAIQKITLKKPLEDDGEFVYCLPRKSPKSLYNPYDLQVVSAHTAKHCKEFWVITASFISKRYLVICGAVYI

SEQ ID NO: 8120 - protein, 137 aa, Homo sapiens
MEAVVFVFSLLDCCALIFLSVYFIITLSDLECDYINARSCCSKLNKWVIPELIGHTIVTVLLLMSLHWFIFLLNLPVATWNIYRYIMVPSGNMGVFDPTEIHNRGQLKSHMKEAMIKLGFHLLCFFMYLYSGSNCPC

SEQ ID NO: 8121 - protein, 92 aa, Homo sapiens
MEAVVFVFSLLDCCALIFLSVYFIITLSDLECDYINARSCCSKLNKWVIPELIGHTIVTVLLLMSLHWFIFLLNLPVATWNIYRMILALIND

SEQ ID NO: 8122 - protein, 482 aa, Homo sapiens
MPPSPLDDRVVVALSRPVRPQDLNLCLDSSYLGSANPGSNSHPPVIATTVVSLKAANLTYMPSSSGSARSLNCGCSSASCCTVATYDKDNQAQTQAIAAGTTTTAIGTSTTCPANQMVNNNENTGSLSPSSGVGSPVSGTPKQLASIKIIYPNDLAKKMTKCSKSHLPSQGPVIIDCRPFMEYNKSHIQGAVHINCADKISRRRLQQGKITVLDLISCREGKDSFKRIFSKEIIVYDENTNEPSRVMPSQPLHIVLESLKREGKEPLVLKGGLSSFKQNHENLCDNSLQLQECREVGGGASAASSLLPQPIPTTPDIENAELTPILPFLFLGNEQDAQDLDTMQRLNIGYVINVTTHLPLYHYEKGLFNYKRLPATDSNKQNLRQYFEEAFEFIEEAHQCGKGLLIHCQAGVSRSATIVIAYLMKHTRMTMTDAYKFVKGKRPIISPNLNFMGQLLEFEEDLNNGVTPRILTPKLMGVETVV

SEQ ID NO: 8123 - protein, 488 aa, Homo sapiens
MFAAGLAPFYASNFSLWSAAYCSSAGPGGCSFPLDPAAVKKPSFCIADILHAGVGDLGAAPEGLAGASAAALTAHLGSVHPHASFQAAARSPLRPTPVVAPSEVPAGFPQRLSPLSAAYHHHHPQQQQQQQQPQQQQPPPPPRAGALQPPASGTRVVPNPHHSGSAPAPSSKDLKFGIDRILSAEFDPKVKEGNTLRDLTSLLTGGRPAGVHLSGLQPSAGQFFASLDPINEASAILSPLNSNPRNSVQHQFQDTFPGPYAVLTKDTMPQTYKRKRSWSRAVFSNLQRKGLEKRFEIQKYVTKPDRKQLAAMLGLTDAQVKVWFQNRRMKWRHSKEAQAQKDKDKEAGEKPSGGAPAADGEQDERSPSRSEGEAESESSDSESLDMAPSDTERTEGSERSLHQTTVIKAPVTGALITASSAGSGGSSGGGGNSFSFSSASSLSSSSTSAGCASSLGGGGASELLPATQPTASSAPKSPEPAQGALGCL

SEQ ID NO: 8124 - protein, 159 aa, Homo sapiens
MDLAGLLKSQFLCHLVFCYVFIASGLIINTIQLFTLLLWPINKQLFRKINCRLSYCISSQLVMLLEWWSGTECTIFTDPRAYLKYGKENAIVVLNHKFEIDFLCGWSLSERFGLLGVSQKCIPPCLTHFSGSAPPLVFLLLVIQNLQKNQQSFYLMKWS

SEQ ID NO: 8125 - protein, 337 aa, Homo sapiens
MGAAGSSALARFVLLAQSRPGWLGVAALGLTAVALGAVAWRRAWPTRRRRLLQQVGTVAQLWIYPVKSCKGVPVSEAECTAMGLRSGNLRDRFWLVINQEGNMVTARQEPRLVLISLTCDGDTLTLSAAYTKDLLLPIKTPTTNAVHKCRVHGLEIEGRDCGEATAQWITSFLKSQPYRLVHFEPHMRPRRPHQIADLFRPKDQIAYSDTSPFLILSEASLADLNSRLEKKVKATNFRPNIVISGCDVYAEDSWDELLIGDVELKRVMACSRCILTTVDPDTGVMSRKEPLETLKSYRQCDPSERKLYGKSPLFGQYFVLENPGTIKVGDPVYLLGQ

SEQ ID NO: 8126 - protein, 335 aa, Homo sapiens
MGASSSSALARLGLPARPWPRWLGVAALGLAAVALGTVAWRRAWPRRRRRLQQVGTVAKLWIYPVKSCKGVPVSEAECTAMGLRSGNLRDRFWLVIKEDGHMVTARQEPRLVLISIIYENNCLIFRAPDMDQLVLPSKQPSSNKLHNCRIFGLDIKGRDCGNEAAKWFTNFLKTEAYRLVQFETNMKGRTSRKLLPTLDQNFQVAYPDYCPLLIMTDASLVDLNTRMEKKMKMENFRPNIVVTGCDAFEEDTWDELLIGSVEVKKVMACPRCILTTVDPDTGVIDRKQPLDTLKSYRLCDPSERELYKLSPLFGIYYSVEKIGSLRVGDPVYRMV

SEQ ID NO: 8127 - protein, 1604 aa, Homo sapiens
MREAAAALVPPPAFAVTPAAAMEEPPPPPPPPPPPPEPETESEPECCLAARQEGTLGDSACKSPESDLEDFSDETNTENLYGTSPPSTPRQMKRMSTKHQRNNVGRPASRSNLKEKMNAPNQPPHKDTGKTVENVEEYSYKQEKKIRAALRTTERDRKKNVQCSFMLDSVGGSLPKKSIPDVDLNKPYLSLGCSNAKLPVSVPMPIARPARQTSRTDCPADRLKFFETLRLLLKLTSVSKKKDREQRGQENTSGFWLNRSNELIWLELQAWHAGRTINDQDFFLYTARQAIPDIINEILTFKVDYGSFAFVRDRAGFNGTSVEGQCKATPGTKIVGYSTHHEHLQRQRVSFEQVKRIMELLEYIEALYPSLQALQKDYEKYAAKDFQDRVQALCLWLNITKDLNQKLRIMGTVLGIKNLSDIGWPVFEIPSPRPSKGNEPEYEGDDTEGELKELESSTDESEEEQISDPRVPEIRQPIDNSFDIQSRDCISKKLERLESEDDSLGWGAPDWSTEAGFSRHCLTSIYRPFVDKALKQMGLRKLILRLHKLMDGSLQRARIALVKNDRPVEFSEFPDPMWGSDYVQLSRTPPSSEEKCSAVSWEELKAMDLPSFEPAFLVLCRVLLNVIHECLKLRLEQRPAGEPSLLSIKQLVRECKEVLKGGLLMKQYYQFMLQEVLEDLEKPDCNIDAFEEDLHKMLMVYFDYMRSWIQMLQQLPQASHSLKNLLEEEWNFTKEITHYIRGGEAQAGKLFCDIAGMLLKSTGSFLEFGLQESCAEFWTSADDSSASDEIRRSVIEISRALKELFHEARERASKALGFAKMLRKDLEIAAEFRLSAPVRDLLDVLKSKQYVKVQIPGLENLQMFVPDTLAEEKSIILQLLNAAAGKDCSKDSDDVLIDAYLLLTKHGDRARDSEDSWGTWEAQPVKVVPQVETVDTLRSMQVDNLLLVVMQSAHLTIQRKAFQQSIEGLMTLCQEQTSSQPVIAKALQQLKNDALELCNRISNAIDRVDHMFTSEFDAEVDESESVTLQQYYREAMIQGYNFGFEYHKEVVRLMSGEFRQKIGDKYISFARKWMNYVLTKCESGRGTRPRWATQGFDFLQAIEPAFISALPEDDFLSLQALMNECIGHVIGKPHSPVTAIHRNSPRPMKVPRCHSDPPNPHLIIPTPEGFSTRSMPSDARSHGSPAAAAAAAAAAVAASRPSPSGGDSVLPKSISSAHDTRGSSVPENDRLASIAAELQFRSLSRHSSPTEERDEPAYPRGDSSGSTRRSWELRTLISQSKDTASKLGPIEAIQKSVRLFEEKRYREMRRKNIIGQVCDTPKSYDNVMHVGLRKVTFKWQRGNKIGEGQYGKVYTCISVDTGELMAMKEIRFQPNDHKTIKETADELKIFEGIKHPNLVRYFGVELHREEMYIFMEYCDEGTLEEVSRLGLQEHVIRLYSKQITIAINVLHEHGIVHRDIKGANIFLTSSGLIKLGDFGCSVKLKNNAQTMPGEVNSTLGTAAYMAPEVITRAKGEGHGRAADIWSLGCVVIEMVTGKRPWHEYEHNFQIMYKVGMGHKPPIPERLSPEGKDFLSHCLESDPKMRWTASQLLDHSFVKVCTDEE

SEQ ID NO: 8128 - protein, 1012 aa, Homo sapiens
MRWGLRPRGPGAAALATARSLWGTPRLPCSPGWQGATKRLLVRSVSGASNHQPNSNSGRYRDTVLLPQTSFPMKLLGRQQPDTELEIQQKCGFSELYSWQRERKVKTEFCLHDGPPYANGDPHVGHALNKILKDIANRFHMMNGSKIHFVPGWDCHGLPIEIKVLSELGREAQNLSAMEIRKKARSFAKAAIEKQKSAFIRWGIMADWNNCYYTFDGKYEAKQLRTFYQMYDKGLVYRSYKPVFWSPSSRTALAEAELEYNPEHVSRSIYVKFPLLKPSPKLASLIDGSSPVSILVWTTQPWTIPANEAVCYMPESKYAVVKCSKSGDLYVLAADKVASVASTLETTFETISTLSGVDLENGTCSHPLIPDKASPLLPANHVTMAKGTGLVHTAPAHGMEDYGVASQHNLPMDCLVDEDGVFTDVAGPELQNKAVLEEGTDVVIKMLQTAKNLLKEEKLVHSYPYDWRTKKPVVIRASKQWFINITDIKTAAKELLKKVKFIPGSALNGMVEMMDRRPYWCISRQRVWGVPIPVFHHKTKDEYLINSQTTEHIVKLVEQHGSDIWWTLPPEQLLPKEVLSEVGGPDALEYVPGQDILDIWFDSGTSWSYVLPGPDQRADLYLEGKDQLGGWFQSSLLTSVAARKRAPYKTVIVHGFTLGEKGEKMSKSLGNVIHPDVVVNGGQDQSKEPPYGADVLRWWVADSNVFTEVAIGPSVLNAARDDISKLRNTLRFLLGNVADFNPETDSIPVNDMYVIDQYMLHLLQDLANKITELYKQYDFGKVVRLLRTFYTRELSNFYFSIIKDRLYCEKENDPKRRSCQTALVEILDVIVRSFAPILPHLAEEVFQHIPYIKEPKSVFRTGWISTSSIWKKPGLEEAVESACAMRDSFLGSIPGKNAAEYKVITVIEPGLLFEIIEMLQSEETSSTSQLNELMMASESTLLAQEPREMTADVIELKGKFLINLEGGDIREESSYKVIVMPTTKEKCPRCWKYTAESSDTLCPRCAEVVSGK

SEQ ID NO: 8129 - protein, 1512 aa, Homo sapiens
MATLSLTVNSGDPPLGALLAVEHVKDDVSISVEEGKENILHVSENVIFTDVNSILRYLARVATTAGLYGSNLMEHTEIDHWLEFSATKLSSCDSFTSTINELNHCLSLRTYLVGNSLSLADLCVWATLKGNAAWQEQLKQKKAPVHVKRWFGFLEAQQAFQSVGTKWDVSTTKARVAPEKKQDVGKFVELPGAEMGKVTVRFPPEASGYLHIGHAKAALLNQHYQVNFKGKLIMRFDDTNPEKEKEDFEKVILEDVAMLHIKPDQFTYTSDHFETIMKYAEKLIQEGKAYVDDTPAEQMKAEREQRIDSKHRKNPIEKNLQMWEEMKKGSQFGQSCCLRAKIDMSSNNGCMRDPTLYRCKIQPHPRTGNKYNVYPTYDFACPIVDSIEGVTHALRTTEYHDRDEQFYWIIEALGIRKPYIWEYSRLNLNNTVLSKRKLTWFVNEGLVDGWDDPRFPTVRGVLRRGMTVEGLKQFIAAQGSSRSVVNMEWDKIWAFNKKVIDPVAPRYVALLKKEVIPVNVPEAQEEMKEVAKHPKNPEVGLKPVWYSPKVFIEGADAETFSEGEMVTFINWGNLNITKIHKNADGKIISLDAKLNLENKDYKKTTKVTWLAETTHALPIPVICVTYEHLITKPVLGKDEDFKQYVNKNSKHEELMLGDPCLKDLKKGDIIQLQRRGFFICDQPYEPVSPYSCKEAPCVLIYIPDGHTKEMPTSGSKEKTKVEATKNETSAPFKERPTPSLNNNCTTSEDSLVLYNRVAVQGDVVRELKAKKAPKEDVDAAVKQLLSLKAEYKEKTGQEYKPGNPPAEIGQNISSNSSASILESKSLYDEVAAQGEVVRKLKAEKSPKAKINEAVECLLSLKAQYKEKTGKEYIPGQPPLSQSSDSSPTRNSEPAGLETPEAKVLFDKVASQGEVVRKLKTEKAPKDQVDIAVQELLQLKAQYKSLIGVEYKPVSATGAEDKDKKKKEKENKSEKQNKPQKQNDGQRKDPSKNQGGGLSSSGAGEGQGPKKQTRLGLEAKKEENLADWYSQVITKSEMIEYHDISGCYILRPWAYAIWEAIKDFFDAEIKKLGVENCYFPMFVSQSALEKEKTHVADFAPEVAWVTRSGKTELAEPIAIRPTSETVMYPAYAKWVQSHRDLPIKLNQWCNVVRWEFKHPQPFLRTREFLWQEGHSAFATMEEAAEEVLQILDLYAQVYEELLAIPVVKGRKTEKEKFAGGDYTTTIEAFISASGRAIQGGTSHHLGQNFSKMFEIVFEDPKIPGEKQFAYQNSWGLTTRTIGVMTMVHGDNMGLVLPPRVACVQVVIIPCGITNALSEEDKEALIAKCNDYRRRLLSVNIRVRADLRDNYSPGWKFNHWELKGVPIRLEVGPRDMKSCQFVAVRRDTGEKLTVAENEAETKLQAILEDIQVTLFTRASEDLKTHMVVANTMEDFQKILDSGKIVQIPFCGEIDCEDWIKKTTARDQDLEPGAPSMGAKSLCIPFKPLCELQPGAKCVCGKNPAKYYTLFGRSY

SEQ ID NO: 8130 - protein, 136 aa, Homo sapiens
MEHKEVVLLLLLFLKSGQGEPLDDYVNTQGASLFSVTKKQLGAGSIEECAAKCEEDEEFTCRAFQYHSKEQQCVIMAENRKSSIIIRMRDVVLFEKKVYLSECKTGNGKNYRGTMSKTKNGITCQKWSSTSPHRPR

SEQ ID NO: 8131 - protein, 221 aa, Homo sapiens
MAAASGSVLQRCIVSPAGRHSASLIFLHGSGDSGQGLRMWIKQVLNQDLTFQHIKIIYPTAPPRFKITNDCPEHLESIDVMCQVLTDLIDEEVKSGIKKNRILIGGFSMGGCMAIHLAYRNHQDVAGVFALSSFLNKASAVYQALQKSNGVLPELFQCHGTADELVLHSWAEETNSMLKSLGVTTKFHSFPNVYHELSKTELDILKLWILTKLPGEMEKQK

SEQ ID NO: 8132 - protein, 237 aa, Homo sapiens
MAAASGSVLQRCIVSPAGRHSASLIFLHGSGDSGQGLRMWIKQVLNQDLTFQHIKIIYPTAPPRSYTPMKGGISNVWFDRFKITNDCPEHLESIDVMCQVLTDLIDEEVKSGIKKNRILIGGFSMGGCMAIHLAYRNHQDVAGVFALSSFLNKASAVYQALQKSNGVLPELFQCHGTADELVLHSWAEETNSMLKSLGVTTKFHSFPNVYHELSKTELDILKLWILTKLPGEMEKQK

SEQ ID NO: 8133 - protein, 442 aa, Homo sapiens
MHYCVLSAFLILHLVTVALSLSTCSTLDMDQFMRKRIEAIRGQILSKLKLTSPPEDYPEPEEVPPEVISIYNSTRDLLQEKASRRAAACERERSDEEYYAKEVYKIDMPPFFPSETVCPVVTTPSGSVGSLCSRQSQVLCGYLDAIPPTFYRPYFRIVRFDVSAMEKNASNLVKAEFRVFRLQNPKARVPEQRIELYQILKSKDLTSPTQRYIDSKVVKTRAEGEWLSFDVTDAVHEWLHHKDRNLGFKISLHCPCCTFVPSNNYIIPNKSEELEARFAGIDGTSTYTSGDQKTIKSTRKKNSGKTPHLLLMLLPSYRLESQQTNRRKKRALDAAYCFRNVQDNCCLRPLYIDFKRDLGWKWIHEPKGYNANFCAGACPYLWSSDTQHSRVLSLYNTINPEASASPCCVSQDLEPLTILYYIGKTPKIEQLSNMIVKSCKCS

SEQ ID NO: 8134 - protein, 414 aa, Homo sapiens
MHYCVLSAFLILHLVTVALSLSTCSTLDMDQFMRKRIEAIRGQILSKLKLTSPPEDYPEPEEVPPEVISIYNSTRDLLQEKASRRAAACERERSDEEYYAKEVYKIDMPPFFPSENAIPPTFYRPYFRIVRFDVSAMEKNASNLVKAEFRVFRLQNPKARVPEQRIELYQILKSKDLTSPTQRYIDSKVVKTRAEGEWLSFDVTDAVHEWLHHKDRNLGFKISLHCPCCTFVPSNNYIIPNKSEELEARFAGIDGTSTYTSGDQKTIKSTRKKNSGKTPHLLLMLLPSYRLESQQTNRRKKRALDAAYCFRNVQDNCCLRPLYIDFKRDLGWKWIHEPKGYNANFCAGACPYLWSSDTQHSRVLSLYNTINPEASASPCCVSQDLEPLTILYYIGKTPKIEQLSNMIVKSCKCS

SEQ ID NO: 8135 - protein, 282 aa, Homo sapiens
MAAAAPDSRVSEEENLKKTPKKKMKMVTGAVASVLEDEATDTSDSEGSCGSEKDHFYSDDDAIEADSEGDAEPCDKENENDGESSVGTNMGWADAMAKVLNKKTPESKPTILVKNKKLEKEKEKLKQERLEKIKQRDKRLEWEMMCRVKPDVVQDKETERNLQRIATRGVVQLFNAVQKHQKNVDEKVKEAGSSMRKRAKLISTVSKKDFISVLRGMDGSTNETASSRKKPKAKQTEVKSEEGPGWTILRDDFMMGASMKDWDKESDGPDDSRPESASDSDT

SEQ ID NO: 8136 - protein, 376 aa, Homo sapiens
MFGAAGRQPIGAPAAGNSWHFSRTMEELVHDLVSALEESSEQARGGFAETGDHSRSISCPLKRQARKRRGRKRRSYNVHHPWETGHCLSEGSDSSLEEPSKDYRENHNNNKKDHSDSDDQMLVAKRRPSSNLNNNVRGKRPLWHESDFAVDNVGNRTLRRRRKVKRMAVDLPQDISNKRTMTQPPEGCRDQDMDSDRAYQYQEFTKNKVKKRKLKIIRQGPKIQDEGVVLESEETNQTNKDKMECEEQKVSDELMSESDSSSLSSTDAGLFTNDEGRQGDDEQSDWFYEKESGGACGITGVVPWWEKEDPTELDKNVPDPVFESILTGSFPLMSHPSRRGFQARLSRLHGMSSKNIKKSGGTPTSMATNWTSEIPL

SEQ ID NO: 8137 - protein, 528 aa, Homo sapiens
MFGAAGRQPIGAPAAGNSWHFSRTMEELVHDLVSALEESSEQARGGFAETGDHSRSISCPLKRQARKRRGRKRRSYNVHHPWETGHCLSEGSDSSLEEPSKDYRENHNNNKKDHSDSDDQMLVAKRRPSSNLNNNVRGKRPLWHESDFAVDNVGNRTLRRRRKVKRMAVDLPQDISNKRTMTQPPEGCRDQDMDSDRAYQYQEFTKNKVKKRKLKIIRQGPKIQDEGVVLESEETNQTNKDKMECEEQKVSDELMSESDSSSLSSTDAGLFTNDEGRQGDDEQSDWFYEKESGGACGITGVVPWWEKEDPTELDKNVPDPVFESILTGSFPLMSHPSRRGFQARLSRLHGMSSKNIKKSGGTPTSMVPIPGPVGNKRMVHFSPDSHHHDHWFSPGARTEHDQHQLLRDNRAERGHKKNCSVRTASRQTSMHLGSLCTGDIKRRRKAAPLPGPTTAGFVGENAQPILENNIGNRMLQNMGWTPGSGLGRDGKGISEPIQAMQRPKGLGLGFPLPKSTSATTTPNAGKSA

SEQ ID NO: 8138 - protein, 3114 aa, Homo sapiens
MSWALEEWKEGLPTRALQKIQELEGQLDKLKKEKQQRQFQLDSLEAALQKQKQKVENEKTEGTNLKRENQRLMEICESLEKTKQKISHELQVKESQVNFQEGQLNSGKKQIEKLEQELKRCKSELERSQQAAQSADVSLNPCNTPQKIFTTPLTPSQYYSGSKYEDLKEKYNKEVEERKRLEAEVKALQAKKASQTLPQATMNHRDIARHQASSSVFSWQQEKTPSHLSSNSQRTPIRRDFSASYFSGEQEVTPSRSTLQIGKRDANSSFFDNSSSPHLLDQLKAQNQELRNKINELELRLQGHEKEMKGQVNKFQELQLQLEKAKVELIEKEKVLNKCRDELVRTTAQYDQASTKYTALEQKLKKLTEDLSCQRQNAESARCSLEQKIKEKEKEFQEELSRQQRSFQTLDQECIQMKARLTQELQQAKNMHNVLQAELDKLTSVKQQLENNLEEFKQKLCRAEQAFQASQIKENELRRSMEEMKKENNLLKSHSEQKAREVCHLEAELKNIKQCLNQSQNFAEEMKAKNTSQETMLRDLQEKINQQENSLTLEKLKLAVADLEKQRDCSQDLLKKREHHIEQLNDKLSKTEKESKALLSALELKKKEYEELKEEKTLFSCWKSENEKLLTQMESEKENLQSKINHLETCLKTQQIKSHEYNERVRTLEMDRENLSVEIRNLHNVLDSKSVEVETQKLAYMELQQKAEFSDQKHQKEIENMCLKTSQLTGQVEDLEHKLQLLSNEIMDKDRCYQDLHAEYESLRDLLKSKDASLVTNEDHQRSLLAFDQQPAMHHSFANIIGEQGSMPSERSECRLEADQSPKNSAILQNRVDSLEFSLESQKQMNSDLQKQCEELVQIKGEIEENLMKAEQMHQSFVAETSQRISKLQEDTSAHQNVVAETLSALENKEKELQLLNDKVETEQAEIQELKKSNHLLEDSLKELQLLSETLSLEKKEMSSIISLNKREIEELTQENGTLKEINASLNQEKMNLIQKSESFANYIDEREKSISELSDQYKQEKLILLQRCEETGNAYEDLSQKYKAAQEKNSKLECLLNECTSLCENRKNELEQLKEAFAKEHQEFLTKLAFAEERNQNLMLELETVQQALRSEMTDNQNNSKSEAGGLKQEIMTLKEEQNKMQKEVNDLLQENEQLMKVMKTKHECQNLESEPIRNSVKERESERNQCNFKPQMDLEVKEISLDSYNAQLVQLEAMLRNKELKLQESEKEKECLQHELQTIRGDLETSNLQDMQSQEISGLKDCEIDAEEKYISGPHELSTSQNDNAHLQCSLQTTMNKLNELEKICEILQAEKYELVTELNDSRSECITATRKMAEEVGKLLNEVKILNDDSGLLHGELVEDIPGGEFGEQPNEQHPVSLAPLDESNSYEHLTLSDKEVQMHFAELQEKFLSLQSEHKILHDQHCQMSSKMSELQTYVDSLKAENLVLSTNLRNFQGDLVKEMQLGLEEGLVPSLSSSCVPDSSSLSSLGDSSFYRALLEQTGDMSLLSNLEGAVSANQCSVDEVFCSSLQEENLTRKETPSAPAKGVEELESLCEVYRQSLEKLEEKMESQGIMKNKEIQELEQLLSSERQELDCLRKQYLSENEQWQQKLTSVTLEMESKLAAEKKQTEQLSLELEVARLQLQGLDLSSRSLLGIDTEDAIQGRNESCDISKEHTSETTERTPKHDVHQICDKDAQQDLNLDIEKITETGAVKPTGECSGEQSPDTNYEPPGEDKTQGSSECISELSFSGPNALVPMDFLGNQEDIHNLQLRVKETSNENLRLLHVIEDRDRKVESLLNEMKELDSKLHLQEVQLMTKIEACIELEKIVGELKKENSDLSEKLEYFSCDHQELLQRVETSEGLNSDLEMHADKSSREDIGDNVAKVNDSWKERFLDVENELSRIRSEKASIEHEALYLEADLEVVQTEKLCLEKDNENKQKVIVCLEEELSVVTSERNQLRGELDTMSKKTTALDQLSEKMKEKTQELESHQSECLHCIQVAEAEVKEKTELLQTLSSDVSELLKDKTHLQEKLQSLEKDSQALSLTKCELENQIAQLNKEKELLVKESESLQARLSESDYEKLNVSKALEAALVEKGEFALRLSSTQEEVHQLRRGIEKLRVRIEADEKKQLHIAEKLKERERENDSLKDKVENLERELQMSEENQELVILDAENSKAEVETLKTQIEEMARSLKVFELDLVTLRSEKENLTKQIQEKQGQLSELDKLLSSFKSLLEEKEQAEIQIKEESKTAVEMLQNQLKELNEAVAALCGDQEIMKATEQSLDPPIEEEHQLRNSIEKLRARLEADEKKQLCVLQQLKESEHHADLLKGRVENLERELEIARTNQEHAALEAENSKGEVETLKAKIEGMTQSLRGLELDVVTIRSEKENLTNELQKEQERISELEIINSSFENILQEKEQEKVQMKEKSSTAMEMLQTQLKELNERVAALHNDQEACKAKEQNLSSQVECLELEKAQLLQGLDEAKNNYIVLQSSVNGLIQEVEDGKQKLEKKDEEISRLKNQIQDQEQLVSKLSQVEGEHQLWKEQNLELRNLTVELEQKIQVLQSKNASLQDTLEVLQSSYKNLENELELTKMDKMSFVEKVNKMTAKETELQREMHEMAQKTAELQEELSGEKNRLAGELQLLLEEIKSSKDQLKELTLENSELKKSLDCMHKDQVEKEGKVREEIAEYQLRLHEAEKKHQALLLDTNKQYEVEIQTYREKLTSKEECLSSQKLEIDLLKSSKEELNNSLKATTQILEELKKTKMDNLKYVNQLKKENERAQGKMKLLIKSCKQLEEEKEILQKELSQLQAAQEKQKTGTVMDTKVDELTTEIKELKETLEEKTKEADEYLDKYCSLLISHEKLEKAKEMLETQVAHLCSQQSKQDSRGSPLLGPVVPGPSPIPSVTEKRLSSGQNKASGKRQRSSGIWENGRGPTPATPESFSKKSKKAVMSGIHPAEDTEGTEFEPEGLPEVVKKGFADIPTGKTSPYILRRTTMATRTSPRLAAQKLALSPLSLGKENLAESSKPTAGGSRSQKVKVAQRSPVDSGTILREPTTKSVPVNNLPERSPTDSPREGLRVKRGRLVPSPKAGLESNGSENCKVQ

SEQ ID NO: 8139 - protein, 1187 aa, Homo sapiens
MPFGLKLRRTRRYNVLSKNCFVTRIRLLDSNVIECTLSVESTGQECLEAVAQRLELRETHYFGLWFLSKSQQARWVELEKPLKKHLDKFANEPLLFFGVMFYVPNVSWLQQEATRYQYYLQVKKDVLEGRLRCTLDQVIRLAGLAVQADFGDYNQFDSQDFLREYVLFPMDLALEEAVLEELTQKVAQEHKAHSGILPAEAELMYINEVERLDGFGQEIFPVKDNHGNCVHLGIFFMGIFVRNRIGRQAVIYRWNDMGNITHNKSTILVELINKEETALFHTDDIENAKYISRLFATRHKFYKQNKICTEQSNSPPPIRRQPTWSRSSLPRQQPYILPPVHVQCGEHYSETHTSQDSIFHGNEEALYCNSHNSLDLNYLNGTVTNGSVCSVHSVNSLNCSQSFIQASPVSSNLSIPGSDIMRADYIPSHRHSAIIVPSYRPTPDYETVMRQMKRGILHTDSQSQSLRNLNIINTHAYNQPEDLVYSQPEMRERHPYTVPYGPQGVYSNKLVSPSDQRNPKNNVVPSKPGASAISHTVSTPELANMQLQGSHNYSTAHMLKNYLFRPPPPYPRPRPATSTPDLASHRHKYVSGSSPDLVTRKVQLSVKTFQEDSSPVVHQSLQEVSEPLTATKHHGTVNKRHSLEVMNSMVRGMEAMTLKSLHLPMARRNTLREQGPPEEGSGSHEVPQLPQYHHKKTFSDATMLIHSSESEEEEEEAPESVPQIPMLREKMEYSAQLQAALARIPNKPPPEYPGPRKSVSNGALRQDQASLPPAMARARVLRHGPAKAISMSRTDPPAVNGASLGPSISEPDLTSVKERVKKEPVKERPVSEMFSLEDSIIEREMMIRNLEKQKMAGLEAQKRPLMLAALNGLSVARVSGREENRVDATRVPMDERFRTLKKKLEEGMVFTEYEQIPKKKANGIFSTAALPENAERSRIREVVPYEENRVELIPTKENNTGYINASHIKVVVGGAEWHYIATQGPLPHTCHDFWQMVWEQGVNVIAMVTAEEEGGRTKSHRYWPKLGSKHSSATYGKFKVTTKFRTDSVCYATTGLKVKHLLSGQERTVWHLQYTDWPDHGCPEDVQGFLSYLEEIQSVRRHTNSMLEGTKNRHPPIVVHCSAGVGRTGVLILSELMIYCLEHNEKVEVPMMLRLLREQRMFMIQTIAQYKFVYQVLIQFLQNSRLI

SEQ ID NO: 8140 - protein, 433 aa, Homo sapiens
MRAEGLGGLERFCSPGKGRGLRALQPFQVGDLLFSCPAYAYVLTVNERGNHCEYCFTRKEGLSKCGRCKQAFYCNVECQKEDWPMHKLECSPMVVFGENWNPSETVRLTARILAKQKIHPERTPSEKLLAVKEFESHLDKLDNEKKDLIQSDIAALHHFYSKHLGFPDNDSLVVLFAQVNCNGFTIEDEELSHLGSAIFPDVALMNHSCCPNVIVTYKGTLAEVRAVQEIKPGEEVFTSYIDLLYPTEDRNDRLRDSYFFTCECQECTTKDKDKAKVEIRKLSDPPKAEAIRDMVRYARNVIEEFRRAKHYKSPSELLEICELSQEKMSSVFEDSNVYMLHMMYQAMGVCLYMQDWEGALQYGQKIIKPYSKHYPLYSLNVASMWLKLGRLYMGLEHKAAGEKALKKAIAIMEVAHGKDHPYISEIKQEIESH

SEQ ID NO: 8141 - protein, 1066 aa, Homo sapiens
MTSYRERSADLARFYTVTEPQRHPRGYTVYKVTARVVSRRNPEDVQEIIVWKRYSDFKKLHKELWQIHKNLFRHSELFPPFAKGIVFGRFDETVIEERRQCAEDLLQFSANIPALYNSKQLEDFFKGGIINDSSELIGPAEAHSDSLIDTFPECSTEGFSSDSDLVSLTVDVDSLAELDDGMASNQNSPIRTFGLNLSSDSSALGAVASDSEQSKTEEERESRSLFPGSLKPKLGKRDYLEKAGELIKLALKKEEEDDYEAASDFYRKGVDLLLEGVQGESSPTRREAVKRRTAEYLMRAESISSLYGKPQLDDVSQPPGSLSSRPLWNLRSPAEELKAFRVLGVIDKVLLVMDTRTEQTFILKGLRKSSEYSRNRKTIIPRCVPNMVCLHKYIISEESVFLVLQHAEGGKLWSYISKFLNRSPEESFDIKEVKKPTLAKVHLQQPTSSPQDSSSFESRGSDGGSMLKALPLKSSLTPSSQDDSNQEDDGQDSSPKWPDSGSSSEEECTTSYLTLCNEYGQEKIEPGSLNEEPFMKTEGNGVDTKAIKSFPAHLAADSDSPSTQLRAHELKFFPNDDPEAVSSPRTSDSLSRSKNSPMEFFRIDSKDSASELLGLDFGEKLYSLKSEPLKPFFTLPDGDSASRSFNTSESKVEFKAQDTISRGSDDSVPVISFKDAAFDDVSGTDEGRPDLLVNLPGELESTREAAAMGPTKFTQTNIGIIENKLLEAPDVLCLRLSTEQCQAHEEKGIEELSDPSGPKSYSITEKHYAQEDPRMLFVAAVDHSSSGDMSLLPSSDPKFQGLGVVESAVTANNTEESLFRICSPLSGANEYIASTDTLKTEEVLLFTDQTDDLAKEEPTSLFQRDSETKGESGLVLEGDKEIHQIFEDLDKKLALASRFYIPEGCIQRWAAEMVVALDALHREGIVCRDLNPNNILLNDRGHIQLTYFSRWSEVEDSCDSDAIERMYCAPEVGAITEETEACDWWSLGAVLFELLTGKTLVECHPAGINTHTTLNMPECVSEEARSLIQQLLQFNPLERLGAGVAGVEDIKSHPFFTPVDWAELMR

SEQ ID NO: 8142 - protein, 555 aa, Homo sapiens
MARPDDEEGAAVAPGHPLAKGYLPLPRGAPVGKESVELQNGPKAGTFPVNGAPRDSLAAASGVLGGPQTPLAPEEETQARLLPAGAGAETPGAESSPLPLTALSPRRFVVLLIFSLYSLVNAFQWIQYSIISNVFEGFYGVTLLHIDWLSMVYMLAYVPLIFPATWLLDTRGLRLTALLGSGLNCLGAWIKCGSVQQHLFWVTMLGQCLCSVAQVFILGLPSRIASVWFGPKEVSTACATAVLGNQLGTAVGFLLPPVLVPNTQNDTNLLACNISTMFYGTSAVATLLFILTAIAFKEKPRYPPSQAQAALQDSPPEEYSYKKSIRNLFKNIPFVLLLITYGIMTGAFYSVSTLLNQMILTYYEGEEVNAGRIGLTLVVAGMVGSILCGLWLDYTKTYKQTTLIVYILSFIGMVIFTFTLDLRYIIIVFVTGGVLGFFMTGYLPLGFEFAVEITYPESEGTSSGLLNASAQIFGILFTLAQGKLTSDYGPKAGNIFLCVWMFIGIILTALIKSDLRRHNINIGITNVDVKAIPADSPTDQEPKTVMLSKQSESAI

SEQ ID NO: 8143 - protein, 172 aa, Homo sapiens
MAGSPELVVLDPPWDKELAAGTESQALVSATPREDFRVRCTSKRAVTEMLQLCGRFVQKLGDALPEEIREPALRDAQWTFESAVQENISINGQAWQEASDNCFMDSDIKVLEDQFDEIIVDIATKRKQYPRKILECVIKTIKAKQEILKQYHPVVHPLDLKYDPDPVLACIN

SEQ ID NO: 8144 - protein, 281 aa, Homo sapiens
MAGSPELVVLDPPWDKELAAGTESQALVSATPREDFRVRCTSKRAVTEMLQLCGRFVQKLGDALPEEIREPALRDAQWTFESAVQENISINGQAWQEASDNCFMDSDIKVLEDQFDEIIVDIATKRKQYPRKILECVIKTIKAKQEILKQYHPVVHPLDLKYDPDPAPHMENLKCRGETVAKEISEAMKSLPALIEQGEGFSQVLRMQPVIHLQRIHQEVFSSCHRKPDAKPENFITQIETTPTETASRKTSDMVLKRKQTKDCPQRKWYPLRPKKINLDT

SEQ ID NO: 8145 - protein, 172 aa, Homo sapiens
MVGPAPRRRLRPLAALALVLALAPGLPTARAGQTPRPAERGPPVRLFTEEELARYGGEEEDQPIYLAVKGVVFDVTSGKEFYGRGAPYNALTGKDSTRGVAKMSLDPADLTHDTTGLTAKELEALDEVFTKVYKAKYPIVGYTARRILNEDGSPNLDFKPEDQPHFDIKDEF

SEQ ID NO: 8146 - protein, 730 aa, Homo sapiens
MLFNSVLRQPQLGVLRNGWSSQYPLQSLLTGYQCSGNDEHTSYGETGVPVPPFGCTFSSAPNMEHVLAVANEEGFVRLYNTESQSFRKKCFKEWMAHWNAVFDLAWVPGELKLVTAAGDQTAKFWDVKAGELIGTCKGHQCSLKSVAFSKFEKAVFCTGGRDGNIMVWDTRCNKKDGFYRQVNQISGAHNTSDKQTPSKPKKKQNSKGLAPSVDFQQSVTVVLFQDENTLVSAGAVDGIIKVWDLRKNYTAYRQEPIASKSFLYPGSSTRKLGYSSLILDSTGSTLFANCTDDNIYMFNMTGLKTSPVAIFNGHQNSTFYVKSSLSPDDQFLVSGSSDEAAYIWKVSTPWQPPTVLLGHSQEVTSVCWCPSDFTKIATCSDDNTLKIWRLNRGLEEKPGGDKLSTVGWASQKKKESRPGLVTVTSSQSTPAKAPRAKCNPSNSSPSSAACAPSCAGDLPLPSNTPTFSIKTSPAKARSPINRRGSVSSVSPKPPSSFKMSIRNWVTRTPSSSPPITPPASETKIMSPRKALIPVSQKSSQAEACSESRNRVKRRLDSSCLESVKQKCVKSCNCVTELDGQVENLHLDLCCLAGNQEDLSKDSLGPTKSSKIEGAGTSISEPPSPISPYASESCGTLPLPLRPCGEGSEMVGKENSSPENKNWLLAMAAKRKAENPSPRSPSSQTPNSRRQSGKKLPSPVTITPSSMRKICTYFHRKSQEDFCGPEHSTEL

SEQ ID NO: 8147 - protein, 962 aa, Homo sapiens
MASNSTKSFLADAGYGEQELDANSALMELDKGLRSGKLGEQCEAVVRFPRLFQKYPFPILINSAFLKLADVFRVGNNFLRLCVLKVTQQSEKHLEKILNVDEFVKRIFSVIHSNDPVARAITLRMLGSLASIIPERKNAHHSIRQSLDSHDNVEVEAAVFAAANFSAQSKDFAVGICNKISEMIQGLATPVDLKLKLIPILQHMHHDAILASSARQLLQQLVTSYPSTKMVIVSLHTFTLLAASSLVDTPKQIQLLLQYLKNDPRKAVKRLAIQDLKLLANKTPHTWSRENIQALCECALQTPYDSLKLGMLSVLSTLSGTIAIKHYFSIVPGNVSSSPRSSDLVKLAQECCYHNNRGIAAHGVRVLTNITVSCQEKDLLALEQDAVFGLESLLVLCSQDDSPGAQATLKIALNCMVKLAKGRPHLSQSVVETLLTQLHSAQDAARILMCHCLAAIAMQLPVLGDGMLGDLMELYKVIGRSATDKQQELLVSLATVIFVASQKALSVESKAVIKQQLESVSNGWTVYRIARQASRMGNHDMAKELYQSLLTQVASEHFYFWLNSLKEFSHAEQCLTGLQEENYSSALSCIAESLKFYHKGIASLTAASTPLNPLSFQCEFVKLRIDLLQAFSQLICTCNSLKTSPPPAIATTIAMTLGNDLQRCGRISNQMKQSMEEFRSLASRYGDLYQASFDADSATLRNVELQQQSCLLISHAIEALILDPESASFQEYGSTGTAHADSEYERRMMSVYNHVLEEVESLNRKYTPVSYMHTACLCNAIIALLKVPLSFQRYFFQKLQSTSIKLALSPSPRNPAEPIAVQNNQQLALKVEGVVQHGSKPGLFRKIQSVCLNVSSTLQSKSGQDYKIPIDNMTNEMEQRVEPHNDYFSTQFLLNFAILGTHNITVESSVKDANGIVWKTGPRTTIFVKSLEDPYSQQIRLQQQQAQQPLQQQQQRNAYTRF

SEQ ID NO: 8148 - protein, 370 aa, Homo sapiens
MAITLEEAPWLGWLLVKALMRFAFMVVNNLVAIPSYICYVIILQPLRVLDSKRFWYIEGIMYKWLLGMVASWGWYAGYTVMEWGEDIKAVSKDEAVMLVNHQATGDVCTLMMCLQDKGLVVAQMMWLMDHIFKYTNFGIVSLVHGDFFIRQGRSYRDQQLLLLKKHLENNYRSRDRKWIVLFPEGGFLRKRRETSQAFAKKNNLPFLTNVTLPRSGATKIILNALVAQQKNGSPAGGDAKELDSKSKGLQWIIDTTIAYPKAEPIDIQTWILGYRKPTVTHVHYRIFPIKDVPLETDDLTTWLYQRFVEKEDLLSHFYETGAFPPSKGHKEAVSREMTLSNLWIFLIQSFAFLSGYMWYNIIQYFYHCLF

SEQ ID NO: 8149 - protein, 507 aa, Homo sapiens
MGCWGRNRGRLLCMLALTFMFMVLEVVVSRVTSSLAMLSDSFHMLSDVLALVVALVAERFARRTHATQKNTFGWIRAEVMGALVNAIFLTGLCFAILLEAIERFIEPHEMQQPLVVLGVGVAGLLVNVLGLCLFHHHSGFSQDSGHGHSHGGHGHGHGLPKGPRVKSTRPGSSDINVAPGEQGPDQEETNTLVANTSNSNGLKLDPADPENPRSGDTVEVQVNGNLVREPDHMELEEDRAGQLNMRGVFLHVLGDALGSVIVVVNALVFYFSWKGCSEGDFCVNPCFPDPCKAFVEIINSTHASVYEAGPCWVLYLDPTLCVVMVCILLYTTYPLLKESALILLQTVPKQIDIRNLIKELRNVEGVEEVHELHVWQLAGSRIIATAHIKCEDPTSYMEVAKTIKDVFHNHGIHATTIQPEFASVGSKSSVVPCELACRTQCALKQCCGTLPQAPSGKDAEKTPAVSISCLELSNNLEKKPRRTKAENIPAVVIEIKNMPNKQPESSL

SEQ ID NO: 8150 - protein, 467 aa, Homo sapiens
MALHPRRVRLKPWLVAQVDSGLYPGLIWLHRDSKRFQIPWKHATRHSPQQEEENTIFKAWAVETGKYQEGVDDPDPAKWKAQLRCALNKSREFNLMYDGTKEVPMNPVKIYQVCDIPQPQGSIINPGSTGSAPWDEKDNDVDEEDEEDELDQSQHHVPIQDTFPFLNINGSPMAPASVGNCSVGNCSPEAVWPKTEPLEMEVPQAPIQPFYSSPELWISSLPMTDLDIKFQYRGKEYGQTMTVSNPQGCRLFYGDLGPMPDQEELFGPVSLEQVKFPGPEHITNEKQKLFTSKLLDVMDRGLILEVSGHAIYAIRLCQCKVYWSGPCAPSLVAPNLIERQKKVKLFCLETFLSDLIAHQKGQIEKQPPFEIYLCFGEEWPDGKPLERKLILVQVIPVVARMIYEMFSGDFTRSFDSGSVRLQISTPDIKDNIVAQLKQLYRILQTQESWQPMQPTPSMQLPPALPPQ

SEQ ID NO: 8151 - protein, 292 aa, Homo sapiens
MAFMKKYLLPILGLFMAYYYYSANEEFRPEMLQGKKVIVTGASKGIGREMAYHLAKMGAHVVVTARSKETLQKVVSHCLELGAASAHYIAGTMEDMTFAEQFVAQAGKLMGGLDMLILNHITNTSLNLFHDDIHHVRKSMEVNFLSYVVLTVAALPMLKQSNGSIVVVSSLAGKVAYPMVAAYSASKFALDGFFSSIRKEYSVSRVNVSITLCVLGLIDTETAMKAVSGIVHMQAAPKEECALEIIKGGALRQEEVYYDSSLWTTLLIRNPCRKILEFLYSTSYNMDRFINK

SEQ ID NO: 8152 - protein, 103 aa, Homo sapiens
METVQELIPLAKEMMAQKRKGKMVKLYVLGSVLALFGVVLGLMETVCSPFTAARRLRDQEAAVAELQAALERQALQKQALQEKGKQQDTVLGGRALSNRQHAS

SEQ ID NO: 8153 - protein, 1894 aa, Homo sapiens
MEQRRPWPRALEVDSRSVVLLSVVWVLLAPPAAGMPQFSTFHSENRDWTFNHLTVHQGTGAVYVGAINRVYKLTGNLTIQVAHKTGPEEDNKSCYPPLIVQPCSEVLTLTNNVNKLLIIDYSENRLLACGSLYQGVCKLLRLDDLFILVEPSHKKEHYLSSVNKTGTMYGVIVRSEGEDGKLFIGTAVDGKQDYFPTLSSRKLPRDPESSAMLDYELHSDFVSSLIKIPSDTLALVSHFDIFYIYGFASGGFVYFLTVQPETPEGVAINSAGDLFYTSRIVRLCKDDPKFHSYVSLPFGCTRAGVEYRLLQAAYLAKPGDSLAQAFNITSQDDVLFAIFSKGQKQYHHPPDDSALCAFPIRAINLQIKERLQSCYQGEGNLELNWLLGKDVQCTKAPVPIDDNFCGLDINQPLGGSTPVEGLTLYTTSRDRMTSVASYVYNGYSVVFVGTKSGKLKKIRADGPPHGGVQYEMVSVLKDGSPILRDMAFSIDQRYLYVMSERQVTRVPVESCEQYTTCGECLSSGDPHCGWCALHNMCSRRDKCQQAWEPNRFAASISQCVSLAVHPSSISVSEHSRLLSLVVSDAPDLSAGIACAFGNLTEVEGQVSGSQVICISPGPKDVPVIPLDQDWFGLELQLRSKETGKIFVSTEFKFYNCSAHQLCLSCVNSAFRCHWCKYRNLCTHDPTTCSFQEGRINISEDCPQLVPTEEILIPVGEVKPITLKARNLPQPQSGQRGYECVLNIQGAIHRVPALRFNSSSVQCQNSSYQYDGMDISNLAVDFAVVWNGNFIIDNPQDLKVHLYKCAAQRESCGLCLKADRKFECGWCSGERRCTLHQHCTSPSSPWLDWSSHNVKCSNPQITEILTVSGPPEGGTRVTIHGVNLGLDFSEIAHHVQVAGVPCTPLPGEYIIAEQIVCEMGHALVGTTSGPVRLCIGECKPEFMTKSHQQYTFVNPSVLSLNPIRGPESGGTMVTITGHYLGAGSSVAVYLGNQTCEFYGRSMSEIVCVSPPSSNGLGPVPVSVSVDRAHVDSNLQFEYIDDPRVQRIEPEWSIASGHTPLTITGFNLDVIQEPRIRVKFNGKESVNVCKVVNTTTLTCLAPSLTTDYRPGLDTVERPDEFGFVFNNVQSLLIYNDTKFIYYPNPTFELLSPTGVLDQKPGSPIILKGKNLCPPASGGAKLNYTVLIGETPCAVTVSETQLLCEPPNLTGQHKVMVHVGGMVFSPGSVSVISDSLLTLPAIVSIAAGGSLLLIIVIIVLIAYKRKSRENDLTLKRLQMQMDNLESRVALECKEAFAELQTDINELTSDLDRSGIPYLDYRTYAMRVLFPGIEDHPVLRELEVQGNGQQHVEKALKLFAQLINNKVFLLTFIRTLELQRSFSMRDRGNVASLIMTGLQGRLEYATDVLKQLLSDLIDKNLENKNHPKLLLRRTESVAEKMLTNWFAFLLHKFLKECAGEPLFMLYCAIKQQMEKGPIDAITGEARYSLSEDKLIRQQIEYKTLILNCVNPDNENSPEIPVKVLNCDTITQVKEKILDAVYKNVPYSQRPRAVDMDLEWRQGRIARVVLQDEDITTKIEGDWKRLNTLMHYQVSDRSVVALVPKQTSSYNIPASASISRTSISRYDSSFRYTGSPDSLRSRAPMITPDLESGVKVWHLVKNHDHGDQKEGDRGSKMVSEIYLTRLLATKGTLQKFVDDLFETLFSTVHRGSALPLAIKYMFDFLDEQADRHSIHDTDVRHTWKSNCLPLRFWVNVIKNPQFVFDIHKGSITDACLSVVAQTFMDSCSTSEHRLGKDSPSNKLLYAKDIPSYKSWVERYYADIAKLPAISDQDMNAYLAEQSRLHAVEFNMLSALNEIYSYVSKYSEELIGALEQDEQARRQRLAYKVEQLINAMSIES

SEQ ID NO: 8154 - protein, 180 aa, Homo sapiens [sequence omitted]

SEQ ID NO: 8155 - protein, 362 aa, Homo sapiens
MEPPGRRECPFPSWRFPGLLLAAMVLLLYSFSDACEEPPTFEAMELIGKPKPYYEIGERVDYKCKKGYFYIPPLATHTICDRNHTWLPVSDDACYRETCPYIRDPLNGQAVPANGTYEFGYQMHFICNEGYYLIGEEILYCELKGSVAIWSGKPPICEKVLCTPPPKIKNGKHTFSEVEVFEYLDAVTYSCDPAPGPDPFSLIGESTIYCGDNSVWSRAAPECKVVKCRFPVVENGKQISGFGKKFYYKATVMFECDKGFYLDGSDTIVCDSNSTWDPPVPKCLKGPRPTYKPPVSNYPGYPKPEEGILDSLDVWVIAVIVIAIVVGVAVICVVPYRYLQRRKKKGTYLTDETHREVKFTSL

SEQ ID NO: 8156 - protein, 377 aa, Homo sapiens
MEPPGRRECPFPSWRFPGLLLAAMVLLLYSFSDACEEPPTFEAMELIGKPKPYYEIGERVDYKCKKGYFYIPPLATHTICDRNHTWLPVSDDACYRETCPYIRDPLNGQAVPANGTYEFGYQMHFICNEGYYLIGEEILYCELKGSVAIWSGKPPICEKVLCTPPPKIKNGKHTFSEVEVFEYLDAVTYSCDPAPGPDPFSLIGESTIYCGDNSVWSRAAPECKVVKCRFPVVENGKQISGFGKKFYYKATVMFECDKGFYLDGSDTIVCDSNSTWDPPVPKCLKVSTSSTTKSPASSASGPRPTYKPPVSNYPGYPKPEEGILDSLDVWVIAVIVIAIVVGVAVICVVPYRYLQRRKKKGTYLTDETHREVKFTSL

SEQ ID NO: 8157 - protein, 336 aa, Homo sapiens
MEPPGRRECPFPSWRFPGLLLAAMVLLLYSFSGETCPYIRDPLNGQAVPANGTYEFGYQMHFICNEGYYLIGEEILYCELKGSVAIWSGKPPICEKVLCTPPPKIKNGKHTFSEVEVFEYLDAVTYSCDPAPGPDPFSLIGESTIYCGDNSVWSRAAPECKVVKCRFPVVENGKQISGFGKKFYYKATVMFECDKGFYLDGSDTIVCDSNSTWDPPVPKCLKVLPPSSTKPPALSHSVSTSSTTKSPASSASGPRPTYKPPVSNYPGYPKPEEGILDSLDVWVIAVIVIAIVVGVAVICVVPYRYLQRRKKKGKADGGAEYATYQTKSTTPAEQRG

SEQ ID NO: 8158 - protein, 397 aa, Homo sapiens
MNAGSDPVVIVSAARTIIGSFNGALAAVPVQDLGSTVIKEVLKRATVAPEDVSEVIFGHVLAAGCGQNPVRQASVGAGIPYSVPAWSCQMICGSGLKAVCLAVQSIGIGDSSIVVAGGMENMSKAPHLAYLRTGVKIGEMPLTDSILCDGLTDAFHNCHMGITAENVAKKWQVSREDQDKVAVLSQNRTENAQKAGHFDKEIVPVLVSTRKGLIEVKTDEFPRHGSNIEAMSKLKPYFLTDGTGTVTPANASGINDGAAAVVLMKKSEADKRGLTPLARIVSWSQVGVEPSIMGIGPIPAIKQAVTKAGWSLEDVDIFEINEAFAAVSAAIVKELGLNPEKVNIEGGAIALGHPLGASGCRILVTLLHTLERMGRSRGVAALCIGGGMGIAMCVQRE

SEQ ID NO: 8159 - protein, 222 aa, Homo sapiens
MLSRAVCGTSRQLAPVLGYLGSRQKHSLPDLPYDYGALEPHINAQIMQLHHSKHHAAYVNNLNVTEEKYQEALAKGDVTAQIALQPALKFNGGGHINHSIFWTNLSPNGGGEPKGELLEAIKRDFGSFDKFKEKLTAASVGVQGSGWGWLGFNKERGHLQIAACPNQDPLQGTTGLIPLLGIDVWEHAYYLQYKNVRPDYLKAIWNVINWENVTERYMACKK

SEQ ID NO: 8160 - protein, 1092 aa, Homo sapiens
MGAAGLLGVFLALVAPGVLGISCGSPPPILNGRISYYSTPIAVGTVIRYSCSGTFRLIGEKSLLCITKDKVDGTWDKPAPKCEYFNKYSSCPEPIVPGGYKIRGSTPYRHGDSVTFACKTNFSMNGNKSVWCQANNMWGPTRLPTCVSVFPLECPALPMIHNGHHTSENVGSIAPGLSVTYSCESGYLLVGEKIINCLSSGKWSAVPPTCEEARCKSLGRFPNGKVKEPPILRVGVTANFFCDEGYRLQGPPSSRCVIAGQGVAWTKMPVCEEIFCPSPPPILNGRHIGNSLANVSYGSIVTYTCDPDPEEGVNFILIGESTLRCTVDSQKTGTWSGPAPRCELSTSAVQCPHPQILRGRMVSGQKDRYTYNDTVIFACMFGFTLKGSKQIRCNAQGTWEPSAPVCEKECQAPPNILNGQKEDRHMVRFDPGTSIKYSCNPGYVLVGEESIQCTSEGVWTPPVPQCKVAACEATGRQLLTKPQHQFVRPDVNSSCGEGYKLSGSVYQECQGTIPWFMEIRLCKEITCPPPPVIYNGAHTGSSLEDFPYGTTVTYTCNPGPERGVEFSLIGESTIRCTSNDQERGTWSGPAPLCKLSLLAVQCSHVHIANGYKISGKEAPYFYNDTVTFKCYSGFTLKGSSQIRCKADNTWDPEIPVCEKGCQSPPGLHHGRHTGGNTVFFVSGMTVDYTCDPGYLLVGNKSIHCMPSGNWSPSAPRCEETCQHVRQSLQELPAGSRVELVNTSCQDGYQLTGHAYQMCQDAENGIWFKKIPLCKVIHCHPPPVIVNGKHTGMMAENFLYGNEVSYECDQGFYLLGEKKLQCRSDSKGHGSWSGPSPQCLRSPPVTRCPNPEVKHGYKLNKTHSAYSHNDIVYVDCNPGFIMNGSRVIRCHTDNTWVPGVPTCIKKAFIGCPPPPKTPNGNHTGGNIARFSPGMSILYSCDQGYLLVGEALLLCTHEGTWSQPAPHCKEVNCSSPADMDGIQKGLEPRKMYQYGAVVTLECEDGYMLEGSPQSQCQSDHQWNPPLAVCRSRSLAPVLCGIAAGLILLTFLIVITLYVISKHRARNYYTDTSQKEAFHLEAREVYSVDPYNPAS

SEQ ID NO: 8161 - protein, 1033 aa, Homo sapiens
MGAAGLLGVFLALVAPGVLGISCGSPPPILNGRISYYSTPIAVGTVIRYSCSGTFRLIGEKSLLCITKDKVDGTWDKPAPKCEYFNKYSSCPEPIVPGGYKIRGSTPYRHGDSVTFACKTNFSMNGNKSVWCQANNMWGPTRLPTCVSVFPLECPALPMIHNGHHTSENVGSIAPGLSVTYSCESGYLLVGEKIINCLSSGKWSAVPPTCEEARCKSLGRFPNGKVKEPPILRVGVTANFFCDEGYRLQGPPSSRCVIAGQGVAWTKMPVCEEIFCPSPPPILNGRHIGNSLANVSYGSIVTYTCDPDPEEGVNFILIGESTLRCTVDSQKTGTWSGPAPRCELSTSAVQCPHPQILRGRMVSGQKDRYTYNDTVIFACMFGFTLKGSKQIRCNAQGTWEPSAPVCEKECQAPPNILNGQKEDRHMVRFDPGTSIKYSCNPGYVLVGEESIQCTSEGVWTPPVPQCKVAACEATGRQLLTKPQHQFVRPDVNSSCGEGYKLSGSVYQECQGTIPWFMEIRLCKEITCPPPPVIYNGAHTGSSLEDFPYGTTVTYTCNPGPERGVEFSLIGESTIRCTSNDQERGTWSGPAPLCKLSLLAVQCSHVHIANGYKISGKEAPYFYNDTVTFKCYSGFTLKGSSQIRCKADNTWDPEIPVCEKETCQHVRQSLQELPAGSRVELVNTSCQDGYQLTGHAYQMCQDAENGIWFKKIPLCKVIHCHPPPVIVNGKHTGMMAENFLYGNEVSYECDQGFYLLGEKKLQCRSDSKGHGSWSGPSPQCLRSPPVTRCPNPEVKHGYKLNKTHSAYSHNDIVYVDCNPGFIMNGSRVIRCHTDNTWVPGVPTCIKKAFIGCPPPPKTPNGNHTGGNIARFSPGMSILYSCDQGYLLVGEALLLCTHEGTWSQPAPHCKEVNCSSPADMDGIQKGLEPRKMYQYGAVVTLECEDGYMLEGSPQSQCQSDHQWNPPLAVCRSRSLAPVLCGIAAGLILLTFLIVITLYVISKHRARNYYTDTSQKEAFHLEAREVYSVDPYNPAS

SEQ ID NO: 8162 - protein, 971 aa, Homo sapiens
MGAAGLLGVFLALVAPGVLGISCGSPPPILNGRISYYSTPIAVGTVIRYSCSGTFRLIGEKSLLCITKDKVDGTWDKPAPKCEYFNKYSSCPEPIVPGGYKIRGSTPYRHGDSVTFACKTNFSMNGNKSVWCQANNMWGPTRLPTCVSVFPLECPALPMIHNGHHTSENVGSIAPGLSVTYSCESGYLLVGEKIINCLSSGKWSAVPPTCEEARCKSLGRFPNGKVKEPPILRVGVTANFFCDEGYRLQGPPSSRCVIAGQGVAWTKMPVCEEIFCPSPPPILNGRHIGNSLANVSYGSIVTYTCDPDPEEGVNFILIGESTLRCTVDSQKTGTWSGPAPRCELSTSAVQCPHPQILRGRMVSGQKDRYTYNDTVIFACMFGFTLKGSKQIRCNAQGTWEPSAPVCEKECQAPPNILNGQKEDRHMVRFDPGTSIKYSCNPGYVLVGEESIQCTSEGVWTPPVPQCKVAACEATGRQLLTKPQHQFVRPDVNSSCGEGYKLSGSVYQECQGTIPWFMEIRLCKEITCPPPPVIYNGAHTGSSLEDFPYGTTVTYTCNPGPERGVEFSLIGESTIRCTSNDQERGTWSGPAPLCKLSLLAVQCSHVHIANGYKISGKEAPYFYNDTVTFKCYSGFTLKGSSQIRCKADNTWDPEIPVCEKETCQHVRQSLQELPAGSRVELVNTSCQDGYQLTGHAYQMCQDAENGIWFKKIPLCKVIHCHPPPVIVNGKHTGMMAENFLYGNEVSYECDQGFYLLGEKKLQCRSDSKGHGSWSGPSPQCLRSPPVTRCPNPEVKHGYKLNKTHSAYSHNDIVYVDCNPGFIMNGSRVIRCHTDNTWVPGVPTCIKKEVNCSSPADMDGIQKGLEPRKMYQYGAVVTLECEDGYMLEGSPQSQCQSDHQWNPPLAVCRSRSLAPVLCGIAAGLILLTFLIVITLYVISKHRARNYYTDTSQKEAFHLEAREVYSVDPYNPAS

SEQ ID NO: 8163 - protein, 444 aa, Homo sapiens
MTVARPSVPAALPLLGELPRLLLLVLLCLPAVWGDCGLPPDVPNAQPALEGRTSFPEDTVITYKCEESFVKIPGEKDSVICLKGSQWSDIEEFCNRSCEVPTRLNSASLKQPYITQNYFPVGTVVEYECRPGYRREPSLSPKLTCLQNLKWSTAVEFCKKKSCPNPGEIRNGQIDVPGGILFGATISFSCNTGYKLFGSTSSFCLISGSSVQWSDPLPECREIYCPAPPQIDNGIIQGERDHYGYRQSVTYACNKGFTMIGEHSIYCTVNNDEGEWSGPPPECRGKSLTSKVPPTVQKPTTVNVPTTEVSPTSQKTTTKTTTPNAQATRSTPVSRTTKHFHETTPNKGSGTTSGTTRLLSGSRPVTQAGMRWCDRSSLQSRTPGFKRSFHFSLPSSWYYRCVPRHPAKFLKFIFCRDRIFLCCPGWFQTPGRKRFFRPPKTLRL

SEQ ID NO: 8164 - protein, 381 aa, Homo sapiens
MTVARPSVPAALPLLGELPRLLLLVLLCLPAVWGDCGLPPDVPNAQPALEGRTSFPEDTVITYKCEESFVKIPGEKDSVICLKGSQWSDIEEFCNRSCEVPTRLNSASLKQPYITQNYFPVGTVVEYECRPGYRREPSLSPKLTCLQNLKWSTAVEFCKKKSCPNPGEIRNGQIDVPGGILFGATISFSCNTGYKLFGSTSSFCLISGSSVQWSDPLPECREIYCPAPPQIDNGIIQGERDHYGYRQSVTYACNKGFTMIGEHSIYCTVNNDEGEWSGPPPECRGKSLTSKVPPTVQKPTTVNVPTTEVSPTSQKTTTKTTTPNAQATRSTPVSRTTKHFHETTPNKGSGTTSGTTRLLSGHTCFTLTGLLGTLVTMGLLT

SEQ ID NO: 8165 - protein, 550 aa, Homo sapiens
MTVARPSVPAALPLLGELPRLLLLVLLCLPAVWGDCGLPPDVPNAQPALEGRTSFPEDTVITYKCEESFVKIPGEKDSVICLKGSQWSDIEEFCNRSCEVPTRLNSASLKQPYITQNYFPVGTVVEYECRPGYRREPSLSPKLTCLQNLKWSTAVEFCKKKSCPNPGEIRNGQIDVPGGILFGATISFSCNTGYKLFGSTSSFCLISGSSVQWSDPLPECREIYCPAPPQIDNGIIQGERDHYGYRQSVTYACNKGFTMIGEHSIYCTVNNDEGEWSGPPPECRGKSLTSKVPPTVQKPTTVNVPTTEVSPTSQKTTTKTTTPNAQGTETPSVLQKHTTENVSATRTPPTPQKPTTVNVPATIVTPTPKPTTINVPATGVSSTPQRHTIVNVSATGTLPTLQKPTRANDSATKSPAAAQTSFISKTLSTKTPSAAQNPMMTNASATQATLTAQKFTTAKVAFTQSPSAARKSTNVHSPVTNGLKSTQRFPSAHITATRSTPVSRTTKHFHETTPNKGSGTTSGTTRLLSGHTCFTLTGLLGTLVTMGLLT

SEQ ID NO: 8166 - protein, 418 aa, Homo sapiens
MASALTDRTSRAPSTYTYTSRPRALPCQRSRYRDSLTQPDEEPMHYGNIMYDRRVIRGNTYALQTGPLLGRPDSLELQRQREARKRALARKQAQEQLRPQTPEPVEGRKHVDVQTELYLEEIADRIIEVDMECQTDAFLDRPPTPLFIPAKTGKDVATQILEGELFDFDLEVKPVLEVLVGKTIEQSLLEVMEEEELANLRASQREYEELRNSERAEVQRLEEQERRHREEKERRKKQQWEIMHKHNETSQKIAARAFAQRYLADLLPSVFGSLRDSGYFYDPIERDIEIGFLPWLMNEVEKTMEYSMVGRTVLDMLIREVVEKRLCMYEHGEDTHQSPEPEDEPGGPGAMTESLEASEFLEQSMSQTRELLLDGGYLQRTTYDRRSSQERKFMEERELLGQDEETAMRKSLGEEELS

SEQ ID NO: 8167 - protein, 597 aa, Homo sapiens
MHPPKTPSGALHRKRKMAAWPFSRLWKVSDPILFQMTLIAALLPAVLGNCGPPPTLSFAAPMDITLTETRFKTGTTLKYTCLPGYVRSHSTQTLTCNSDGEWVYNTFCIYKRCRHPGELRNGQVEIKTDLSFGSQIEFSCSEGFFLIGSTTSRCEVQDRGVGWSHPLPQCEIVKCKPPPDIRNGRHSGEENFYAYGFSVTYSCDPRFSLLGHASISCTVENETIGVWRPSPPTCEKITCRKPDVSHGEMVSGFGPIYNYKDTIVFKCQKGFVLRGSSVIHCDADSKWNPSPPACEPNSCINLPDIPHASWETYPRPTKEDVYVVGTVLRYRCHPGYKPTTDEPTTVICQKNLRWTPYQGCEALCCPEPKLNNGEITQHRKSRPANHCVYFYGDEISFSCHETSRFSAICQGDGTWSPRTPSCGDICNFPPKIAHGHYKQSSSYSFFKEEIIYECDKGYILVGQAKLSCSYSHWSAPAPQCKALCRKPELVNGRLSVDKDQYVEPENVTIQCDSGYGVVGPQSITCSGNRTWYPEVPKCEWETPEGCEQVLTGKRLMQCLPNPEDVKMALEVYKLSLEIEQLELQRDSARQSTLDKEL

SEQ ID NO: 8168 - protein, 251 aa, Homo sapiens
MFFWCACCLMVAWRVSASDEHCPELPPVDNSIFVAKEVEGQILGTYVCIKGYHLVGKKTLFCNASKEWDNTTTECRLGHCPDPVLVNGEFSSSGPVNVSDKITFMCNDHYILKGSNRSQCLEDHTWAPPFPICKSRDCDPPGNPVHGYFEGNNFTLGSTISYYCEDRYYLVGVQEQQCVDGEWSSALPVCKLIQEAPKPECEKALLAFQESKNLCEAMENFMQQLKESGMTMEELKYSLELKKAELKAKLL

SEQ ID NO: 8169 - protein, 505 aa, Homo sapiens
MSGASSSEQNNNSYETKTPNLRMSEKKCSWASYMTNSPTLIVMIGLPARGKTYVSKKLTRYLNWIGVPTKVFNLGVYRREAVKSYKSYDFFRHDNEEAMKIRKQCALVALEDVKAYLTEENGQIAVFDATNTTRERRDMILNFAEQNSFKVFFVESVCDDPDVIAANILEVKVSSPDYPERNRENVMEDFLKRIECYKVTYRPLDPDNYDKDLSFIKVINVGQRFLVNRVQDYIQSKIVYYLMNIHVQPRTIYLCRHGESEFNLLGKIGGDSGLSVRGKQFAQALRKFLEEQEITDLKVWTSQLKRTIQTAESLGVPYEQWKILNEIDAGVCEEMTYAEIEKRYPEEFALRDQEKYLYRYPGGESYQDLVQRLEPVIMELERQGNVLVISHQAVMRCLLAYFLDKGADELPYLRCPLHTIFKLTPVAYGCKVETIKLNVEAVNTHRDKPTNNFPKNQTPVRMRRNSFTPLSSSNTIRRPRNYSVGSRPLKPLSPLRAQDMQEGAD

SEQ ID NO: 8170 - protein, 113 aa, Homo sapiens
MEDYQAAEETAFVVDEVSNIVKEAIESAIGGNAYQHSKVNQWTTNVVEQTLSQLTKLGKPFKYIVTCVIMQKNGAGLHTASSCFWDSSTDGSCTVRWENKTMYCIVSAFGLSI

SEQ ID NO: 8171 - protein, 390 aa, Homo sapiens
MDFWLWPLYFLPVSGALRILPEVKVEGELGGSVTIKCPLPEMHVRIYLCREMAGSGTCGTVVSTTNFIKAEYKGRVTLKQYPRKNLFLVEVTQLTESDSGVYACGAGMNTDRGKTQKVTLNVHSEYEPSWEEQPMPETPKWFHLPYLFQMPAYASSSKFVTRVTTPAQRGKVPPVHHSSPTTQITHRPRVSRASSVAGDKPRTFLPSTTASKISALEGLLKPQTPSYNHHTRLHRQRALDYGSQSGREGQGFHILIPTILGLFLLALLGLVVKRAVERRKALSRRARRLAVRMRALESSQRPRGSPRPRSQNNIYSACPRRARGADAAGTGEAPVPGPGAPLPPAPLQVSESPWLHAPSLKTSCEYVSLYHQPAAMMEDSDSDDYINVPA

SEQ ID NO: 8172 - protein, 176 aa, Homo sapiens
MKASSLAFSLLSAAFYLLWTPSTGLKTLNLGSCVIATNLQEIRNGFSEIRGSVQAKDGNIDIRILRRTESLQDTKPANRCCLLRHLLRLYLDRVFKNYQTPDHYTLRKISSLANSFLTIKKDLRLCHAHMTCHCGEEAMKKYSQILSHFEKLEPQAAVVKALGELDILLQWMEETE

SEQ ID NO: 8173 - protein, 1543 aa, Homo sapiens
MYAAVEHGPVLCSDSNILCLSWKGRVPKSEKEKPVCRRRYYEEGWLATGNGRGVVGVTFTSSHCRRDRSTPQRINFNLRGHNSEVVLVRWNEPYQKLATCDADGGIFVWIQYEGRWSVELVNDRGAQVSDFTWSHDGTQALISYRDGFVLVGSVSGQRHWSSEINLESQITCGIWTPDDQQVLFGTADGQVIVMDCHGRMLAHVLLHESDGVLGMSWNYPIFLVEDSSESDTDSDDYAPPQDGPAAYPIPVQNIKPLLTVSFTSGDISLMNNYDDLSPTVIRSGLKEVVAQWCTQGDLLAVAGMERQTQLGELPNGPLLKSAMVKFYNVRGEHIFTLDTLVQRPIISICWGHRDSRLLMASGPALYVVRVEHRVSSLQLLCQQAIASTLREDKDVSKLTLPPRLCSYLSTAFIPTIKPPIPDPNNMRDFVSYPSAGNERLHCTMKRTEDDPEVGGPCYTLYLEYLGGLVPILKGRRISKLRPEFVIMDPRTDSKPDEIYGNSLISTVIDSCNCSDSSDIELSDDWAAKKSPKISRASKSPKLPRISIEARKSPKLPRAAQELSRSPRLPLRKPSVGSPSLTRREFPFEDITQHNYLAQVTSNIWGTKFKIVGLAAFLPTNLGAVIYKTSLLHLQPRQMTIYLPEVRKISMDYINLPVFNPNVFSEDEDDLPVTGASGVPENSPPCTVNIPIAPIHSSAQAMSPTQSIGLVQSLLANQNVQLDVLTNQTTAVGTAEHAGDSATQYPVSNRYSNPGQVIFGSVEMGRIIQNPPPLSLPPPPQGPMQLSTVGHGDRDHEHLQKSAKALRPTPQLAAEGDAVVFSAPQEVQVTKINPPPPYPGTIPAAPTTAAPPPPLPPPQPPVDVCLKKGDFSLYPTSVHYQTPLGYERITTFDSSGNVEEVCRPRTRMLCSQNTYTLPGPGSSATLRLTATEKKVPQPCSSATLNRLTVPRYSIPTGDPPPYPEIASQLAQGRGAAQRSDNSLIHATLRRNNREATLKMAQLADSPRAPLQPLAKSKGGPGGVVTQLPARPPPALYTCSQCSGTGPSSQPGASLAHTASASPLASQSSYSLLSPPDSARDRTDYVNSAFTEDEALSQHCQLEKPLRHPPLPEAAVTLKRPPPYQWDPMLGEDVWVPQERTAQTSGPNPLKLSSLMLSQGQHLDVSRLPFISPKSPASPTATFQTGYGMGVPYPGSYNNPPLPGVQAPCSPKDALSPTQFAQQEPAVVLQPLYPPSLSYCTLPPMYPGSSTCSSLQLPPVALHPWSSYSACPPMQNPQGTLPPKPHLVVEKPLVSPPPADLQSHLGTEVMVETADNFQEVLSLTESPVPQRTEKFGKKNRKRLDSRAEEGSVQAITEGKVKKEARTLSDFNSLISSPHLGREKKKVKSQKDQLKSKKLNKTNEFQDSSESEPELFISGDELMNQSQGSRKGWKSKRSPRAAGELEEAKCRRASEKEDGRLGSQGFVYVMANKQPLWNEATQVYQLDFGGRVTQESAKNFQIELEGRQVMQFGRIDGSAYILDFQYPFSAVQAFAVALANVTQRLK

SEQ ID NO: 8174 - protein, 400 aa, Homo sapiens
MLSNSQGQSPPVPFPAPAPPPQPPTPALPHPPAQPPPPPPQQFPQFHVKSGLQIKKNAIIDDYKVTSQVLGLGINGKVLQIFNKRTQEKFALKMLQDCPKARREVELHWRASQCPHIVRIVDVYENLYAGRKCLLIVMECLDGGELFSRIQDRGDQAFTEREASEIMKSIGEAIQYLHSINIAHRDVKPENLLYTSKRPNAILKLTDFGFAKETTSHNSLTTPCYTPYYVAPEVLGPEKYDKSCDMWSLGVIMYILLCGYPPFYSNHGLAISPGMKTRIRMGQYEFPNPEWSEVSEEVKMLIRNLLKTEPTQRMTITEFMNHPWIMQSTKVPQTPLHTSRVLKEDKERWEDVKEEMTSALATMRVDYEQIKIKKIEDASNPLLLKRRKKARALEAAALAH

SEQ ID NO: 8175 - protein, 588 aa, Homo sapiens
MGGTARGPGRKDAGPPGAGLPPQQRRLGDGVYDTFMMIDETKCPPCSNVLCNPSEPPPPRRLNMTTEQFTGDHTQHFLDGGEMKVEQLFQEFGNRKSNTIQSDGISDSEKCSPTVSQGKSSDCLNTVKSNSSSKAPKVVPLTPEQALKQYKHHLTAYEKLEIINYPEIYFVGPNAKKRHGVIGGPNNGGYDDADGAYIHVPRDHLAYRYEVLKIIGKGSFGQVARVYDHKLRQYVALKMVRNEKRFHRQAAEEIRILEHLKKQDKTGSMNVIHMLESFTFRNHVCMAFELLSIDLYELIKKNKFQGFSVQLVRKFAQSILQSLDALHKNKIIHCDLKPENILLKHHGRSSTKVIDFGSSCFEYQKLYTYIQSRFYRAPEIILGSRYSTPIDIWSFGCILAELLTGQPLFPGEDEGDQLACMMELLGMPPPKLLEQSKRAKYFINSKGIPRYCSVTTQADGRVVLVGGRSRRGKKRGPPGSKDWGTALKGCDDYLFIEFLKRCLHWDPSARLTPAQALRHPWISKSVPRPLTTIDKVSGKRVVNPASAFQGLGSKLPPVVGIANKLKANLMSETNGSIPLCSVLPKLIS

SEQ ID NO: 8176 - protein, 513 aa, Homo sapiens
MSSKPEPKDVHQLNGTGPSASPCSSDGPGREPLAGTSEFLGPDGAGVEVVIESRANAKGVREEDALLENGSQSNESDDVSTDRGPAPPSPLKETSFSIGLQVLFPFLLAGFGTVAAGMVLDIVQHWEVFQKVTEVFILVPALLGLKGNLEMTLASRLSTAANIGHMDTPKELWRMITGNMALIQVQATVVGFLASIAAVVFGWIPDGHFSIPHAFLLCASSVATAFIASLVLGMIMIGVIIGSRKIGINPDNVATPIAASLGDLITLALLSGISWGLYLELNHWRYIYPLVCAFFVALLPVWVVLARRSPATREVLYSGWEPVIIAMAISSVGGLILDKTVSDPNFAGMAVFTPVINGVGGNLVAVQASRISTFLHMNGMPGENSEQAPRRCPSPCTTFFSPDVNSRSARVLFLLVVPGHLVFLYTISCMQGGHTTLTLIFIIFYMTAALLQVLILLYIADWMVHWMWGRGLDPDNFSIPYLTALGDLLGTGLLALSFHVLWLIGDRDTDVGD

SEQ ID NO: 8177 - protein, 243 aa, Homo sapiens
MSRPVRNRKVVDYSQFQESDDADEDYGRDSGPPTKKIRSSPREAKNKRRSGKNSQEDSEDSEDKDVKTKKDDSHSAEDSEDEKEDHKNVRQQRQAASKAASKQREMLMEDVGSEEEQEEEDEAPFQEKDSGSDEDFLMEDDDDSDYGSSKKKNKKMVKKSKPERKEKKMPKPRLKATVTPSPVKGKGKVGRPTASKASKEKTPSPKEEDEEPESPPEKKTSTSPPPEKSGDEGSEDEAPSGED

SEQ ID NO: 8178 - protein, 628 aa, Homo sapiens
MESLVFARRSGPTPSAAELARPLAEGLIKSPKPLMKKQAVKRHHHKHNLRHRYEFLETLGKGTYGKVKKARESSGRLVAIKSIRKDKIKDEQDLMHIRREIEIMSSLNHPHIIAIHEVFENSSKIVIVMEYASRGDLYDYISERQQLSEREARHFFRQIVSAVHYCHQNRVVHRDLKLENILLDANGNIKIADFGLSNLYHQGKFLQTFCGSPLYASPEIVNGKPYTGPEVDSWSLGVLLYILVHGTMPFDGHDHKILVKQISNGAYREPPKPSDACGLIRWLLMVNPTRRATLEDVASHWWVNWGYATRVGEQEAPHEGGHPGSDSARASMADWLRRSSRPLLENGAKVCSFFKQHAPGGGSTTPGLERQHSLKKSRKENDMAQSLHSDTADDTAHRPGKSNLKLPKGILKKKVSASAEGVQEDPPELSPIPASPGQAAPLLPKKGILKKPRQRESGYYSSPEPSESGELLDAGDVFVSGDPKEQKPPQASGLLLHRKGILKLNGKFSQTALELAAPTTFGSLDELAPPRPLARASRPSGAVSEDSILSSESFDQLDLPERLPEPPLRGCVSVDNLTGLEEPPSEGPGSCLRRWRQDPLGDSCFSLTDCQEVTATYRQALRVCSKLT

SEQ ID NO: 8179 - protein, 500 aa, Homo sapiens
MNLELLESFGQNYPEEADGTLDCISMALTCTFNRWGTLLAVGCNDGRIVIWDFLTRGIAKIISAHIHPVCSLCWSRDGHKLVSASTDNIVSQWDVLSGDCDQRFRFPSPILKVQYHPRDQNKVLVCPMKSAPVMLTLSDSKHVVLPVDDDSDLNVVASFDRRGEYIYTGNAKGKILVLKTDSQDLVASFRVTTGTSNTTAIKSIEFARKGSCFLINTADRIIRVYDGREILTCGRDGEPEPMQKLQDLVNRTPWKKCCFSGDGEYIVAGSARQHALYIWEKSIGNLVKILHGTRGELLLDVAWHPVRPIIASISSGVVSIWAQNQVENWSAFAPDFKELDENVEYEERESEFDIEDEDKSEPEQTGADAAEDEEVDVTSVDPIAAFCSSDEELEDSKALLYLPIAPEVEDPEENPYGPPPDAVQTSLMDEGASSEKKRQSSADGSQPPKKKPKTTNIELQGVPNDEVHPLLGVKGDGKSKKKQAGRPKGSKAGGAISELL

SEQ ID NO: 8180 - protein, 713 aa, Homo sapiens
MRLLVAPLLLAWVAGATAAVPVVPWHVPCPPQCACQIRPWYTPRSSYREATTVDCNDLFLTAVPPALPAGTQTLLLQSNSIVRVDQSELGYLANLTELDLSQNSFSDARDCDFHALPQLLSLHLEENQLTRLEDHSFAGLASLQELYLNHNQLYRIAPRAFSGLSNLLRLHLNSNLLRAIDSRWFEMLPNLEILMIGGNKVDAILDMNFRPLANLRSLVLAGMNLREISDYALEGLQSLESLSFYDNQLARVPRRALEQVPGLKFLDLNKNPLQRVGPGDFANMLHLKELGLNNMEELVSIDKFALVNLPELTKLDITNNPRLSFIHPRAFHHLPQMETLMLNNNALSALHQQTVESLPNLQEVGLHGNPIRCDCVIRWANATGTRVRFIEPQSTLCAEPPDLQRLPVREVPFREMTDHCLPLISPRSFPPSLQVASGESMVLHCRALAEPEPEIYWVTPAGLRLTPAHAGRRYRVYPEGTLELRRVTAEEAGLYTCVAQNLVGADTKTVSVVVGRALLQPGRDEGQGLELRVQETHPYHILLSWVTPPNTVSTNLTWSSASSLRGQGATALARLPRGTHSYNITRLLQATEYWACLQVAFADAHTQLACVWARTKEATSCHRALGDRPGLIAILALAVLLLAAGLAAHLGTGQPRKGVGGRRPLPPAWAFWGWSAPSVRVVSAPLVLPWNPGRKLPRSSEGETLLPPLSQNS

SEQ ID NO: 8181 - protein, 1271 aa, Homo sapiens
MEAVKTFNSELYSLNDYKPPISKAKMTQITKAAIKAIKFYKHVVQSVEKFIQKCKPEYKVPGLYVIDSIVRQSRHQFGQEKDVFAPRFSNNIISTFQNLYRCPGDDKSKIVRVLNLWQKNNVFKSEIIQPLLDMAAGIPPPVVTPVLASTTTAMSNTPGTPVTPVTPANVVQGLPDPWVSQITNTDTLAAVAQILQSPQGQQLQQLIQTLQIQQQKPQPSILQALDAGLVVQLQALTAQLTAAAAAANTLTPLEQGVSFNKKLMDRFDFGEDSEHSEEPKKEIPASQLSHVSESVNNSIFHQIAEQLQQQNLEHLRQQLLEQQQPQKATPQDSQEGTFGSEHSASPSQGSSQQHFLEPEVNLDDSIDIQQQDMDIDEGQDGVEEEVFEQEAKKVAVRSRSRTHSRSRSRSPRKRRSRSRSGSRKRKHRKRSRSRSRERKRKSSRSYSSERRAREREKERQKKGLPPIRSKTLSVCSTTLWVGQVDKKATQQDLTNLFEEFGQIESINMIPPRGCAYVCMVHRQDAFRALQKLSSGSYKIGSKVIKIAWALNKGVKTEYKQFWDVDLGVTYIPWEKVKVDDLEGFAEGGMIDQETVNTEWETVKSSEPVKETVQTTQSPTPVEKETVVTTQAEVFPPPVAMLQIPVAPAVPTVSLVPPAFPVSMPVPPPGFSPIPPPPFLRASFNPSQPPPGFMPPPVPPPVVPPPTIPPVVPTSLVQPSLSMTPETVKDVGFGSLVIPGGSVASNLATSALPAGNVFNAPTKQAEPEEKVPHLIDHQISSGENTRSVIPNDISSNAAILGGQPPNVTSNSGILGVQRPNVSSNSEILGVRPSNVSSSSGIIAAQPPNILNNSGILGIQPPSVSNSSGLLGVLPPNIPNNSGLVGVQPPNVPNTPGLLGTQPPAGPQNLPPLSIPNQRMPTMPMLDIRPGLIPQAPGPRFPLIQPGIPPQRGIPPPSVLDSALHPPPRGPFPPGDIFSQPERPFLAPGRQSVDNVTNPEKRIPLGNDNIQQEGDRDYRFPPIETRESISRPPPVDVRDVVGRPIDPREGPGRPPLDGRDHFGRPPVDIRENLVRPGIDHLGRRDHFGFNPEKPWGHRGDFDEREHRVLPVYGGPKGLHEERGRFRSGNYRFDPRSGPWNRGFGQEVHRDFDDRRRPWERQRDRDDRDFDFCREMNGNRLGRDRIQNTWVPPPHARVFDYFEGATSQRKGDNVPQVNGENTERHAQPPPIPVQNDPELYEKLTSSNEINKEKSDTVADIESEPVVESTETEGT

SEQ ID NO: 8182 - protein, 1337 aa, Homo sapiens
MPQPLLPALPPLSSPSGAGSCGPSGGECSGRRLFRRRARGLRSDNMEAVKTFNSEDCASTPACTDCFSSSMDTRSILYSLNDYKPPISKAKMTQITKAAIKAIKFYKHVVQSVEKFIQKCKPEYKVPGLYVIDSIVRQSRHQFGQEKDVFAPRFSNNIISTFQNLYRCPGDDKSKIVRVLNLWQKNNVFKSEIIQPLLDMAAGIPPPVVTPVLASTTTAMSNTPGTPVTPVTPANVVQGLPDPWVSQITNTDTLAAVAQILQSPQGQQLQQLIQTLQIQQQKPQPSILQALDAGLVVQLQALTAQLTAAAAAANTLTPLEQGVSFNKKLMDRFDFGEDSEHSEEPKKEIPASQLSHVSESVNNSIFHQIAEQLQQQNLEHLRQQLLEQQQPQKATPQDSQEGTFGSEHSASPSQGSSQQHFLEPEVNLDDSIDIQQQDMDIDEGQDGVEEEVFEQEAKKVAVRSRSRTHSRSRSRSPRKRRSRSRSGSRKRKHRKRSRSRSRERKRKSSRSYSSERRAREREKERQKKGLPPIRSKTLSVCSTTLWVGQVDKKATQQDLTNLFEEFGQIESINMIPPRGCAYVCMVHRQDAFRALQKLSSGSYKIGSKVIKIAWALNKGVKTEYKQFWDVDLGVTYIPWEKVKVDDLEGFAEGGMIDQETVNTEWETVKSSEPVKETVQTTQSPTPVEKETVVTTQAEVFPPPVAMLQIPVAPAVPTVSLVPPAFPVSMPVPPPGFSPIPPPPFLRASFNPSQPPPGFMPPPVPPPVVPPPTIPPVVPTSLVQPSLSMTPETVKDVGFGSLVIPGGSVASNLATSALPAGNVFNAPTKQAEPEEKVPHLIDHQISSGENTRSVIPNDISSNAAILGGQPPNVTSNSGILGVQRPNVSSNSEILGVRPSNVSSSSGIIAAQPPNILNNSGILGIQPPSVSNSSGLLGVLPPNIPNNSGLVGVQPPNVPNTPGLLGTQPPAGPQNLPPLSIPNQRMPTMPMLDIRPGLIPQAPGPRFPLIQPGIPPQRGIPPPSVLDSALHPPPRGPFPPGDIFSQPERPFLAPGRQSVDNVTNPEKRIPLGNDNIQQEGDRDYRFPPIETRESISRPPPVDVRDVVGRPIDPREGPGRPPLDGRDHFGRPPVDIRENLVRPGIDHLGRRDHFGFNPEKPWGHRGDFDEREHRVLPVYGGPKGLHEERGRFRSGNYRFDPRSGPWNRGFGQEVHRDFDDRRRPWERQRDRDDRDFDFCREMNGNRLGRDRIQNTWVPPPHARVFDYFEGATSQRKGDNVPQVNGENTERHAQPPPIPVQNDPELYEKLTSSNEINKEKSDTVADIESEPVVESTETEGT

SEQ ID NO: 8183 - protein, 713 aa, Homo sapiens
MEPGTGGSRKRLGPRAGFRFWPPFFPRRSQAGSSKFPTPLGPENSGNPTLLSSAQPETRVSYWTKLLSQLLAPLPGLLQKVLIWSQLFGGMFPTRWLDFAGVYSALRALKGREKPAAPTAQKSLSSLQLDSSDPSVTSPLDWLEEGIHWQYSPPDLKLELKAKGSALDPAAQAFLLEQQLWGVELLPSSLQSRLYSNRELGSSPSGPLNIQRIDNFSVVSYLLNPSYLDCFPRLEVSYQNSDGNSEVVGFQTLTPESSCLREDHCHPQPLSAELIPASWQGCPPLSTEGLPEIHHLRMKRLEFLQQASKGQDLPTPDQDNGYHSLEEEHSLLRMDPKHCRDNPTQFVPAAGDIPGNTQESTEEKIELLTTEVPLALEEESPSEGCPSSEIPMEKEPGEGRISVVDYSYLEGDLPISARPACSNKLIDYILGGASSDLETSSDPEGEDWDEEAEDDGFDSDSSLSDSDLEQDPEGLHLWNSFCSVDPYNPQNFTATIQTAARIVPEEPSDSEKDLSGKSDLENSSQSGSLPETPEHSSGEEDDWESSADEAESLKLWNSFCNSDDPYNPLNFKAPFQTSGENEKGCRDSKTPSESIVAISECHTLLSCKVQLLGSQESECPDSVQRDVLSGGRHTHVKRKKVTFLEEVTEYYISGDEDRKGPWEEFARDGCRFQKRIQETEDAIGYCLTFEHRERMFNRLQGTCFKGLNVLKQC

SEQ ID NO: 8184 - protein, 138 aa, Homo sapiens
MNSLVSWQLLLFLCATHFGEPLEKVASVGNSRPTGQQLESLGLLAPGEQSLPCTERKPAATARLSRRGTSLSPPPESSGSPQQPGLSAPHSRQIPAPQGAVLVQREKDLPNYNWNSFGLRFGKREAAPGNHGRSAGRG

SEQ ID NO: 8185 - protein, 386 aa, Homo sapiens
MAVPPSAPQPRASFHLRRHTPCPQCSWGMEEKAAASASCREPPGPPRAAAVAYFGISVDPDDILPGALRLIQELRPHWKPEQVRTKRFTDGITNKLVACYVEEDMQDCVLVRVYGERTELLVDRENEVRNFQLLRAHSCAPKLYCTFQNGLCYEYMQGVALEPEHIREPRLFRLIALEMAKIHTIHANGSLPKPILWHKMHNYFTLVKNEINPSLSADVPKVEVLERELAWLKEHLSQLESPVVFCHNDLLCKNIIYDSIKGHVRFIDYEYAGYNYQAFDIGNHFNEFAGVNEVDYCLYPARETQLQWLHYYLQAQKGMAVTPREVQRLYVQVNKFALASHFFWALWALIQNQYSTIDFDFLRYAVIRFNQYFKVKPQASALEMPK

SEQ ID NO: 8186 - protein, 332 aa, Homo sapiens
MRLLAFLSLLALVLQETGTASLPRKERKRREEQMPREGDSFEVLPLRNDVLNPDNYGEVIDLSNYEELTDYGDQLPEVKVTSLAPATSISPAKSTTAPGTPSSNPTMTRPTTAGLLLSSQPNHGLPTCLVCVCLGSSVYCDDIDLEDIPPLPRRTAYLYARFNRISRIRAEDFKGLTKLKRIDLSNNLISSIDNDAFRLLHALQDLILPENQLEALPVLPSGIEFLDVRLNRLQSSGIQPAAFRAMEKLQFLYLSDNLLDSIPGPLPLSLRSVHLQNNLIETMQRDVFCDPEEHKHTRRQLEDIRLDGNPINLSLFPSAYFCLPRLPIGRFT

SEQ ID NO: 8187 - protein, 401 aa, Homo sapiens
MKCDFNCNHVHSGLKLVKPDDIGRLVSYTPAYLEGSCKDCIKDYERLSCIGSPIVSPRIVQLETESKRLHNKENQHVQQTLNSTNEIEALETSRLYEDSGYSSFSLQSGLSEHEEGSLLEENFGDSLQSCLLQIQSPDQYPNKNLLPVLHFEKVVCSTLKKNAKRNPKVDREMLKEIIARGNFRLQNIIGRKMGLECVDILSELFRRGLRHVLATILAQLSDMDLINVSKVSTTWKKILEDDKGAFQLYSKAIQRVTENNNKFSPHASTREYVMFRTPLASVQKSAAQTSLKKDAQTKLSNQGDQKGSTYSRHNEFSEVAKTLKKNESLKACIRCNSPAKYDCYLQRATCKREGCGFDYCTKCLCNYHTTKDCSDGKLLKASCKIGPLPGTKKSKKNLRRL

SEQ ID NO: 8188 - protein, 169 aa, Homo sapiens
MDTRNKAQLLVLLTLLSVLFSQTSAWPLYRAPSALRLGDRIPFEGANEPDQVSLKEDIDMLQNALAENDTPYYDVSRNARHADGVFTSDFSKLLGQLSAKKYLESLMGKRVSNISEDPVPVKRHSDAVFTDNYTRLRKQMAVKKYLNSILNGKRSSEGESPDFPEELEK

SEQ ID NO: 8189 - protein, 170 aa, Homo sapiens
MDTRNKAQLLVLLTLLSVLFSQTSAWPLYRAPSALRLGDRIPFEGANEPDQVSLKEDIDMLQNALAENDTPYYDVSRNARHADGVFTSDFSKLLGQLSAKKYLESLMGKRVSSNISEDPVPVKRHSDAVFTDNYTRLRKQMAVKKYLNSILNGKRSSEGESPDFPEELEK

SEQ ID NO: 8190 - protein, 235 aa, Homo sapiens
MRTQVYEGLCKNYFSLAVLQRDRIKLLFFDILVFLSVFLLFLLFLVDIMANNTTSLGSPWPENFWEDLIMSFTVSMAIGLVLGGFIWAVFICLSRRRRASAPISQWSSSRRSRSSYTHGLNRTGFYRHSGCERRSNLSLASLTFQRQASLEQANSFPRKSSFRASTFHPFLQCPPLPVETESQLVTLPSSNISPTISTSHSLSRPDYWSSNSLRVGLSTPPPPAYESIIKAFPDS

SEQ ID NO: 8191 - protein, 305 aa, Homo sapiens
MGIQTSPVLLASLGVGLVTLLGLAVGSYLVRRSRRPQVTLLDPNEKYLLRLLDKTTVSHNTKRFRFALPTAHHTLGLPVGKHIYLSTRIDGSLVIRPYTPVTSDEDQGYVDLVIKVYLKGVHPKFPEGGKMSQYLDSLKVGDVVEFRGPSGLLTYTGKGHFNIQPNKKSPPEPRVAKKLGMIAGGTGITPMLQLIRAILKVPEDPTQCFLLFANQTEKDIILREDLEELQARYPNRFKLWFTLDHPPKDWAYSKGFVTADMIREHLPAPGDDVLVLLCGPPPMVQLACHPNLDKLGYSQKMRFTY

SEQ ID NO: 8192 - protein, 123 aa, Homo sapiens
MEPAEQPSELVSAEGRNRKAVLCQRCGSRVLQPGTALFSRRQLFLPSMRKKPALSDGSNPDGDLLQEHWLVEDMFIFENVGFTKDVGNIKFLVCADCEIGPIGWHCLDDKNSFYVALERVSHE

SEQ ID NO: 8193 - protein, 1580 aa, Homo sapiens
MEAATTLHPGPRPALPLGGPGPLGEFLPPPECPVFEPSWEEFADPFAFIHKIRPIAEQTGICKVRPPPDWQPPFACDVDKLHFTPRIQRLNELEAQTRVKLNFLDQIAKYWELQGSTLKIPHVERKILDLFQLNKLVAEEGGFAVVCKDRKWTKIATKMGFAPGKAVGSHIRGHYERILNPYNLFLSGDSLRCLQKPNLTTDTKDKEYKPHDIPQRQSVQPSETCPPARRAKRMRAERQSLAVLPRLECSGAILAHCNLRLLDSSNSSASASQAMNIKIEPEETTEARTHNLRRRMGCPTPKCENEKEMKSSIKQEPIERKDYIVENEKEKPKSRSKKATNAVDLYVCLLCGSGNDEDRLLLCDGCDDSYHTFCLIPPLHDVPKGDWRCPKCLAQECSKPQEAFGFEQAARDYTLRTFGEMADAFKSDYFNMPVHMVPTELVEKEFWRLVSTIEEDVTVEYGADIASKEFGSGFPVRDGKIKLSPEEEEYLDSGWNLNNMPVMEQSVLAHITADICGMKLPWLYVGMCFSSFCWHIEDHWSYSINYLHWGEPKTWYGVPGYAAEQLENVMKKLAPELFVSQPDLLHQLVTIMNPNTLMTHEVPVYRTNQCAGEFVITFPRAYHSGFNQGFNFAEAVNFCTVDWLPLGRQCVEHYRLLHRYCVFSHDEMICKMASKADVLDVVVASTVQKDMAIMIEDEKALRETVRKLGVIDSERMDFELLPDDERQCVKCKTTCFMSAISCSCKPGLLVCLHHVKELCSCPPYKYKLRYRYTLDDLYPMMNALKLRAESYNEWALNVNEALEAKINKKKSLVSFKALIEESEMKKFPDNDLLRHLRLVTQDAEKCASVAQQLLNGKRQTRYRSGGGKSQNQLTVNELRQFVTQLYALPCVLSQTPLLKDLLNRVEDFQQHSQKLLSEETPSAAELQDLLDVSFEFDVELPQLAEMRIRLEQARWLEEVQQACLDPSSLTLDDMRRLIDLGVGLAPYSAVEKAMARLQELLTVSEHWDDKAKSLLKARPRHSLNSLATAVKEIEEIPAYLPNGAALKDSVQRARDWLQDVEGLQAGGRVPVLDTLIELVTRGRSIPVHLNSLPRLETLVAEVQAWKECAVNTFLTENSPYSLLEVLCPRCDIGLLGLKRKQRKLKEPLPNGKKKSTKLESLSDLERALTESKETASAMATLGEARLREMEALQSLRLANEGKLLSPLQDVDIKICLCQKAPAAPMIQCELCRDAFHTSCVAVPSISQGLRIWLCPHCRRSEKPPLEKILPLLASLQRIRVRLPEGDALRYMIERTVNWQHRAQQLLSSGNLKFVQDRVGSGLLYSRWQASAGQVSDTNKVSQPPGTTSFSLPDDWDNRTSYLHSPFSTGRSCIPLHGVSPEVNELLMEAQLLQVSLPEIQELYQTLLAKPSPAQQTDRSSPVRPSSEKNDCCRGKRDGINSLERKLKRRLEREGLSSERWERVKKMRTPKKKKIKLSHPKDMNNFKLERERSYELVRSAETHSLPSDTSYSEQEDSEDEDAICPAVSCLQPEGDEVDWVQCDGSCNQWFHQVCVGVSPEMAEKEDYICVRCTVKDAPSRK

SEQ ID NO: 8194 - protein, 967 aa, Homo sapiens
MPSPPGLRALWLCAALCASRRAGGAPQPGPGPTACPAPCHCQEDGIMLSADCSELGLSAVPGDLDPLTAYLDLSMNNLTELQPGLFHHLRFLEELRLSGNHLSHIPGQAFSGLYSLKILMLQNNQLGGIPAEALWELPSLQSLRLDANLISLVPERSFEGLSSLRHLWLDDNALTEIPVRALNNLPALQAMTLALNRISHIPDYAFQNLTSLVVLHLHNNRIQHLGTHSFEGLHNLETLDLNYNKLQEFPVAIRTLGRLQELGFHNNNIKAIPEKAFMGNPLLQTIHFYDNPIQFVGRSAFQYLPKLHTLSLNGAMDIQEFPDLKGTTSLEILTLTRAGIRLLPSGMCQQLPRLRVLELSHNQIEELPSLHRCQKLEEIGLQHNRIWEIGADTFSQLSSLQALDLSWNAIRSIHPEAFSTLHSLVKLDLTDNQLTTLPLAGLGGLMHLKLKGNLALSQAFSKDSFPKLRILEVPYAYQCCPYGMCASFFKASGQWEAEDLHLDDEESSKRPLGLLARQAENHYDQDLDELQLEMEDSKPHPSVQCSPTPGPFKPCEYLFESWGIRLAVWAIVLLSVLCNGLVLLTVFAGGPVPLPPVKFVVGAIAGANTLTGISCGLLASVDALTFGQFSEYGARWETGLGCRATGFLAVLGSEASVLLLTLAAVQCSVSVSCVRAYGKSPSLGSVRAGVLGCLALAGLAAALPLASVGEYGASPLCLPYAPPEGQPAALGFTVALVMMNSFCFLVVAGAYIKLYCDLPRGDFEAVWDCAMVRHVAWLIFADGLLYCPVAFLSFASMLGLFPVTPEAVKSVLLVVLPLPACLNPLLYLLFNPHFRDDLRRLRPRAGDSGPLAYAAAGELEKSSCDSTQALVAFSDVDLILEASEAGRPPGLETYGFPSVTLISCQQPGAPRLEGSHCVEPEGNHFGNPQPSMDGELLLRAEGSTPAGGGLSGGGGFQPSGLAFASHV

SEQ ID NO: 8195 - protein, 481 aa, Homo sapiens
MRWLWPLAVSLAVILAVGLSRVSGGAPLHLGRHRAETQEQQSRSKRGTEDEEAKGVQQYVPEEWAEYPRPIHPAGLQPTKPLVATSPNPGKDGGTPDSGQELRGNLTGAPGQRLQIQNPLYPVTESSYSAYAIMLLALVVFAVGIVGNLSVMCIVWHSYYLKSAWNSILASLALWDFLVLFFCLPIVIFNEITKQRLLGDVSCRAVPFMEVSSLGVTTFSLCALGIDRFHVATSTLPKVRPIERCQSILAKLAVIWVGSMTLAVPELLLWQLAQEPAPTMGTLDSCIMKPSASLPESLYSLVMTYQNARMWWYFGCYFCLPILFTVTCQLVTWRVRGPPGRKSECRASKHEQCESQLNSTVVGLTVVYAFCTLPENVCNIVVAYLSTELTRQTLDLLGLINQFSTFFKGAITPVLLLCICRPLGQAFLDCCCCCCCEECGGASEASAANGSDNKLKTEVSSSIYFHKPRESPPLLPLGTPC

SEQ ID NO: 8196 - protein, 171 aa, Homo sapiens
MEEYAREPCPWRIVDDCGGAFTMGTIGGGIFQAIKGFRNSPVGVNHRLRGSLTAIKTRAPQLGGSFAVWGGLFSMIDCSMVQVRGKEDPWNSITSGALTGAILAARNGPVAMVGSAAMGGILLALIEGAGILLTRFASAQFPNGPQFAEDPSQLPSTQLPSSPFGDYRQYQ

SEQ ID NO: 8197 - protein, 600 aa, Homo sapiens
MSRVAKYRRQVSEDPDIDSLLETLSPEEMEELEKELDVVDPDGSVPVGLRQRNQTEKQSTGVYNREAMLNFCEKETKKLMQREMSMDESKQVETKTDAKNGEERGRDASKKALGPRRDSDLGKEPKRGGLKKSFSRDRDEAGGKSGEKPKEEKIIRGIDKGRVRAAVDKKEAGKDGRGEERAVATKKEEEKKGSDRNTGLSRDKDKKREEMKEVAKKEDDEKVKGERRNTDTRKEGEKMKRAGGNTDMKKEDEKVKRGTGNTDTKKDDEKVKKNEPLHEKEAKDDSKTKTPEKQTPSGPTKPSEGPAKVEEEAAPSIFDEPLERVKNNDPEMTEVNVNNSDCITNEILVRFTEALEFNTVVKLFALANTRADDHVAFAIAIMLKANKTITSLNLDSNHITGKGILAIFRALLQNNTLTELRFHNQRHICGGKTEMEIAKLLKENTTLLKLGYHFELAGPRMTVTNLLSRNMDKQRQKRLQEQRQAQEAKGEKKDLLEVPKAGAVAKGSPKPSPQPSPKPSPKNSPKKGGAPAAPPPPPPPLAPPLIMENLKNSLSPATQRKMGDKVLPAQEKNSRDQLLAAIRSSNLKQLKKVEVPKLLQ

SEQ ID NO: 8198 - protein, 441 aa, Homo sapiens
MAVVPASLSGQDVGSFAYLTIKDRIPQILTKVIDTLHRHKSEFFEKHGEEGVEAEKKAISLLSKLRNELQTDKPFIPLVEKFVDTDIWNQYLEYQQSLLNESDGKSRWFYSPWLLVECYMYRRIHEAIIQSPPIDYFDVFKESKEQNFYGSQESIIALCTHLQQLIRTIEDLDENQLKDEFFKLLQISLWGNKCDLSLSGGESSSQNTNVLNSLEDLKPFILLNDMEHLWSLLSNCKKTREKASATRVYIVLDNSGFELVTDLILADFLLSSELATEVHFYGKTIPWFVSDTTIHDFNWLIEQVKHSNHKWMSKCGADWEEYIKMGKWVYHNHIFWTLPHEYCAMPQVAPDLYAELQKAHLILFKGDLNYRKLTGDRKWEFSVPFHQALNGFHPAPLCTIRTLKAEIQVGLQPGQGEQLLASEPSWWTTGKYGIFQYDGPL

SEQ ID NO: 8199 - protein, 1483 aa, Homo sapiens
MLHLPLPRSGRTVNFPRSWDESSSISSGLSDASDNLSSEEFNASSSLNSLPSTPTASRRNSTIVLRTDSEKRSLAESGLSWFSESEEKAPKKLEYDSGSLKMEPGTSKWRRERPESCDDSSKGGELKKPISLGHPGSLKKGKTPPVAVTSPITHTAQSALKVAGKPEGKATDKGKLAVKNTGLQRSSSDAGRDRLSDAKKPPSGIARPSTSGSFGYKKPPPATGTATVMQTGGSATLSKIQKSSGIPVKPVNGRKTSLDVSNSAEPGFLAPGARSNIQYRSLPRPAKSSSMSVTGGRGGPRPVSSSIDPSLLSTKQGGLTPSRLKEPTKVASGRTTPAPVNQTDREKEKAKAKAVALDSDNISLKSIGSPESTPKNQASHPTATKLAELPPTPLRATAKSFVKPPSLANLDKVNSNSLDLPSSSDTTHASKVPDLHATSSASGGPLPSCFTPSPAPILNINSASFSQGLELMSGFSVPKETRMYPKLSGLHRSMESLQMPMSLPSAFPSSTPVPTPPAPPAAPTEEETEELTWSGSPRAGQLDSNQRDRNTLPKKGLRYQLQSQEETKERRHSHTIGGLPESDDQSELPSPPALPMSLSAKGQLTNIVSPTAATTPRITRSNSIPTHEAAFELYSGSQMGSTLSLAERPKGMIRSGSFRDPTDDVHGSVLSLASSASSTYSSAEERMQSEQIRKLRRELESSQEKVATLTSQLSANANLVAAFEQSLVNMTSRLRHLAETAEEKDTELLDLRETIDFLKKKNSEAQAVIQGALNASETTPKELRIKRQNSSDSISSLNSITSHSSIGSSKDADAKKKKKKSWLRSSFNKAFSIKKGPKSASSYSDIEEIATPDSSAPSSPKLQHGSTETASPSIKSSTSSSVGTDVTEGPAHPAPHTRLFHANEEEEPEKKEVSELRSELWEKEMKLTDIRLEALNSAHQLDQLRETMHNMQLEVDLLKAENDRLKVAPGPSSGSTPGQVPGSSALSSPRRSLGLALTHSFGPSLADTDLSPMDGISTCGPKEEVTLRVVVRMPPQHIIKGDLKQQEFFLGCSKVSGKVDWKMLDEAVFQVFKDYISKMDPASTLGLSTESIHGYSISHVKRVLDAEPPEMPPCRRGVNNISVSLKGLKEKCVDSLVFETLIPKPMMQHYISLLLKHRRLVLSGPSGTGKTYLTNRLAEYLVERSGREVTEGIVSTFNMHQQSCKDLQLYLSNLANQIDRETGIGDVPLVILLDDLSEAGSISELVNGALTCKYHKCPYIIGTTNQPVKMTPNHGLHLSFRMLTFSNNVEPANGFLVRYLRRKLVESDSDINANKEELLRVLDWVPKLWYHLHTFLEKHSTSDFLIGPCFFLSCPIGIEDFRTWFIDLWNNSIIPYLQEGAKDGIKVHGQKAAWEDPVEWVRDTLPWPSAQQDQSKLYHLPPPTVGPHSIASPPEDRTVKDSTPSSLDSDPLMAMLLKLQEAANYIESPDRETILDPNLQATL

SEQ ID NO: 8200 - protein, 1877 aa, Homo sapiens
MLGSSVKSVQPEVELSSGGGDEGADEPRGAGRKAAAADGRGMLPKRAKAPGGGGGMAKASAAELKVFKSGSVDSRVPGGPPASNLRKQKSLTNLSFLTDSEKKLQLYEPEWSDDMAKAPKGLGKVGSKGREAPLMSKTLSKSEHSLFQAKGSPAGGAKTPLAPLAPNLGKPSRIPRGPYAEVKPLSKAPEAAVSEDGKSDDELLSSKAKAQKSSGPVPSAKGQEERAFLKVDPELVVTVLGDLEQLLFSQMLDPESQRKRTVQNVLDLRQNLEETMSSLRGSQVTHSSLEMTCYDSDDANPRSVSSLSNRSSPLSWRYGQSSPRLQAGDAPSVGGSCRSEGTPAWYMHGERAHYSHTMPMRSPSKLSHISRLELVESLDSDEVDLKSGYMSDSDLMGKTMTEDDDITTGWDESSSISSGLSDASDNLSSEEFNASSSLNSLPSTPTASRRNSTIVLRTDSEKRSLAESGLSWFSESEEKAPKKLEYDSGSLKMEPGTSKWRRERPESCDDSSKGGELKKPISLGHPGSLKKGKTPPVAVTSPITHTAQSALKVAGKPEGKATDKGKLAVKNTGLQRSSSDAGRDRLSDAKKPPSGIARPSTSGSFGYKKPPPATGTATVMQTGGSATLSKIQKSSGIPVKPVNGRKTSLDVSNSAEPGFLAPGARSNIQYRSLPRPAKSSSMSVTGGRGGPRPVSSSIDPSLLSTKQGGLTPSRLKEPTKVASGRTTPAPVNQTDREKEKAKAKAVALDSDNISLKSIGSPESTPKNQASHPTATKLAELPPTPLRATAKSFVKPPSLANLDKVNSNSLDLPSSSDTTHASKVPDLHATSSASGGPLPSCFTPSPAPILNINSASFSQGLELMSGFSVPKETRMYPKLSGLHRSMESLQMPMSLPSAFPSSTPVPTPPAPPAAPTEEETEELTWSGSPRAGQLDSNQRDRNTLPKKGLRYQLQSQEETKERRHSHTIGGLPESDDQSELPSPPALPMSLSAKGQLTNIVSPTAATTPRITRSNSIPTHEAAFELYSGSQMGSTLSLAERPKGMIRSGSFRDPTDDVHGSVLSLASSASSTYSSAEERMQSEQIRKLRRELESSQEKVATLTSQLSANANLVAAFEQSLVNMTSRLRHLAETAEEKDTELLDLRETIDFLKKKNSEAQAVIQGALNASETTPKELRIKRQNSSDSISSLNSITSHSSIGSSKDADAKKKKKKSWVYELRSSFNKAFSIKKGPKSASSYSDIEEIATPDSSAPSSPKLQHGSTETASPSIKSSTSSSVGTDVTEGPAHPAPHTRLFHANEEEEPEKKEVSELRSELWEKEMKLTDIRLEALNSAHQLDQLRETMHNMQLEVDLLKAENDRLKVAPGPSSGSTPGQVPGSSALSSPRRSLGLALTHSFGPSLADTDLSPMDGISTCGPKEEVTLRVVVRMPPQHIIKGDLKQQEFFLGCSKVSGKVDWKMLDEAVFQVFKDYISKMDPASTLGLSTESIHGYSISHVKRVLDAEPPEMPPCRRGVNNISVSLKGLKEKCVDSLVFETLIPKPMMQHYISLLLKHRRLVLSGPSGTGKTYLTNRLAEYLVERSGREVTEGIVSTFNMHQQSCKDLQLYLSNLANQIDRETGIGDVPLVILLDDLSEAGSISELVNGALTCKYHKCPYIIGTTNQPVKMTPNHGLHLSFRMLTFSNNVEPANGFLVRYLRRKLVESDSDINANKEELLRVLDWVPKLWYHLHTFLEKHSTSDFLIGPCFFLSCPIGIEDFRTWFIDLWNNSIIPYLQEGAKDGIKVHGQKAAWEDPVEWVRDTLPWPSAQQDQSKLYHLPPPTVGPHSIASPPEDRTVKDSTPSSLDSDPLMAMLLKLQEAANYIESPDRETILDPNLQATL

SEQ ID NO: 8201 - protein, 1830 aa, Homo sapiens
MDARIVHALLAGRMLGSSVKSVQPEVELSSGGGDEGADEPRGAGRKAAAADGRGMLPKRAKAPGGGGGMAKASAAELKVFKSGSVDSRVPGGPPASNLRKQKSLTNLSFLTDSEKKLQLYEPEWSDDMAKAPKGLGKVGSKGREAPLMSKTLSKSEHSLFQAKGSPAGGAKTPLAPLAPNLGKPSRIPRGPYAEVKPLSKAPEAAVSEDGKSDDELLSSKAKAQKSSGPVPSAKGQEERAFLKVDPELVVTVLGDLEQLLFSQMLDPESQRKRTVQNVLDLRQNLEETMSSLRGSQVTHSSLEMTCYDSDDANPRSVSSLSNRSSPLSWRYGQSSPRLQAGDAPSVGGSCRSEGTPAWYMHGERAHYSHTMPMRSPSKLSHISRLELVESLDSDEVDLKSGYMSDSDLMGKTMTEDDDITTGWDESSSISSGLSDASDNLSSEEFNASSSLNSLPSTPTASRRNSTIVLRTDSEKRSLAESGLSWFSESEEKAPKKLEYDSGSLKMEPGTSKWRRERPESCDDSSKGGELKKPISLGHPGSLKKGKTPPVAVTSPITHTAQSALKVAGKPEGKATDKGKLAVKNTGLQRSSSDAGRDRLSDAKKPPSGIARPSTSGSFGYKKPPPATGTATVMQTGGSATLSKIQKSSGIPVKPVNGRKTSLDVSNSAEPGFLAPGARSNIQYRSLPRPAKSSSMSVTGGRGGPRPVSSSIDPSLLSTKQGGLTPSRLKEPTKVASGRTTPAPVNQTDREKEKAKAKAVALDSDNISLKSIGSPESTPKNQASHPTATKLAELPPTPLRATAKSFVKPPSLANLDKVNSNSLDLPSSSDTTHASKVPDLHATSSASGGPLPSCFTPSPAPILNINSASFSQGLELMSGFSVPKETRMYPKLSGLHRSMESLQMPMSLPSAFPSSTPVPTPPAPPAAPTEEETEELTWSGSPRAGQLDSNQRDRNTLPKKGLRYQLQSQEETKERRHSHTIGGLPESDDQSELPSPPALPMSLSAKGQLTNIVHGSVLSLASSASSTYSSAEERMQSEQIRKLRRELESSQEKVATLTSQLSANANLVAAFEQSLVNMTSRLRHLAETAEEKDTELLDLRETIDFLKKKNSEAQAVIQGALNASETTPKELRIKRQNSSDSISSLNSITSHSSIGSSKDADAKKKKKKSWLRSSFNKAFSIKKGPKSASSYSDIEEIATPDSSAPSSPKLQHGSTETASPSIKSSTSSSVGTDVTEGPAHPAPHTRLFHANEEEEPEKKEVSELRSELWEKEMKLTDIRLEALNSAHQLDQLRETMHNMQLEVDLLKAENDRLKVAPGPSSGSTPGQVPGSSALSSPRRSLGLALTHSFGPSLADTDLSPMDGISTCGPKEEVTLRVVVRMPPQHIIKGDLKQQEFFLGCSKVSGKVDWKMLDEAVFQVFKDYISKMDPASTLGLSTESIHGYSISHVKRVLDAEPPEMPPCRRGVNNISVSLKGLKEKCVDSLVFETLIPKPMMQHYISLLLKHRRLVLSGPSGTGKTYLTNRLAEYLVERSGREVTEGIVSTFNMHQQSCKDLQLYLSNLANQIDRETGIGDVPLVILLDDLSEAGSISELVNGALTCKYHKCPYIIGTTNQPVKMTPNHGLHLSFRMLTFSNNVEPANGFLVRYLRRKLVESDSDINANKEELLRVLDWVPKLWYHLHTFLEKHSTSDFLIGPCFFLSCPIGIEDFRTWFIDLWNNSIIPYLQEGAKDGIKVHGQKAAWEDPVEWVRDTLPWPSAQQDQSKLYHLPPPTVGPHSIASPPEDRTVKDSTPSSLDSDPLMAMLLKLQEAANYIESPDRETILDPNLQATL

SEQ ID NO: 8202 - protein, 275 aa, Homo sapiens
MGTRLPLVLRQLRRPPQPPGPPRRLRVPCRASSGGGGGGGGGREGLLGQRRPQDGQARSSCSPGGRTPAARDSIVREVIQNSKEVLSLLQEKNPAFKPVLAIIQAGDDNLMQEINQNLAEEAGLNITHICLPPDSSEAEIIDEILKINEDTRVHGLALQISENLFSNKVLNALKPEKDVDGVTDINLGKLVRGDAHECFVSPVAKAVIELLEKSGVNLDGKKILVVGAHGSLEAALQCLFQRKGSMTMSIQWKTRQLQSKTESRSVTRLECRRVI

SEQ ID NO: 8203 - protein, 127 aa, Homo sapiens
MTAAATATVLKEGVLEKRSGGLLQLWKRKRCVLTERGLQLFEAKGTGGRPKELSFARIKAVECVESTGRHIYFTLVTEGGGEIDFRCPLEDPGWNAQITLGLVKFKNQQAIQTVRARQSLGTGTLVS

SEQ ID NO: 8204 - protein, 978 aa, Homo sapiens
MGTRLPLVLRQLRRPPQPPGPPRRLRVPCRASSGGGGGGGGGREGLLGQRRPQDGQARSSCSPGGRTPAARDSIVREVIQNSKEVLSLLQEKNPAFKPVLAIIQAGDDNLMQEINQNLAEEAGLNITHICLPPDSSEAEIIDEILKINEDTRVHGLALQISENLFSNKVLNALKPEKDVDGVTDINLGKLVRGDAHECFVSPVAKAVIELLEKSGVNLDGKKILVVGAHGSLEAALQCLFQRKGSMTMSIQWKTRQLQSKLHEADIVVLGSPKPEEIPLTWIQPGTTVLNCSHDFLSGKVGCGSPRIHFGGLIEEDDVILLAAALRIQNMVSSGRRWLREQQHRRWRLHCLKLQPLSPVPSDIEISRGQTPKAVDVLAKEIGLLADEIEIYGKSKAKVRLSVLERLKDQADGKYVLVAGITPTPLGEGKSTVTIGLVQALTAHLNVNSFACLRQPSQGPTFGVKGGAAGGGYAQVIPMEEFNLHLTGDIHAITAANNLLAAAIDTRILHENTQTDKALYNRLVPLVNGVREFSEIQLARLKKLGINKTDPSTLTEEEVSKFARLDIDPSTITWQRVLDTNDRFLRKITIGQGNTEKGHYRQAQFDIAVASEIMAVLALTDSLADMKARLGRMVVASDKSGQPVTADDLGVTGALTVLMKDAIKPNLMQTLEGTPVFVHAGPFANIAHGNSSVLADKIALKLVGEEGFVVTEAGFGADIGMEKFFNIKCRASGLVPNVVVLVATVRALKMHGGGPSVTAGVPLKKEYTEENIQLVADGCCNLQKQIQITQLFGVPVVVALNVFKTDTRAEIDLVCELAKRAGAFDAVPCYHWSVGGKGSVDLARAVREAASKRSRFQFLYDVQVPIVDKIRTIAQAVYGAKDIELSPEAQAKIDRYTQQGFGNLPICMAKTHLSLSHQPDKKGVPRDFILPISDVRASIGAGFIYPLVGTMSTMPGLPTRPCFYDIDLDTETEQVKGLF

SEQ ID NO: 8205 - protein, 183 aa, Homo sapiens
MKLLSLVAVVGCLLVPPAEANKSSEDIRCKCICPPYRNISGHIYNQNVSQKDCNCLHVVEPMPVPGHDVEAYCLLCECRYEERSTTTIKVIIVIYLSVVGALLLYMAFLMLVDPLIRKPDAYTEQLHNEEENEDARSMAAAAASLGGPRANTVLERVEGAQQRWKLQVQEQRKTVFDRHKMLS

SEQ ID NO: 8206 - protein, 186 aa, Homo sapiens
MKLLSLVAVVGCLLVPPAEANKVRESSEDIRCKCICPPYRNISGHIYNQNVSQKDCNCLHVVEPMPVPGHDVEAYCLLCECRYEERSTTTIKVIIVIYLSVVGALLLYMAFLMLVDPLIRKPDAYTEQLHNEEENEDARSMAAAAASLGGPRANTVLERVEGAQQRWKLQVQEQRKTVFDRHKMLS

SEQ ID NO: 8207 - protein, 246 aa, Homo sapiens
MAAAAATKILLCLPLLLLLSGWSRAGRADPHSLCYDITVIPKFRPGPRWCAVQGQVDEKTFLHYDCGNKTVTPVSPLGKKLNVTTAWKAQNPVLREVVDILTEQLRDIQLENYTPKEPLTLQARMSCEQKAEGHSSGSWQFSFDGQIFLLFDSEKRMWTTVHPGARKMKEKWENDKVVAMSFHYFSMGDCIGWLEDFLMGMDSTLEPSAGAPLAMSSGTTQLRATATTLILCCLLIILPCFILPGI

SEQ ID NO: 8208 - protein, 334 aa, Homo sapiens
MAAAASPAFLLRLPLLLLLSSWCRTGLADPHSLCYDITVIPKFRPGPRWCAVQGQVDEKTFLHYDCGSKTVTPVSPLGKKLNVTTAWKAQNPVLREVVDILTEQLLDIQLENYIPKEPLTLQARMSCEQKAEGHGSGSWQLSFDGQIFLLFDSENRMWTTVHPGARKMKEKWENDKDMTMSFHYISMGDCTGWLEDFLMGMDSTLEPSAGAPPTMSSGTAQPRATATTLILCCLLIMCLLICSRHSLTQSHGHHPQSLQPPPHPPLLHPTWLLRRVLWSDSYQIAKRPLSGGHVTRVTLPIIGDDSHSLPCPLALYTINNGAARYSEPLQVSIS

SEQ ID NO: 8209 - protein, 213 aa, Homo sapiens
MAAAASPAFLLRLPLLLLLSSWCRTGLADPHSLCYDITVIPKFRPGPRWCAVQGQVDEKTFLHYDCGSKTVTPVSPLGKKLNVTTAWKAQNPVLREVVDILTEQLLDIQLENYIPKEPLTLQARMSCEQKAEGHGSGSWQLSFDGQIFLLFDSENRMWTTVHPGARKMKEKWENDKDMTMSFHYISMGDCTGWLEDFLMGMDSTLEPSAGGTV

SEQ ID NO: 8210 - protein, 36 aa, Homo sapiens
MTMYLWLKLLAFGFAFLDTEVFVTGQSPTPSPTGKN

SEQ ID NO: 8211 - protein, 735 aa, Homo sapiens
MTMYLWLKLLAFGFAFLDTEVFVTGQSPTPSPTGVSSVQTPHLPTHADSQTPSAGTDTQTFSGSAANAKLNPTPGSNAISDVPGERSTASTFPTDPVSPLTTTLSLAHHSSAALPARTSNTTITANTSDAYLNASETTTLSPSGSAVISTTTIATTPSKPTCDEKYANITVDYLYNKETKLFTAKLNVNENVECGNNTCTNNEVHNLTECKNASVSISHNSCTAPDKTLILDVPPGVEKFQLHDCTQVEKADTTICLKWKNIETFTCDTQNITYRFQCGNMIFDNKEIKLENLEPEHEYKCDSEILYNNHKFTNASKIIKTDFGSPGEPQIIFCRSEAAHQGVITWNPPQRSFHNFTLCYIKETEKDCLNLDKNLIKYDLQNLKPYTKYVLSLHAYIIAKVQRNGSAAMCHFTTKSAPPSQVWNMTVSMTSDNSMHVKCRPPRDRNGPHERYHLEVEAGNTLVRNESHKNCDFRVKDLQYSTDYTFKAYFHNGDYPGEPFILHHSTSYNSKALIAFLAFLIIVTSIALLVVLYKIYDLHKKRSCNLDEQQELVERDDEKQLMNVEPIHADILLETYKRKIADEGRLFLAEFQSIPRVFSKFPIKEARKPFNQNKNRYVDILPYDYNRVELSEINGDAGSNYINASYIDGFKEPRKYIAAQGPRDETVDDFWRMIWEQKATVIVMVTRCEEGNRNKCAEYWPSMEEGTRAFGDVVVKINQHKRCPDYIIQKLNIVN

SEQ ID NO: 8212 - protein, 325 aa, Homo sapiens
MASVAQESAGSQRRLPPRHGALRGLLLLCLWLPSGRAALPPAAPLSELHAQLSGVEQLLEEFRRQLQQERPQEELELELRAGGGPQEDCPGPGSGGYSAMPDAIIRTKDSLAAGASFLRAPAAVRGWRQCVAACCSEPRCSVAVVELPRRPAPPAAVLGCYLFNCTARGRNVCKFALHSGYSSYSLSRAPDGAALATARASPRQEKDAPPLSKAGQDVVLHLPTDGVVLDGRESTDDHAIVQYEWALLQGDPSVDMKVPQSGTLKLSHLQEGTYTFQLTVTDTAGQRSSDNVSVTVLRAAYSTGDGWSICCICSKREAKEFSETS

SEQ ID NO: 8213 - protein, 227 aa, Homo sapiens
MAWKSGGASHSELIHNLRKNGIIKTDKVFEVMLATDRSHYAKCNPYMDSPQSIGFQATISAPHMHAYALELLFDQLHEGAKALDVGSGSGILTACFARMVGCTGKVIGIDHIKELVDDSVNNVRKDDPTLLSSGRVQLVVGDGRMGYAEEAPYDAIHVGAAAPVVPQALIDQLKPGGRLILPVGPAGGNQMLEQYDKLQDGSIKMKPLMGVIYVPLTDKEKQWSRWK

SEQ ID NO: 8214 - protein, 148 aa, Homo sapiens
MTMYLWLKLLAFGFAFLDTEVFVTGQSPTPSPTDAYLNASETTTLSPSGSAVISTTTIATTPSKPTCDEKYANITVDYLYNKETKLFTAKLNVNENVECGNNTCTNNEVHNLTECKNASVSISHNSCTAPDKTLILDVPPGVEKFQLH

SEQ ID NO: 8215 - protein, 228 aa, Homo sapiens
MAWKSGGASHSELIHNLRKNGIIKTDKVFEVMLATDRSHYAKCNPYMDSPQSIGFQATISAPHMHAYALELLFDQLHEGAKALDVGSGSGILTACFARMVGCTGKVIGIDHIKELVDDSVNNVRKDDPTLLSSGRVQLVVGDGRMGYAEEAPYDAIHVGAAAPVVPQALIDQLKPGGRLILPVGPAGGNQMLEQYDKLQDGSIKMKPLMGVIYVPLTDKEKQWSRDEL

SEQ ID NO: 8216 - protein, 302 aa, Homo sapiens
MDEQSQGMQGPPVPQFQPQKALRPDMGYNTLANFRIEKKIGRGQFSEVYRAACLLDGVPVALKKVQIFDLMDAKARADCIKEIDLLKQLNHPNVIKYYASFIEDNELNIVLELADAGDLSRMIKHFKKQKRLIPERTVWKYFVQLCSALEHMHSRRVMHRDIKPANVFITATGVVKLGDLGLGRFFSSKTTAAHSLVGTPYYMSPERIHENGYNFKSDIWSLGCLLYEMAALQSPFYGDKMNLYSLCKKIEQCDYPPLPSDHYSEELRQLVNMCINPDPEKRPDVTYVYDVAKRMHACTASS

SEQ ID NO: 8217 - protein, 145 aa, Homo sapiens
MAARQIWARTGAALCRQPSAAPPPAPLWVRAGFRQQLSLTLCPANEGNCGGSAPSTPGRPERAARPSVSEELTAAERQIAELHAAACAAGQLNYVDPATGYVVLTQIAHLQRGECCGSACRHCPYGQVNVKDPSKKKQFNSYFYV

SEQ ID NO: 8218 - protein, 1294 aa, Homo sapiens
MALKNINYLLIFYLSFSLLIYIKNSFCNKNNTRCLSNSCQNNSTCKDFSKDNDCSCSDTANNLDKDCDNMKDPCFSNPCQGSATCVNTPGERSFLCKCPPGYSGTICETTIGSCGKNSCQHGGICHQDPIYPVCICPAGYAGRFCEIDHDECASSPCQNGAVCQDGIDGYSCFCVPGYQGRHCDLEVDECASDPCKNEATCLNEIGRYTCICPHNYSGYTGAQCEIDLNECNSNPCQSNGECVELSSEKQYGRITGLPSSFSYHEASGYVCICQPGFTGIHCEEDVNECSSNPCQNGGTCENLPGNYTCHCPFDNLSRTFYGGRDCSDILLGCTHQQCLNNGTCIPHFQDGQHGFSCLCPSGYTGSLCEIATTLSFEGDGFLWVKSGSVTTKGSVCNIALRFQTVQPMALLLFRSNRDVFVKLELLSGYIHLSIQVNNQSKVLLFISHNTSDGEWHFVEVIFAEAVTLTLIDDSCKEKCIAKAPTPLESDQSICAFQNSFLGGLPVGMTSNGVALLNFYNMPSTPSFVGCLQDIKIDWNHITLENISSGSSLNVKAGCVRKDWCESQPCQSRGRCINLWLSYQCDCHRPYEGPNCLREYVAGRFGQDDSTGYVIFTLDESYGDTISLSMFVRTLQPSGLLLALENSTYQYIRVWLERGRLAMLTPNSPKLVVKFVLNDGNVHLISLKIKPYKIELYQSSQNLGFISASTWKIEKGDVIYIGGLPDKQETELNGGFFKGCIQDVRLNNQNLEFFPNPTNNASLNPVLVNVTQGCAGDNSCKSNPCHNGGVCHSRWDDFSCSCPALTSGKACEEVQWCGFSPCPHGAQCQPVLQGFECIANAVFNGQSGQILFRSNGNITRELTNITFGFRTRDANVIILHAEKEPEFLNISIQDSRLFFQLQSGNSFYMLSLTSLQSVNDGTWHEVTLSMTDPLSQTSRWQMEVDNETPFVTSTIATGSLNFLKDNTDIYVGDRAIDNIKGLQGCLSTIEIGGIYLSYFENVHGFINKPQEEQFLKISTNSVVTGCLQLNVCNSNPCLHGGNCEDIYSSYHCSCPLGWSGKHCELNIDECFSNPCIHGNCSDRVAAYHCTCEPGYTGVNCEVDIDNCQSHQCANGATCISHTNGYSCLCFGNFTGKFCRQSRLPSTVCGNEKTNLTCYNGGNCTEFQTELKCMCRPGFTGEWCEKDIDECASDPCVNGGLCQDLLNKFQCLCDVAFAGERCEVDLADDLISDIFTTIGSVTVALLLILLLAIVASVVTSNKRATQGTYSPSRQEKEGSRVEMWNLMPPPAMERLI

SEQ ID NO: 8219 - protein, 1406 aa, Homo sapiens
MALKNINYLLIFYLSFSLLIYIKNSFCNKNNTRCLSNSCQNNSTCKDFSKDNDCSCSDTANNLDKDCDNMKDPCFSNPCQGSATCVNTPGERSFLCKCPPGYSGTICETTIGSCGKNSCQHGGICHQDPIYPVCICPAGYAGRFCEIDHDECASSPCQNGAVCQDGIDGYSCFCVPGYQGRHCDLEVDECASDPCKNEATCLNEIGRYTCICPHNYSGVNCELEIDECWSQPCLNGATCQDALGAYFCDCAPGFLGDHCELNTDECASQPCLHGGLCVDGENRYSCNCTGSGFTGTHCETLMPLCWSKPCHNNATCEDSVDNYTCHCWPGYTGAQCEIDLNECNSNPCQSNGECVELSSEKQYGRITGLPSSFSYHEASGYVCICQPGFTGIHCEEDVNECSSNPCQNGGTCENLPGNYTCHCPFDNLSRTFYGGRDCSDILLGCTHQQCLNNGTCIPHFQDGQHGFSCLCPSGYTGSLCEIATTLSFEGDGFLWVKSGSVTTKGSVCNIALRFQTVQPMALLLFRSNRDVFVKLELLSGYIHLSIQVNNQSKVLLFISHNTSDGEWHFVEVIFAEAVTLTLIDDSCKEKCIAKAPTPLESDQSICAFQNSFLGGLPVGMTSNGVALLNFYNMPSTPSFVGCLQDIKIDWNHITLENISSGSSLNVKAGCVRKDWCESQPCQSRGRCINLWLSYQCDCHRPYEGPNCLREYVAGRFGQDDSTGYVIFTLDESYGDTISLSMFVRTLQPSGLLLALENSTYQYIRVWLERGRLAMLTPNSPKLVVKFVLNDGNVHLISLKIKPYKIELYQSSQNLGFISASTWKIEKGDVIYIGGLPDKQETELNGGFFKGCIQDVRLNNQNLEFFPNPTNNASLNPVLVNVTQGCAGDNSCKSNPCHNGGVCHSRWDDFSCSCPALTSGKACEEVQWCGFSPCPHGAQCQPVLQGFECIANAVFNGQSGQILFRSNGNITRELTNITFGFRTRDANVIILHAEKEPEFLNISIQDSRLFFQLQSGNSFYMLSLTSLQSVNDGTWHEVTLSMTDPLSQTSRWQMEVDNETPFVTSTIATGSLNFLKDNTDIYVGDRAIDNIKGLQGCLSTIEIGGIYLSYFENVHGFINKPQEEQFLKISTNSVVTGCLQLNVCNSNPCLHGGNCEDIYSSYHCSCPLGWSGKHCELNIDECFSNPCIHGNCSDRVAAYHCTCEPGYTGVNCEVDIDNCQSHQCANGATCISHTNGYSCLCFGNFTGKFCRQSRLPSTVCGNEKTNLTCYNGGNCTEFQTELKCMCRPGFTGEWCEKDIDECASDPCVNGGLCQDLLNKFQCLCDVAFAGERCEVDLADDLISDIFTTIGSVTVALLLILLLAIVASVVTSNKRATQGTYSPSRQEKEGSRVEMWNLMPPPAMERLI

SEQ ID NO: 8220 - protein, 284 aa, Homo sapiens
MEEIYAKFVSQKISKTRWRPLPPGSLQTAETFATGSWDNEENYISLWSIGDFGNLDSDGGFEGDHQLLCDIRHHGDVMDLQFFDQERIVAASSTGCVTVFLHHPNNQTLSVNQQWTTAHYHTGPGSPSYSSAPCTGVVCNNPEIVTVGEDGRINLFRADHKEAVRTIVWEVHFHPSNPEHLFTCSEDGSLWHWDASTDVPEKSSLFHQGGRSSTFLSHSISNQANVHQSVISSWLSTDPAKDRIEITSLLPSRSLSVNTLDVLGPCLVCGTDAEAIYVTRHLFS

SEQ ID NO: 8221 - protein, 3477 aa, Homo sapiens
MANRRVGRGCWEVSPTERRPPAGLRGPAAEEEASSPPVLSLSHFCRSPFLCFGDVLLGASRTLSLALDNPNEEVAEVKISHFPAADLGFSVSQRCFVLQPKEKIVISVNWTPLKEGRVREIMTFLVNDVLKHQAILLGNAEEQKKKKRSLWDTIKKKKISASTSHNRRVSNIQNVNKTFSVSQKVDRVRSPLQACENLAMNEGGPPTENNSLILEENKIPISPISPAFNECHGATCLPLSVRRSTTYSSLHASENRELLNVHSANVSKVSFNEKAVTETSFNSVNVNGQRGENSKLSLTPNCSSTLNITQSQIHFLSPDSFVNNSHGANNELELVTCLSSDMFMKDNSQPVHLESTIAHEIYQKILSPDSFIKDNYGLNQDLESESVNPILSPNQFLKDNMAYMCTSQQTCKVPLSNENSQVPQSPEDWRKSEVSPRIPECQGSKSPKAIFEELVEMKSNYYSFIKQNNPKFSAVQDISSHSHNKQPKRRPILSATVTKRKATCTRENQTEINKPKAKRCLNSAVGEHEKVINNQKEKEDFHSYLPIIDPILSKSKSYKNEVTPSSTTASVARKRKSDGSMEDANVRVAITEHTEVREIKRIHFSPSEPKTSAVKKTKNVTTPISKRISNREKLNLKKKTDLSIFRTPISKTNKRTKPIIAVAQSSLTFIKPLKTDIPRHPMPFAAKNMFYDERWKEKQEQGFTWWLNFILTPDDFTVKTNISEVNAATLLLGIENQHKISVPRAPTKEEMSLRAYTARCRLNRLRRAACRLFTSEKMVKAIKKLEIEIEARRLIVRKDRHLWKDVGERQKVLNWLLSYNPLWLRIGLETTYGELISLEDNSDVTGLAMFILNRLLWNPDIAAEYRHPTVPHLYRDGHEEALSKFTLKKLLLLVCFLDYAKISRLIDHDPCLFCKDAEFKASKEILLAFSRDFLSGEGDLSRHLGLLGLPVNHVQTPFDEFDFAVTNLAVDLQCGVRLVRTMELLTQNWDLSKKLRIPAISRLQKMHNVDIVLQVLKSRGIELSDEHGNTILSKDIVDRHREKTLRLLWKIAFAFQVDISLNLDQLKEEIAFLKHTKSIKKTISLLSCHSDDLINKKKGKRDSGSFEQYSENIKLLMDWVNAVCAFYNKKVENFTVSFSDGRVLCYLIHHYHPCYVPFDAICQRTTQTVECTQTGSVVLNSSSESDDSSLDMSLKAFDHENTSELYKELLENEKKNFHLVRSAVRDLGGIPAMINHSDMSNTIPDEKVVITYLSFLCARLLDLRKEIRAARLIQTTWRKYKLKTDLKRHQEREKAARIIQLAVINFLAKQRLRKRVNAALVIQKYWRRVLAQRKLLMLKKEKLEKVQNKAASLIQGYWRRYSTRQRFLKLKYYSIILQSRIRMIIAVTSYKRYLWATVTIQRHWRAYLRRKQDQQRYEMLKSSTLIIQSMFRKWKQRKMQSQVKATVILQRAFREWHLRKQAKEENSAIIIQSWYRMHKELRKYIYIRSCVVIIQKRFRCFQAQKLYKRRKESILTIQKYYKAYLKGKIERTNYLQKRAAAIQLQAAFRRLKAHNLCRQIRAACVIQSYWRMRQDRVRFLNLKKTIIKFQAHVRKHQQRQKYKKMKKAAVIIQTHFRAYIFAMKVLASYQKTRSAVIVLQSAYRGMQARKMYIHILTSVIKIQSYYRAYVSKKEFLSLKNATIKLQSTVKMKQTRKQYLHLRAAALFIQQCYRSKKIAAQKREEYMQMRESCIKLQAFVRGYLVRKQMRLQRKAVISLQSYFRMRKARQYYLKMYKAIIVIQNYYHAYKAQVNQRKNFLQVKKAATCLQAAYRGYKVRQLIKQQSIAALKIQSAFRGYNKRVKYQSVLQSIIKIQRWYRAYKTLHDTRTHFLKTKAAVISLQSAYRGWKVRKQIRREHQAALKIQSAFRMAKAQKQFRLFKTAALVIQQNFRAWTAGRKQCMEYIELRHAVLVLQSMWKGKTLRRQLQRQHKCAIIIQSYYRMHVQQKKWKIMKKAALLIQKYYRAYSIGREQNHLYLKTKAAVVTLQSAYRGMKVRKRIKDCNKAAVTIQSKYRAYKTKKKYATYRASAIIIQRWYRGIKITNHQHKEYLNLKKTAIKIQSVYRGIRVRRHIQHMHRAATFIKAMFKMHQSRISYHTMRKAAIVIQVRCRAYYQGKMQREKYLTILKAVKVLQASFRGVRVRRTLRKMQTAATLIQSNYRRYRQQTYFNKLKKITKTVQQRYWAMKERNIQFQRYNKLRHSVIYIQAIFRGKKARRHLKMMHIAATLIQRRFRTLMMRRRFLSLKKTAILIQRKYRAHLCTKHHLQFLQVQNAVIKIQSSYRRWMIRKRMREMHRAATFIQSTFRMHRLHMRYQALKQASVVIQQQYQANRAAKLQRQHYLRQRHSAVILQAAFRGMKTRRHLKSMHSSATLIQSRFRSLLVRRRFISLKKATIFVQRKYRATICAKHKLYQFLHLRKAAITIQSSYRRLMVKKKLQEMQRAAVLIQATFRMYRTYITFQTWKHASILIQQHYRTYRAAKLQRENYIRQWHSAVVIQAAYKGMKARQLLREKHKASIVIQSTYRMYRQYCFYQKLQWATKIIQEKYRANKKKQKVFQHNELKKETCVQAGFQDMNIKKQIQEQHQAAIIIQKHCKAFKIRKHYLHLRATVVSIQRRYRKLTAVRTQAVICIQSYYRGFKVRKDIQNMHRAATLIQSFYRMHRAKVDYETKKTAIVVIQNYYRLYVRVKTERKNFLAVQKSVRTIQAAFRGMKVRQKLKNVSEEKMAAIVNQSALCCYRSKTQYEAVQSEGVMIQEWYKASGLACSQEAEYHSQSRAAVTIQKAFCRMVTRKLETQKCAALRIQFFLQMAVYRRRFVQQKRAAITLQHYFRTWQTRKQFLLYRKAAVVLQNHYRAFLSAKHQRQVYLQIRSSVIIIQARSKGFIQKRKFQEIKNSTIKIQAMWRRYRAKKYLCKVKAACKIQAWYRCWRAHKEYLAILKAVKIIQGCFYTKLERTRFLNVRASAIIIQRKWRAILPAKIAHEHFLMIKRHRAACLIQAHYRGYKGRQVFLRQKSAALIIQKYIRAREAGKHERIKYIEFKKSTVILQALVRGWLVRKRFLEQRAKIRLLHFTAAAYYHLNAVRIQRAYKLYLAVKNANKQVNSVICIQRWFRARLQEKRFIQKYHSIKKIEHEGQECLSQRNRAASVIQKAVRHFLLRKKQEKFTSGIIKIQALWRGYSWRKKNDCTKIKAIRLSLQVVNREIREENKLYKRTALALHYLLTYKHLSAILEALKHLEVVTRLSPLCCENMAQSGAISKIFVLIRSCNRSIPCMEVIRYAVQVLLNVSKYEKTTSAVYDVENCIDILLELLQIYREKPGNKVADKGGSIFTKTCCLLAILLKTTNRASDVRSRSKVVDRIYSLYKLTAHKHKMNTERILYKQKKNSSISIPFIPETPVRTRIVSRLKPDWVLRRDNMEEITNPLQAIQMVMDTLGIPY

SEQ ID NO: 8222 - protein, 661 aa, Homo sapiens
MRLKNLTFIIILIISGELYAEEKPCGFPHVENGRIAQYYYTFKSFYFPMSIDKKLSFFCLAGYTTESGRQEEQTTCTTEGWSPEPRCFKKCTKPDLSNGYISDVKLLYKIQENMRYGCASGYKTTGGKDEEVVQCLSDGWSSQPTCRKEHETCLAPELYNGNYSTTQKTFKVKDKVQYECATGYYTAGGKKTEEVECLTYGWSLTPKCTKLKCSSLRLIENGYFHPVKQTYEEGDVVQFFCHENYYLSGSDLIQCYNFGWYPESPVCEGRRNRCPPPPLPINSKIQTHSTTYRHGEIVHIECELNFEIHGSAEIRCEDGKWTEPPKCIEGQEKVACEEPPFIENGAANLHSKIYYNGDKVTYACKSGYLLHGSNEITCNRGKWTLPPECVENNENCKHPPVVMNGAVADGILASYATGSSVEYRCNEYYLLRGSKISRCEQGKWSSPPVCLEPCTVNVDYMNRNNIEMKWKYEGKVLHGDLIDFVCKQGYDLSPLTPLSELSVQCNRGEVKYPLCTRKESKGMCTSPPLIKHGVIISSTVDTYENGSSVEYRCFDHHFLEGSREAYCLDGMWTTPPLCLEPCTLSFTEMEKNNLLLKWDFDNRPHILHGEYIEFICRGDTYPAELYITGSILRMQCDRGQLKYPRCIPRQSTLSYQEPLRT

SEQ ID NO: 8223 - protein, 270 aa, Homo sapiens
MWLLVSVILISRISSVGGEAMFCDFPKINHGILYDEEKYKPFSQVPTGEVFYYSCEYNFVSPSKSFWTRITCAEEGWSPTPKCLRLCFFPFVENGHSESSGQTHLEGDTVQIICNTGYRLQNNENNISCVERGWSTPPKCRSTISAEKCGPPPPIDNGDITSFLLSVYAPGSSVEYQCQNLYQLEGNNQITCRNGQWSEPPKCLDPCVISQEIMEKYNIKLKWTNQQKLYSRTGDIVEFVCKSGYHPTKSHSFRAMCQNGKLVYPSCEEK

SEQ ID NO: 8224 - protein, 577 aa, Homo sapiens
MLLLINVILTLWVSCANGQVKPCDFPEIQHGGLYYKSLRRLYFPAAAGQSYSYYCDQNFVTPSGSYWDYIHCTQDGWSPTVPCLRTCSKSDVEIENGFISESSSIYILNEETQYNCKPGYATAEGNSSGSITCLQNGWSTQPICIKFCDMPVFENSRAKSNGMWFKLHDTLDYECYDGYESSYGNTTDSIVCGEDGWSHLPTCYNSSENCGPPPPISNGDTTSFPQKVYLPWSRVEYQCQSYYELQGSKYVTCSNGDWSEPPRCISMKPCEFPEIQHGHLYYENTRRPYFPVATGQSYSYYCDQNFVTPSGSYWDYIHCTQDGWLPTVPCLRTCSKSDIEIENGFISESSSIYILNKEIQYKCKPGYATADGNSSGSITCLQNGWSAQPICIKFCDMPVFENSRAKSNGMRFKLHDTLDYECYDGYEISYGNTTGSIVCGEDGWSHFPTCYNSSEKCGPPPPISNGDTTSFLLKVYVPQSRVEYQCQSYYELQGSNYVTCSNGEWSEPPRCIHPCIITEENMNKNNIQLKGKSDIKYYAKTGDTIEFMCKLGYNANTSVLSFQAVCREGIVEYPRCE

SEQ ID NO: 8225 - protein, 331 aa, Homo sapiens
MLLLINVILTLWVSCANGQEVKPCDFPEIQHGGLYYKSLRRLYFPAAAGQSYSYYCDQNFVTPSGSYWDYIHCTQDGWLPTVPCLRTCSKSDIEIENGFISESSSIYILNKEIQYKCKPGYATADGNSSGSITCLQNGWSAQPICIKFCDMPVFENSRAKSNGMRFKLHDTLDYECYDGYEISYGNTTGSIVCGEDGWSHFPTCYNSSEKCGPPPPISNGDTTSFLLKVYVPQSRVEYQCQSYYELQGSNYVTCSNGEWSEPPRCIHPCIITEENMNKNNIQLKGKSDIKYYAKTGDTIEFMCKLGYNANTSVLSFQAVCREGIVEYPRCE

SEQ ID NO: 8226 - protein, 330 aa, Homo sapiens
MEGAPPGSLALRLLLFVALPASGWLTTGAPEPPPLSGAPQDGIRINVTTLKDDGDISKQQVVLNITYESGQVYVNDLPVNSGVTRISCQTLIVKNENLENLEEKEYFGIVSVRILVHEWPMTSGSSLQLIVIQEEVVEIDGKQVQQKDVTEIDILVKNRGVLRHSNYTLPLEESMLYSISRDSDILFTLPNLSKKESVSSLQTTSQYLIRNVETTVDEDVLPGKLPETPLRAEPPSSYKVMCQWMEKFRKDLCRFWSNVFPVFFQFLNIMVVGITGAAVVITILKVFFPVSEYKGILQLDKVDVIPVTAINLYPDGPEKRAENLEDKTCI

SEQ ID NO: 8227 - protein, 271 aa, Homo sapiens
MWLLVSVILISRISSVGGEATFCDFPKINHGILYDEEKYKPFSQVPTGEVFYYSCEYNFVSPSKSFWTRITCTEEGWSPTPKCLRLCFFPFVENGHSESSGQTHLEGDTVQIICNTGYRLQNNENNISCVERGWSTPPKCRSTDSTGKCGPPPPIDNGDITSFPLSVYAPASSVEYQCQNLYQLEGNKRITCRNGQWSEPPKCLHPCVISREIMENYNIALRWTAKQKLYLRTGESAEFVCKRGYRLSSRSHTLRTTCWDGKLEYPTCAKR

SEQ ID NO: 8228 - protein, 330 aa, Homo sapiens
MLLLINVILTLWVSCANGQVKPCDFPDIKHGGLFHENMRRPYFPVAVGKYYSYYCDEHFETPSGSYWDYIHCTQNGWSPAVPCLRKCYFPYLENGYNQNYGRKFVQGNSTEVACHPGYGLPKAQTTVTCTEKGWSPTPRCIRVRTCSKSDIEIENGFISESSSIYILNKEIQYKCKPGYATADGNSSGSITCLQNGWSAQPICINSSEKCGPPPPISNGDTTSFLLKVYVPQSRVEYQCQPYYELQGSNYVTCSNGEWSEPPRCIHPCIITEENMNKNNIKLKGRSDRKYYAKTGDTIEFMCKLGYNANTSILSFQAVCREGIVEYPRCE

SEQ ID NO: 8229 - protein, 232 aa, Homo sapiens
MLLLINVILTLWVSCANGQVKPCDFPDIKHGGLFHENMRRPYFPVAVGKYYSYYCDEHFETPSGSYWDYIHCTQNGWSPAVPCLRKCYFPYLENGYNQNYGRKFVQGNSTEVACHPGYGLPKAQTTVTCTEKGWSPTPRCIRVRTCSKSDIEIENGFISESSSIYILNKEIQYKCKPGYATADGNSSGSITCLQNGWSAQPICITACIAFRAHAQKSCTCRGRNECLILNFC

SEQ ID NO: 8230 - protein, 1231 aa, Homo sapiens
MRLLAKIICLMLWAICVAEDCNELPPRRNTEILTGSWSDQTYPEGTQAIYKCRPGYRSLGNVIMVCRKGEWVALNPLRKCQKRPCGHPGDTPFGTFTLTGGNVFEYGVKAVYTCNEGYQLLGEINYRECDTDGWTNDIPICEVVKCLPVTAPENGKIVSSAMEPDREYHFGQAVRFVCNSGYKIEGDEEMHCSDDGFWSKEKPKCVEISCKSPDVINGSPISQKIIYKENERFQYKCNMGYEYSERGDAVCTESGWRPLPSCEEKSCDNPYIPNGDYSPLRIKHRTGDEITYQCRNGFYPATRGNTAKCTSTGWIPAPRCTLKPCDYPDIKHGGLYHENMRRPYFPVAVGKYYSYYCDEHFETPSGSYWDHIHCTQDGWSPAVPCLRKCYFPYLENGYNQNHGRKFVQGKSIDVACHPGYALPKAQTTVTCMENGWSPTPRCIRVKTCSKSSIDIENGFISESQYTYALKEKAKYQCKLGYVTADGETSGSITCGKDGWSAQPTCIKSCDIPVFMNARTKNDFTWFKLNDTLDYECHDGYESNTGSTTGSIVCGYNGWSDLPICYERECELPKIDVHLVPDRKKDQYKVGEVLKFSCKPGFTIVGPNSVQCYHFGLSPDLPICKEQVQSCGPPPELLNGNVKEKTKEEYGHSEVVEYYCNPRFLMKGPNKIQCVDGEWTTLPVCIVEESTCGDIPELEHGWAQLSSPPYYYGDSVEFNCSESFTMIGHRSITCIHGVWTQLPQCVAIDKLKKCKSSNLIILEEHLKNKKEFDHNSNIRYRCRGKEGWIHTVCINGRWDPEVNCSMAQIQLCPPPPQIPNSHNMTTTLNYRDGEKVSVLCQENYLIQEGEEITCKDGRWQSIPLCVEKIPCSQPPQIEHGTINSSRSSQESYAHGTKLSYTCEGGFRISEENETTCYMGKWSSPPQCEGLPCKSPPEISHGVVAHMSDSYQYGEEVTYKCFEGFGIDGPAIAKCLGEKWSHPPSCIKTDCLSLPSFENAIPMGEKKDVYKAGEQVTYTCATYYKMDGASNVTCINSRWTGRPTCRDTSCVNPPTVQNAYIVSRQMSKYPSGERVRYQCRSPYEMFGDEEVMCLNGNWTEPPQCKDSTGKCGPPPPIDNGDITSFPLSVYAPASSVEYQCQNLYQLEGNKRITCRNGQWSEPPKCLHPCVISREIMENYNIALRWTAKQKLYSRTGESVEFVCKRGYRLSSRSHTLRTTCWDGKLEYPTCAKR

SEQ ID NO: 8231 - protein, 531 aa, Homo sapiens
MADVLSVLRQYNIQKKEIVVKGDEVIFGEFSWPKNVKTNYVVWGTGKEGQPREYYTLDSILFLLNNVHLSHPVYVRRAATENIPVVRRPDRKDLLGYLNGEASTSASIDRSAPLEIGLQRSTQVKRAADEVLAEAKKPRIEDEECVRLDKERLAARLEGHKEGIVQTEQIRSLSEAMSVEKIAAIKAKIMAKKRSTIKTDLDDDITALKQRSFVDAEVDVTRDIVSRERVWRTRTTILQSTGKNFSKNIFAILQSVKAREEGRAPEQRPAPNAAPVDPTLRTKQPIPAAYNRYDQERFKGKEETEGFKIDTMGTYHGMTLKSVTEGASARKTQTPAAQPVPRPVSQARPPPNQKKGSRTPIIIIPAATTSLITMLNAKDLLQDLKFVPSDEKKKQGCQRENETLIQRRKDQMQPGGTAISVTVPYRVVDQPLKLMPQDWDRVVAVFVQGPAWQFKGWPWLLPDGSPVDIFAKIKAFHLKYDEVRLDPNVQKWDVTVLELSYHKRHLDRPVFLRFWETLDRYMVKHKSHLRF

SEQ ID NO: 8232 - protein, 164 aa, Homo sapiens
MIWRRAALAGTRLVWSRSGSAGWLDRAAGAAGAAAAAASGMESNTSSSLENLATAPVNQIQETISDNCVVIFSKTSCSYCTMAKKLFHDMNVNYKVVELDLLEYGNQFQDALYKMTGERTVPRIFVNGTFIGGATDTHRLHKEGKLLPLVHQCYLKKSKRKEFQ

SEQ ID NO: 8233 - protein, 538 aa, Homo sapiens
MEESVNQMQPLNEKQIANSQDGYVWQVTDMNRLHRFLCFGSEGGTYYIKEQKLGLENAEALIRLIEDGRGCEVIQEIKSFSQEGRTTKQEPMLFALAICSQCSDISTKQAAFKAVSEVCRIPTHLFTFIQFKKDLKESMKCGMWGRALRKAIADWYNEKGGMALALAVTKYKQRNGWSHKDLLRLSHLKPSSEGLAIVTKYITKGWKEVHELYKEKALSVETEKLLKYLEAVEKVKRTRDELEVIHLIEEHRLVREHLLTNHLKSKEVWKALLQEMPLTALLRNLGKMTANSVLEPGNSEVSLVCEKLCNEKLLKKARIHPFHILIALETYKTGHGLRGKLKWRPDEEILKALDAAFYKTFKTVEPTGKRFLLAVDVSASMNQRVLGSILNASTVAAAMCMVVTRTEKDSYVVAFSDEMVPCPVTTDMTLQQVLMAMSQIPAGGTDCSLPMIWAQKTNTPADVFIVFTDNETFAGGVHPAIALREYRKKMDIPAKLIVCGMTSNGFTIADPDDRGMLDMCGFDTGALDVIRNFTLDMI

SEQ ID NO: 8234 - protein, 326 aa, Homo sapiens
MTGNAGEWCLMESDPGVFTELIKGFGCRGAQVEEIWSLEPENFEKLKPVHGLIFLFKWQPGEEPAGSVVQDSRLDTIFFAKQVINNACATQAIVSVLLNCTHQDVHLGETLSEFKEFSQSFDAAMKGLALSNSDVIRQVHNSFARQQMFEFDTKTSAKEEDAFHFVSYVPVNGRLYELDGLREGPIDLGACNQDDWISAVRPVIEKRIQKYSEGEIRFNLMAIVSDRKMIYEQKIAELQRQLAEEPMDTDQGNSMLSAIQSEVAKNQMLIEEEVQKLKRYKIENIRRKHNYLPFIMELLKTLAEHQQLIPLVEKFEKHFEKTLLGK

SEQ ID NO: 8235 - protein, 355 aa, Homo sapiens
MTGNAGEWCLMESDPGVFTELIKGFGCRGAQVEEIWSLEPENFEKLKPVHGLIFLFKWQPGEEPAGSVVQDSRLDTIFFAKQVINNACATQAIVSVLLNCTHQDVHLGETLSEFKEFSQSFDAAMKGLALSNSDVIRQVHNSFARQQMFEFDTKTSAKEEDAFHFVSYVPVNGRLYELDGLREGPIDLGACNQDDWISAVRPVIEKRIQKDGFSPCCPGWSQTPELKPSACLDLPKWYSEGEIRFNLMAIVSDRKMIYEQKIAELQRQLAEEPMDTDQGNSMLSAIQSEVAKNQMLIEEEVQKLKRYKIENIRRKHNYLPFIMELLKTLAEHQQLIPLVEKAKEKQNAKKAQETK

SEQ ID NO: 8236 - protein, 328 aa, Homo sapiens
MTGNAGEWCLMESDPGVFTELIKGFGCRGAQVEEIWSLEPENFEKLKPVHGLIFLFKWQPGEEPAGSVVQDSRLDTIFFAKQVINNACATQAIVSVLLNCTHQDVHLGETLSEFKEFSQSFDAAMKGLALSNSDVIRQVHNSFARQQMFEFDTKTSAKEEDAFHFVSYVPVNGRLYELDGLREGPIDLGACNQDDWISAVRPVIEKRIQKYSEGEIRFNLMAIVSDRKMIYEQKIAELQRQLAEEPMDTDQGNSMLSAIQSEVAKNQMLIEEEVQKLKRYKIENIRRKHNYLPFIMELLKTLAEHQQLIPLVEKAKEKQNAKKAQETK

SEQ ID NO: 8237 - protein, 749 aa, Homo sapiens
MSFIDPYQHIIVEHQYSHKFTVVVLRATKVTKGAFGDMLDTPDPYVELFISTTPDSRKRTRHFNNDINPVWNETFEFILDPNQENVLEITLMDANYVMDETLGTATFTVSSMKVGEKKEVPFIFNQVTEMVLEMSLEVCSCPDLRFSMALCDQEKTFRQQRKEHIRESMKKLLGPKNSEGLHSARDVPVVAILGSGGGFRAMVGFSGVMKALYESGILDCATYVAGLSGSTWYMSTLYSHPDFPEKGPEEINEELMKNVSHNPLLLLTPQKVKRYVESLWKKKSSGQPVTFTDIFGMLIGETLIHNRMNTTLSSLKEKVNTAQCPLPLFTCLHVKPDVSELMFADWVEFSPYEIGMAKYGTFMAPDLFGSKFFMGTVVKKYEENPLHFLMGVWGSAFSILFNRVLGVSGSQSRGSTMEEELENITTKHIVSNDSSDSDDESHEPKGTENEDAGSDYQSDNQASWIHRMIMALVSDSALFNTREGRAGKVHNFMLGLNLNTSYPLSPLSDFATQDSFDDDELDAAVADPDEFERIYEPLDVKSKKIHVVDSGLTFNLPYPLILRPQRGVDLIISFDFSARPSDSSPPFKELLLAEKWAKMNKLPFPKIDPYVFDREGLKECYVFKPKNPDMEKDCPTIIHFVLANINFRKYRAPGVPRETEEEKEIADFDIFDDPESPFSTFNFQYPNQAFKRLHDLMHFNTLNNIDVIKEAMVESIEYRRQNPSRCSVSLSNVEARRFFNKEFLSKPKA

SEQ ID NO: 8238 - protein, 604 aa, Homo sapiens
MLARALLLCAVLALSHTANPCCSHPCQNRGVCMSVGFDQYKCDCTRTGFYGENCSTPEFLTRIKLFLKPTPNTVHYILTHFKGFWNVVNNIPFLRNAIMSYVLTSRSHLIDSPPTYNADYGYKSWEAFSNLSYYTRALPPVPDDCPTPLGVKGKKQLPDSNEIVEKLLLRRKFIPDPQGSNMMFAFFAQHFTHQFFKTDHKRGPAFTNGLGHGVDLNHIYGETLARQRKLRLFKDGKMKYQIIDGEMYPPTVKDTQAEMIYPPQVPEHLRFAVGQEVFGLVPGLMMYATIWLREHNRVCDVLKQEHPEWGDEQLFQTSRLILIGETIKIVIEDYVQHLSGYHFKLKFDPELLFNKQFQYQNRIAAEFNTLYHWHPLLPDTFQIHDQKYNYQQFIYNNSILLEHGITQFVESFTRQIAGRVAGGRNVPPAVQKVSQASIDQSRQMKYQSFNEYRKRFMLKPYESFEELTGEKEMSAELEALYGDIDAVELYPALLVEKPRPDAIFGETMVEVGAPFSLKGLMGNVICSPAYWKPSTFGGEVGFQIINTASIQSLICNNVKGCPFTSFSVPDPELIKTVTINASSSRSGLDDINPTVLLKERSTEL

SEQ ID NO: 8239 - protein, 2363 aa, Homo sapiens
MAAVLQQVLERTELNKLPKSVQNKLEKFLADQQSEIDGLKGRHEKFKVESEQQYFEIEKRLSHSQERLVNETRECQSLRLELEKLNNQLKALTEKNKELEIAQDRNIAIQSQFTRTKEELEAEKRDLIRTNERLSQELEYLTEDVKRLNEKLKESNTTKGELQLKLDELQASDVSVKYREKRLEQEKELLHSQNTWLNTELKTKTDELLALGREKGNEILELKCNLENKKEEVSRLEEQMNGLKTSNEHLQKHVEDLLTKLKEAKEQQASMEEKFHNELNAHIKLSNLYKSAADDSEAKSNELTRAVEELHKLLKEAGEANKAIQDHLLEVEQSKDQMEKEMLEKIGRLEKELENANDLLSATKRKGAILSEEELAAMSPTAAAVAKIVKPGMKLTELYNAYVETQDQLLLEKLENKRINKYLDEIVKEVEAKAPILKRQREEYERAQKAVASLSVKLEQAMKEIQRLQEDTDKANKQSSVLERDNRRMEIQVKDLSQQIRVLLMELEEARGNHVIRDEEVSSADISSSSEVISQHLVSYRNIEELQQQNQRLLVALRELGETREREEQETTSSKITELQLKLESALTELEQLRKSRQHQMQLVDSIVRQRDMYRILLSQTTGVAIPLHASSLDDVSLASTPKRPSTSQTVSTPAPVPVIESTEAIEAKAALKQLQEIFENYKKEKAENEKIQNEQLEKLQEQVTDLRSQNTKISTQLDFASKRYEMLQDNVEGYRREITSLHERNQKLTATTQKQEQIINTMTQDLRGANEKLAVAEVRAENLKKEKEMLKLSEVRLSQQRESLLAEQRGQNLLLTNLQTIQGILERSETETKQRLSSQIEKLEHEISHLKKKLENEVEQRHTLTRNLDVQLLDTKRQLDTETNLHLNTKELLKNAQKEIATLKQHLSNMEVQVASQSSQRTGKGQPSNKEDVDDLVSQLRQTEEQVNDLKERLKTSTSNVEQYQAMVTSLEESLNKEKQVTEEVRKNIEVRLKESAEFQTQLEKKLMEVEKEKQELQDDKRRAIESMEQQLSELKKTLSSVQNEVQEALQRASTALSNEQQARRDCQEQAKIAVEAQNKYERELMLHAADVEALQAAKEQVSKMASVRQHLEETTQKAESQLLECKASWEERERMLKDEVSKCVCRCEDLEKQNRLLHDQIEKLSDKVVASVKEGVQGPLNVSLSEEGKSQEQILEILRFIRREKEIAETRFEVAQVESLRYRQRVELLERELQELQDSLNAEREKVQVTAKTMAQHEELMKKTETMNVVMETNKMLREEKERLEQDLQQMQAKVRKLELDILPLQEANAELSEKSGMLQAEKKLLEEDVKRWKARNQHLVSQQKDPDTEEYRKLLSEKEVHTKRIQQLTEEIGRLKAEIARSNASLTNNQNLIQSLKEDLNKVRTEKETIQKDLDAKIIDIQEKVKTITQVKKIGRRYKTQYEELKAQQDKVMETSAQSSGDHQEQHVSVQEMQELKETLNQAETKSKSLESQVENLQKTLSEKETEARNLQEQTVQLQSELSRLRQDLQDRTTQEEQLRQQITEKEEKTRKAIVAAKSKIAHLAGVKDQLTKENEELKQRNGALDQQKDELDVRITALKSQYEGRISRLERELREHQERHLEQRDEPQEPSNKVPEQQRQITLKTTPASGERGIASTSDPPTANIKPTPVVSTPSKVTAAAMAGNKSTPRASIRPMVTPATVTNPTTTPTATVMPTTQVESQEAMQSEGPVEHVPVFGSTSGSVRSTSPNVQPSISQPILTVQQQTQATAFVQPTQQSHPQIEPANQELSSNIVEVVQSSPVERPSTSTAVFGTVSATPSSSLPKRTREEEEDSTIEASDQVSDDTVEMPLPKKLKSVTPVGTEEEVMAEESTDGEVETQVYNQDSQDSIGEGVTQGDYTPMEDSEETSQSLQIDLGPLQSDQQTTTSSQDGQGKGDDVIVIDSDDEEEDDDENDGEHEDYEEDEEDDDDDEDDTGMGDEGEDSNEGTGSADGNDGYEADDAEGGDGTDPGTETEESMGGGEGNHRAADSQNSGEGNTGAAESSFSQEVSREQQPSSASERQAPRAPQSPRRPPHPLPPRLTIHAPPQELGPPVQRIQMTRRQSVGRGLQLTPGIGGMQQHFFDDEDRTVPSTPTLVVPHRTDGFAEAIHSPQVAGVPRFRFGPPEDMPQTSSSHSDLGQLASQGGLGMYETPLFLAHEEESGGRSVPTTPLQVAAPVTVFTESTTSDASEHASQSVPMVTTSTGTLSTTNETATGDDGDEVFVEAESEGISSEAGLEIDSQQEEEPVQASDESDLPSTSQDPPSSSSVDTSSSQPKPFRRVRLQTTLRQGVRGRQFNRQRGVSHAMGGRGGINRGNIN

SEQ ID NO: 8240 - protein, 1115 aa, Homo sapiens
MRKFNIRKVLDGLTAGSSSASQQQQQQHPPGNREPEIQETLQSEHFQLCKTVRHGFPYQPSALAFDPVQKILAVGTQTGALRLFGRPGVECYCQHDSGAAVIQLQFLINEGALVSALADDTLHLWNLRQKRPAILHSLKFCRERVTFCHLPFQSKWLYVGTERGNIHIVNVESFTLSGYVIMWNKAIELSSKSHPGPVVHISDNPMDEGKLLIGFESGTVVLWDLKSKKADYRYTYDEAIHSVAWHHEGKQFICSHSDGTLTIWNVRSPAKPVQTITPHGKQLKDGKKPEPCKPILKVEFKTTRSGEPFIILSGGLSYDTVGRRPCLTVMHGKSTAVLEMDYSIVDFLTLCETPYPNDFQEPYAVVVLLEKDLVLIDLAQNGYPIFENPYPLSIHESPVTCCEYFADCPVDLIPALYSVGARQKRQGYSKKEWPINGGNWGLGAQSYPEIIITGHADGSVKFWDASAITLQVLYKLKTSKVFEKSRNKDDRPNTDIVDEDPYAIQIISWCPESRMLCIAGVSAHVIIYRFSKQEVITEVIPMLEVRLLYEINDVETPEGEQPPPLPTPVGGSNPQPIPPQSHPSTSSSSSDGLRDNVPCLKVKNSPLKQSPGYQTELVIQLVWVGGEPPQQITSLAVNSSYGLVVFGNCNGIAMVDYLQKAVLLNLGTIELYGSNDPYRREPRSPRKSRQPSGAGLCDISEGTVVPEDRCKSPTSAKMSRKLSLPTDLKPDLDVKDNSFSRSRSSSVTSIDKESREAISALHFCETFTRKTDSSPSPCLWVGTTLGTVLVIALNLPPGGEQRLLQPVIVSPSGTILRLKGAILRMAFLDTTGCLIPPAYEPWREHNVPEEKDEKEKLKKRRPVSVSPSSSQEISENQYAVICSEKQAKVISLPTQNCAYKQNITETSFVLRGDIVALSNSICLACFCANGHIMTFSLPSLRPLLDVYYLPLTNMRIARTFCFTNNGQALYLVSPTEIQRLTYSQETCENLQEMLGELFTPVETPEAPNRGFFKGLFGGGAQSLDREELFGESSSGKASRSLAQHIPGPGGIEGVKGAASGVVGELARARLALDERGQKLGDLEERTAAMLSSAESFSKHAHEIMLKYKDKKWYQF

SEQ ID NO: 8241 - protein, 853 aa, Homo sapiens
MAWKTLPIYLLLLLSVFVIQQVSSQELSCKGRCFESFERGRECDCDAQCKKYDKCCPDYESFCAEVKDNKKNRTKKKPTPKPPVVDEAGSGLDNGDFKVTTPDTSTTQHNKVSTSPKITTAKPINPRPSLPPNSDTSKETSLTVNKETTVETKETTTTNKQTSTDGKEKTTSAKETQSIEKTSAKDLAPTSKVLAKPTPKAETTTKGPALTTPKEPTPTTPKEPASTTPKEPTPTTIKSAPTTPKEPAPTTTKSAPTTPKEPAPTTTKEPAPTTPKEPAPTTTKEPAPTTTKSAPTTPKEPAPTTPKKPAPTTPKEPAPTTPKEPTPTTPKEPAPTTKEPAPTTPKEPAPTAPKKPAPTTPKEPAPTTPKEPAPTTTKEPSPTTPKEPAPTTTKSAPTTTKEPAPTTTKSAPTTPKEPSPTTTKEPAPTTPKEPAPTTPKKPAPTTPKEPAPTTPKEPAPTTTKKPAPTTPKEPAPTTPKETAPTTPKKLTPTTPEKLAPTTPEKPAPTTPEELAPTTPEEPTPTTPEEPAPTTPKAAAPNTPKEPAPTTPKEPAPTTPKEPAPTTPKETAPTTPKGTAPTTLKEPAPTTPKKPAPKELAPTTTKEPTSTTSDKPAPTTPKGTAPTTPKEPAPTTPKEPAPTTPKGTAPTTLKEPAPTTPKKPAPKELAPTTTKGPTSTTSDKPAPTTPKETAPTTPKEPAPTTPKKPAPTTPETPPPTTSEVSTPTTTKEPTTIHKSPDESTPELSAEPTPKALENSPKEPGVPTTKTPAATKPEMTTTAKDKTTERDLRTTPETTTAAPKMTKETATTTEKTTESKITATTTQVTSTTTQDTTPFKITTLKTTTLAPKVTT

SEQ ID NO: 8242 - protein, 1363 aa, Homo sapiens
MAWKTLPIYLLLLLSVFVIQQVSSQELSCKGRCFESFERGRECDCDAQCKKYDKCCPDYESFCAEVHNPTSPPSSKKAPPPSGASQTIKSTTKRSPKPPNKKKTKKVIESEEITEEHSVSENQESSSSSSSSSSSSTIRKIKSSKNSAANRELQKKLKVKDNKKNRTKKKPTPKPPVVDEAGSGLDNGDFKVTTPDTSTTQHNKVSTSPKITTAKPINPRPSLPPNSDTSKETSLTVNKETTVETKETTTTNKQTSTDGKEKTTSAKETQSIEKTSAKDLAPTSKVLAKPTPKAETTTKGPALTTPKEPTPTTPKEPASTTPKEPTPTTIKSAPTTPKEPAPTTTKSAPTTPKEPAPTTTKEPAPTTPKEPAPTTTKEPAPTTTKSAPTTPKEPAPTTPKKPAPTTPKEPAPTTPKEPTPTTPKEPAPTTKEPAPTTPKEPAPTAPKKPAPTTPKEPAPTTPKEPAPTTTKEPSPTTPKEPAPTTTKSAPTTTKEPAPTTTKSAPTTPKEPSPTTTKEPAPTTPKEPAPTTPKKPAPTTPKEPAPTTPKEPAPTTTKKPAPTTPKEPAPTTPKETAPTTPKKLTPTTPEKLAPTTPEKPAPTTPEELAPTTPEEPTPTTPEEPAPTTPKAAAPNTPKEPAPTTPKEPAPTTPKEPAPTTPKETAPTTPKGTAPTTLKEPAPTTPKKPAPKELAPTTTKEPTSTTSDKPAPTTPKGTAPTTPKEPAPTTPKEPAPTTPKGTAPTTLKEPAPTTPKKPAPKELAPTTTKGPTSTTSDKPAPTTPKETAPTTPKEPAPTTPKKPAPTTPETPPPTTSEVSTPTTTKEPTTIHKSPDESTPELSAEPTPKALENSPKEPGVPTTKTPAATKPEMTTTAKDKTTERDLRTTPETTTAAPKMTKETATTTEKTTESKITATTTQVTSTTTQDTTPFKITTLKTTTLAPKVTTTKKTITTTEIMNKPEETAKPKDRATNSKATTPKPQKPTKAPKKPTSTKKPKTMPRVRKPKTTPTPRKMTSTMPELNPTSRIAEAMLQTTTRPNQTPNSKLVEVNPKSEDAGGAEGETPHMLLRPHVFMPEVTPDMDYLPRVPNQGIIINPMLSDETNICNGKPVDGLTTLRNGTLVAFRGHYFWMLSPFSPPSPARRITEVWGIPSPIDTVFTRCNCEGKTFFFKDSQYWRFTNDIKDAGYPKPIFKGFGGLTGQIVAALSTAKYKNWPESVYFFKRGGSIQQYIYKQEPVQKCPGRRPALNYPVYGETTQVRRRRFERAIGPSQTHTIRIQYSPARLAYQDKGVLHNEVKVSILWRGLPNVVTSAISLPNIRKPDGYDYYAFSKDQYYNIDVPSRTARAITTRSGQTLSKVWYNCP

SEQ ID NO: 8243 - protein, 1311 aa, Homo sapiens
MAWKTLPIYLLLLLSVFVIQQVSSQDLSSCAGRCGEGYSRDATCNCDYNCQHYMECCPDFKRVCTAELSCKGRCFESFERGRECDCDAQCKKYDKCCPDYESFCAEVKDNKKNRTKKKPTPKPPVVDEAGSGLDNGDFKVTTPDTSTTQHNKVSTSPKITTAKPINPRPSLPPNSDTSKETSLTVNKETTVETKETTTTNKQTSTDGKEKTTSAKETQSIEKTSAKDLAPTSKVLAKPTPKAETTTKGPALTTPKEPTPTTPKEPASTTPKEPTPTTIKSAPTTPKEPAPTTTKSAPTTPKEPAPTTTKEPAPTTPKEPAPTTTKEPAPTTTKSAPTTPKEPAPTTPKKPAPTTPKEPAPTTPKEPTPTTPKEPAPTTKEPAPTTPKEPAPTAPKKPAPTTPKEPAPTTPKEPAPTTTKEPSPTTPKEPAPTTTKSAPTTTKEPAPTTTKSAPTTPKEPSPTTTKEPAPTTPKEPAPTTPKKPAPTTPKEPAPTTPKEPAPTTTKKPAPTTPKEPAPTTPKETAPTTPKKLTPTTPEKLAPTTPEKPAPTTPEELAPTTPEEPTPTTPEEPAPTTPKAAAPNTPKEPAPTTPKEPAPTTPKEPAPTTPKETAPTTPKGTAPTTLKEPAPTTPKKPAPKELAPTTTKEPTSTTSDKPAPTTPKGTAPTTPKEPAPTTPKEPAPTTPKGTAPTTLKEPAPTTPKKPAPKELAPTTTKGPTSTTSDKPAPTTPKETAPTTPKEPAPTTPKKPAPTTPETPPPTTSEVSTPTTTKEPTTIHKSPDESTPELSAEPTPKALENSPKEPGVPTTKTPAATKPEMTTTAKDKTTERDLRTTPETTTAAPKMTKETATTTEKTTESKITATTTQVTSTTTQDTTPFKITTLKTTTLAPKVTTTKKTITTTEIMNKPEETAKPKDRATNSKATTPKPQKPTKAPKKPTSTKKPKTMPRVRKPKTTPTPRKMTSTMPELNPTSRIAEAMLQTTTRPNQTPNSKLVEVNPKSEDAGGAEGETPHMLLRPHVFMPEVTPDMDYLPRVPNQGIIINPMLSDETNICNGKPVDGLTTLRNGTLVAFRGHYFWMLSPFSPPSPARRITEVWGIPSPIDTVFTRCNCEGKTFFFKDSQYWRFTNDIKDAGYPKPIFKGFGGLTGQIVAALSTAKYKNWPESVYFFKRGGSIQQYIYKQEPVQKCPGRRPALNYPVYGETTQVRRRRFERAIGPSQTHTIRIQYSPARLAYQDKGVLHNEVKVSILWRGLPNVVTSAISLPNIRKPDGYDYYAFSKDQYYNIDVPSRTARAITTRSGQTLSKVWYNCP

SEQ ID NO: 8244 - protein, 225 aa, Homo sapiens
MAGGGAGDPGLGAAAAPAPETREHLFKVLVIGELGVGKTSIIKRYVHQLFSQHYRATIGVDFALKVLNWDSRTLVRLQLWDIAGQERFGNMTRVYYKEAVGAFVVFDISRSSTFEAVLKWKSDLDSKVHLPNGSPIPAVLLANKCDQNKDSSQSPSQVDQFCKEHGFAGWFETSAKDNINIEEAARFLVEKILVNHQSFPNEENDVDKIKLDQETLRAENKSQCC

SEQ ID NO: 8245 - protein, 642 aa, Homo sapiens
MIPNGYLMFEDENFIESSVAKLNALRKSGQFCDVRLQVCGHEMLAHRAVLACCSPYLFEIFNSDSDPHGISHVKFDDLNPEAVEVLLNYAYTAQLKADKELVKDVYSAAKKLKMDRVKQVCGDYLLSRMDVTSCISYRNFASCMGDSRLLNKVDAYIQEHLLQISEEEEFLKLPRLKLEVMLEDNVCLPSNGKLYTKVINWVQRSIWENGDSLEELMEEVQTLYYSADHKLLDGNLLDGQAEVFGSDDDHIQFVQKKPPRENGHKQISSSSTGCLSSPNATVQSPKHEWKIVASEKTSNNTYLCLAVLDGIFCVIFLHGRNSPQSSPTSTPKLSKSLSFEMQQDELIEKPMSPMQYARSGLGTAEMNGKLIAAGGYNREECLRTVECYNPHTDHWSFLAPMRTPRARFQMAVLMGQLYVVGGSNGHSDDLSCGEMYDSNIDDWIPVPELRTNRCNAGVCALNGKLYIVGGSDPYGQKGLKNCDVFDPVTKLWTSCAPLNIRRHQSAVCELGGYLYIIGGAESWNCLNTVERYNPENNTWTLIAPMNVARRGAGVAVLNGKLFVCGGFDGSHAISCVEMYDPTRNEWKMMGNMTSPRSNAGIATVGNTIYAVGGFDGNEFLNTVEVYNLESNEWSPYTKIFQF

SEQ ID NO: 8246 - protein, 336 aa, Homo sapiens
MSQAVQTNGTQPLSKTWELSLYELQRTPQEAITDGLEIVVSPRSLHSELMCPICLDMLKNTMTTKECLHRFCADCIITALRSGNKECPTCRKKLVSKRSLRPDPNFDALISKIYPSRDEYEAHQERVLARINKHNNQQALSHSIEEGLKIQAMNRLQRGKKQQIENGSGAEDNGDSSHCSNASTHSNQEAGPSNKRTKTSDDSGLELDNNNAAMAIDPVMDGASEIELVFRPHPTLMEKDDSAQTRYIKTSGNATVDHLSKYLAVRLALEELRSKGESNQMNLDTASEKQYTIYIATASGQFTVLNGSFSLELVSEKYWKVNKPMELYYAPTKEHK

SEQ ID NO: 8247 - protein, 928 aa, Homo sapiens
MGGSASSQLDEGKCAYIRGKTEAAIKNFSPYYSRQYSVAFCNHVRTEVEQQRDLTSQFLKTKPPLAPGTILYEAELSQFSEDIKKWKERYVVVKNDYAVESYENKEAYQRGAAPKCRILPAGGKVLTSEDEYNLLSDRHFPDPLASSEKENTQPFVVLPKEFPVYLWQPFFRHGYFCFHEAADQKRFSALLSDCVRHLNHDYMKQMTFEAQAFLEAVQFFRQEKGHYGSWEMITGDEIQILSNLVMEELLPTLQTDLLPKMKGKKNDRKRTWLGLLEEAYTLVQHQVSEGLSALKEECRALTKGLEGTIRSDMDQIVNSKNYLIGKIKAMVAQPAEKSCLESVQPFLASILEELMGPVSSGFSEVRVLFEKEVNEVSQNFQTTKDSVQLKEHLDRLMNLPLHSVKMEPCYTKVNLLHERLQDLKSRFRFPHIDLVVQRTQNYMQELMENAVFTFEQLLSPHLQGEASKTAVAIEKVKLRVLKQYDYDSSTIRKKIFQEALVQITLPTVQKALASTCKPELQKYEQFIFADHTNMIHVENVYEEILHQILLDETLKVIKEAAILKKHNLFEDNMALPSESVSSLTDLKPPTGSNQASPARRASAILPGVLGSETLSNEVFQESEEEKQPEVPSSLAKGESLSLPGPSPPPDGTEQVIISRVDDPVVNPVATEDTAGLPGTCSSELEFGGTLEDEEPAQEEPEPITASGSLKALRKLLTASVEVPVDSAPVMEEDTNGESHVPQENEEEEEKEPSQAAAIHPDNCEESEVSEREAQPPCPEAHGEELGGFPEVGSPASPPASGGLTEEPLGPMEGELPGEACTLTAHEGRGGKCTEEGDASQQEGCTLGSDPICLSESQVSEEQEEMGGQSSAAQATASVNAEEIKVARIHECQWVVEDAPNPDVLLSHKDDVKEGEGGQESFPELPSEE

SEQ ID NO: 8248 - protein, 3433 aa, Homo sapiens
MAKYGEHEASPDNGQNEFSDIIKSRSDEHNDVQKKTFTKWINARFSKSGKPPINDMFTDLKDGRKLLDLLEGLTGTSLPKERGSTRVHALNNVNRVLQVLHQNNVELVNIGGTDIVDGNHKLTLGLLWSIILHWQVKDVMKDVMSDLQQTNSEKILLSWVRQTTRPYSQVNVLNFTTSWTDGLAFNAVLHRHKPDLFSWDKVVKMSPIERLEHAFSKAQTYLGIEKLLDPEDVAVQLPDKKSIIMYLTSLFEVLPQQVTIDAIREVETLPRKYKKECEEEAINIQSTAPEEEHESPRAETPSTVTEVDMDLDSYQIALEEVLTWLLSAEDTFQEQDDISDDVEEVKDQFATHEAFMMELTAHQSSVGSVLQAGNQLITQGTLSDEEEFEIQEQMTLLNARWEALRVESMDRQSRLHDVLMELQKKQLQQLSAWLTLTEERIQKMETCPLDDDVKSLQKLLEEHKSLQSDLEAEQVKVNSLTHMVVIVDENSGESATAILEDQLQKLGERWTAVCRWTEERWNRLQEINILWQELLEEQCLLKAWLTEKEEALNKVQTSNFKDQKELSVSVRRLAILKEDMEMKRQTLDQLSEIGQDVGQLLDNSKASKKINSDSEELTQRWDSLVQRLEDSSNQVTQAVAKLGMSQIPQKDLLETVRVREQAITKKSKQELPPPPPPKKRQIHVDIEAKKKFDAISAELLNWILKWKTAIQTTEIKEYMKMQDTSEMKKKLKALEKEQRERIPRADELNQTGQILVEQMGKEGLPTEEIKNVLEKVSSEWKNVSQHLEDLERKIQLQEDINAYFKQLDELEKVIKTKEEWVKHTSISESSRQSLPSLKDSCQRELTNLLGLHPKIEMARASCSALMSQPSAPDFVQRGFDSFLGRYQAVQEAVEDRQQHLENELKGQPGHAYLETLKTLKDVLNDSENKAQVSLNVLNDLAKVEKALQEKKTLDEILENQKPALHKLAEETKALEKNVHPDVEKLYKQEFDDVQGKWNKLKVLVSKDLHLLEEIALTLRAFEADSTVIEKWMDGVKDFLMKQQAAQGDDAGLQRQLDQCSAFVNEIETIESSLKNMKEIETNLRSGPVAGIKTWVQTRLGDYQTQLEKLSKEIATQKSRLSESQEKAANLKKDLAEMQEWMTQAEEEYLERDFEYKSPEELESAVEEMKRAKEDVLQKEVRVKILKDNIKLLAAKVPSGGQELTSELNVVLENYQLLCNRIRGKCHTLEEVWSCWIELLHYLDLETTWLNTLEERMKSTEVLPEKTDAVNEALESLESVLRHPADNRTQIRELGQTLIDGGILDDIISEKLEAFNSRYEDLSHLAESKQISLEKQLQVLRETDQMLQVLQESLGELDKQLTTYLTDRIDAFQVPQEAQKIQAEISAHELTLEELRRNMRSQPLTSPESRTARGGSQMDVLQRKLREVSTKFQLFQKPANFEQRMLDCKRVLDGVKAELHVLDVKDVDPDVIQTHLDKCMKLYKTLSEVKLEVETVIKTGRHIVQKQQTDNPKGMDEQLTSLKVLYNDLGAQVTEGKQDLERASQLARKMKKEAASLSEWLSATETELVQKSTSEGLLGDLDTEISWAKNVLKDLEKRKADLNTITESSAALQNLIEGSEPILEERLCVLNAGWSRVRTWTEDWCNTLMNHQNQLEIFDGNVAHISTWLYQAEALLDEIEKKPTSKQEEIVKRLVSELDDANLQVENVRDQALILMNARGSSSRELVEPKLAELNRNFEKVSQHIKSAKLLIAQEPLYQCLVTTETFETGVPFSDLEKLENDIENMLKFVEKHLESSDEDEKMDEESAQIEEVLQRGEEMLHQPMEDNKKEKIRLQLLLLHTRYNKIKAIPIQQRKMGQLASGIRSSLLPTDYLVEINKILLCMDDVELSLNVPELNTAIYEDFSFQEDSLKNIKDQLDKLGEQIAVIHEKQPDVILEASGPEAIQIRDTLTQLNAKWDRINRMYSDRKGCFDRAMEEWRQFHCDLNDLTQWITEAEELLVDTCAPGGSLDLEKARIHQQELEVGISSHQPSFAALNRTGDGIVQKLSQADGSFLKEKLAGLNQRWDAIVAEVKDRQPRLKGESKQVMKYRHQLDEIICWLTKAEHAMQKRSTTELGENLQELRDLTQEMEVHAEKLKWLNRTELEMLSDKSLSLPERDKISESLRTVNMTWNKICREVPTTLKECIQEPSSVSQTRIAAHPNVQKVVLVSSASDIPVQSHRTSEISIPADLDKTITELADWLVLIDQMLKSNIVTVGDVEEINKTVSRMKITKADLEQRHPQLDYVFTLAQNLKNKASSSDMRTAITEKLERVKNQWDGTQHGVELRQQQLEDMIIDSLQWDDHREETEELMRKYEARLYILQQARRDPLTKQISDNQILLQELGPGDGIVMAFDNVLQKLLEEYGSDDTRNVKETTEYLKTSWINLKQSIADRQNALEAEWRTVQASRRDLENFLKWIQEAETTVNVLVDASHRENALQDSILARELKQQMQDIQAEIDAHNDIFKSIDGNRQKMVKALGNSEEATMLQHRLDDMNQRWNDLKAKSASIRAHLEASAEKWNRLLMSLEELIKWLNMKDEELKKQMPIGGDVPALQLQYDHCKALRRELKEKEYSVLNAVDQARVFLADQPIEAPEEPRRNLQSKTELTPEERAQKIAKAMRKQSSEVKEKWESLNAVTSNWQKQVDKALEKLRDLQGAMDDLDADMKEAESVRNGWKPVGDLLIDSLQDHIEKIMAFREEIAPINFKVKTVNDLSSQLSPLDLHPSLKMSRQLDDLNMRWKLLQVSVDDRLKQLQEAHRDFGPSSQHFLSTSVQLPWQRSISHNKVPYYINHQTQTTCWDHPKMTELFQSLADLNNVRFSAYRTAIKIRRLQKALCLDLLELSTTNEIFKQHKLNQNDQLLSVPDVINCLTTTYDGLEQMHKDLVNVPLCVDMCLNWLLNVYDTGRTGKIRVQSLKIGLMSLSKGLLEEKYRYLFKEVAGPTEMCDQRQLGLLLHDAIQIPRQLGEVAAFGGSNIEPSVRSCFQQNNNKPEISVKEFIDWMHLEPQSMVWLPVLHRVAAAETAKHQAKCNICKECPIVGFRYRSLKHFNYDVCQSCFFSGRTAKGHKLHYPMVEYCIPTTSGEDVRDFTKVLKNKFRSKKYFAKHPRLGYLPVQTVLEGDNLETPITLISMWPEHYDPSQSPQLFHDDTHSRIEQYATRLAQMERTNGSFLTDSSSTTGSVEDEHALIQQYCQTLGGESPVSQPQSPAQILKSVEREERGELERIIADLEEEQRNLQVEYEQLKDQHLRRGLPVGSPPESIISPHHTSEDSELIAEAKLLRQHKGRLEARMQILEDHNKQLESQLHRLRQLLEQPESDSRINGVSPWASPQHSALSYSLDPDASGPQFHQAAGEDLLAPPHDTSTDLTEVMEQIHSTFPSCCPNVPSRPQAM

SEQ ID NO: 8249 - protein, 1270 aa, Homo sapiens
MGDVKNFLYAWCGKRKMTPSYEIRAVGNKNRQKFMCEVQVEGYNYTGMGNSTNKKDAQSNAARDFVNYLVRINEIKSEEVPAFGVASPPPLTDTPDTTANAEGDLPTTMGGPLPPHLALKAENNSEVGASGYGVPGPTWDRGANLKDYYSRKEEQEVQATLESEEVDLNAGLHGNWTLENAKARLNQYFQKEKIQGEYKYTQVGPDHNRSFIAEMTIYIKQLGRRIFAREHGSNKKLAAQSCALSLVRQLYHLGVVEAYSGLTKKKEGETVEPYKVNLSQDLEHQLQNIIQELNLEILPPPEDPSVPVALNIGKLAQFEPSQRQNQVGVVPWSPPQSNWNPWTSSNIDEGPLAFATPEQISMDLKNELMYQLEQDHDLQAILQERELLPVKKFESEILEAISQNSVVIIRGATGCGKTTQVPQFILDDFIQNDRAAECNIVVTQPRRISAVSVAERVAFERGEEPGKSCGYSVRFESILPRPHASIMFCTVGVLLRKLEAGIRGISHVIVDEIHERDINTDFLLVVLRDVVQAYPEVRIVLMSATIDTSMFCEYFFNCPIIEVYGRTYPVQEYFLEDCIQMTHFVPPPKDKKKKDKDDDGGEDDDANCNLICGDEYGPETRLSMSQLNEKETPFELIEALLKYIETLNVPGAVLVFLPGWNLIYTMQKHLEMNPHFGSHRYQILPLHSQIPREEQRKVFDPVPVGVTKVILSTNIAETSITINDVVYVIDSCKQKVKLFTAHNNMTNYATVWASKTNLEQRKGRAGRVRPGFCFHLCSRARFERLETHMTPEMFRTPLHEIALSIKLLRLGGIGQFLAKAIEPPPLDAVIEAEHTLRELDALDANDELTPLGRILAKLPIEPRFGKMMIMGCIFYVGDAICTIAAATCFPEPFINEGKRLGYIHRNFAGNRFSDHVALLSVFQAWDDARMGGEEAEIRFCEHKRLNMATLRMTWEAKVQLKEILINSGFPEDCLLTQVFTNTGPDNNLDVVISLLAFGVYPNVCYHKEKRKILTTEGRNALIHKSSVNCPFSSQDMKYPSPFFVFGEKIRTRAISAKGMTLVTPLQLLLFASKKVQSDGQIVLVDDWIKLQISHEAAACITGLRAAMEALVVEVTKQPAIISQLDPVNERMLNMIRQISRPSAAGINLMIGSTRYGDGPRPPKMARYDNGSGYRRGGSSYSGGGYGGGYSSGGYGSGGYGGSANSFRAGYGAGVGGGYRGVSRGGFRGNSGGDYRGPSGGYRGSGGFQRGGGRGAYGTGYFGQGRGGGGY

SEQ ID NO: 8250 - protein, 741 aa, Homo sapiens
MESRDHNNPQEGPTSSSGRRAAVEDNHLLIKAVQNEDVDLVQQLLEGGANVNFQEEEGGWTPLHNAVQMSREDIVELLLRHGADPVLRKKNGATPFILAAIAGSVKLLKLFLSKGADVNECDFYGFTAFMEAAVYGKVKALKFLYKRGANVNLRRKTKEDQERLRKGGATALMDAAEKGHVEVLKILLDEMGADVNACDNMGRNALIHALLSSDDSDVEAITHLLLDHGADVNVRGERGKTPLILAVEKKHLGLVQRLLEQEHIEINDTDSDGKTALLLAVELKLKKIAELLCKRGASTDCGDLVMTARRNYDHSLVKVLLSHGAKEDFHPPAEDWKPQSSHWGAALKDLHRIYRPMIGKLKFFIDEKYKIADTSEGGIYLGFYEKQEVAVKTFCEGSPRAQREVSCLQSSRENSHLVTFYGSESHRGHLFVCVTLCEQTLEACLDVHRGEDVENEEDEFARNVLSSIFKAVQELHLSCGYTHQDLQPQNILIDSKKAAHLADFDKSIKWAGDPQEVKRDLEDLGRLVLYVVKKGSISFEDLKAQSNEEVVQLSPDEETKDLIHRLFHPGEHVRDCLSDLLGHPFFWTWESRYRTLRNVGNESDIKTRKSESEILRLLQPGPSEHSKSFDKWTTKINECVMKKMNKFYEKRGNFYQNTVGDLLKFIRNLGEHIDEEKHKKMKLKIGDPSLYFQKTFPDLVIYVYTKLQNTEYRKHFPQTHSPNKPQCDGAGGASGLASPGC

SEQ ID NO: 8251 - protein, 86 aa, Homo sapiens
MTDRYTIHSQLEHLQSKYIGTGHADTTKWEWLVNQHRDSYCSYMGHFDLLNYFAIAENESKARVRFNLMEKMLQPCGPPADKPEEN

SEQ ID NO: 8252 - protein, 411 aa, Homo sapiens
MATHSPQKSHQCAHCEKTFNRKDHLKNHLQTHDPNKMAFGCEECGKKYNTMLGYKRHLALHAASSGDLTCGVCALELGSTEVLLDHLKAHAEEKPPSGTKEKKHQCDHCERCFYTRKDVRRHLVVHTGCKDFLCQFCAQRFGRKDHLTRHTKKTHSQELMKESLQTGDLLSTFHTISPSFQLKAAALPPFPLGASAQNGLASSLPAEVHSLTLSPPEQAAQPMQPLPESLASLHPSVSPGSPPPPLPNHKYNTTSTSYSPLASLPLKADTKGFCNISLFEDLPLQEPQSPQKLNPGFDLAKGNAGKVNLPKELPADAVNLTIPASLDLSPLLGFWQLPPPATQNTFGNSTLALGPGESLPHRLSCLGQQQQEPPLAMGTVSLGQLPLPPIPHVFSAGTGSAILPHFHHAFR

SEQ ID NO: 8253 - protein, 475 aa, Homo sapiens
MPHRKKKPFIEKKKAVSFHLVHRSQRDPLAADESAPQRVLLPTQKIDNEERRAEQRKYGVFFDDDYDYLQHLKEPSGPSELIPSSTFSAHNRREEKEETLVIPSTGIKLPSSVFASEFEEDVGLLNKAAPVSGPRLDFDPDIVAALDDDFDFDDPDNLLEDDFILQANKATGEEEGMDIQKSENEDDSEWEDVDDEKGDSNDDYDSAGLLSDEDCMSVPGKTHRAIADHLFWSEETKSRFTEYSMTSSVMRRNEQLTLHDERFEKFYEQYDDDEIGALDNAELEGSIQVDSNRLQEVLNDYYKEKAENCVKLNTLEPLEDQDLPMNELDESEEEEMITVVLEEAKEKWDCESICSTYSNLYNHPQLIKYQPKPKQIRISSKTGIPLNVLPKKGLTAKQTERIQMINGSDLPKVSTQPRSKNESKEDKRARKQAIKEERKERRVEKKANKLAFKLEKRRQEKELLNLKKNVEGLKL

SEQ ID NO: 8254 - protein, 327 aa, Homo sapiens
MEFKLEAHRIVSISLGKIYNSRVQRGGIKLHKNLLVSLVLRSARQVYLSDPCPGLYLAGPAGTPAPPPQQQPGEPAAGPPAGWGEPPPPAARASWPETEPQPERSSVSDAPRVGDEVPVATVTGVGDVFQGGEADATEAAWSRVEGPRQAAAREAEGTAGGWGVFPEVSRAARRPCGCPLGGEDPPGTPAATPRAACCCAPQPAEDEPPAPPAVCPRKRCAAGVGGGPAGCPAPGSTPLKKPRRNLEQPPSGGEDDDAEEMETGNVANLISIFGSSFSGLLRKSPGGGREEEEGEESGPEAAEPGQICCDKPVLRDMNPWSTAIVAF

SEQ ID NO: 8255 - protein, 296 aa, Homo sapiens
MGELMAFLLPLIIVLMVKHSDSRTHSLRYFRLGVSDPIHGVPEFISVGYVDSHPITTYDSVTRQKEPRAPWMAENLAPDHWERYTQLLRGWQQMFKVELKRLQRHYNHSDNVAHTIKQAWEANQHELLYQKNWLEEECIAWLKRFLEYGKDTLQRTEPPLVRVNRKETFPGVTALFCKAHGFYPPEIYMTWMKNGEEIVQEIDYGDILPSGDGTYQAWASIELDPQSSNLYSCHVEHCGVHMVLQVPQESETIPLVMKAVSGSIVLVIVLAGVGVLVWRRRPREQNGAIYLPTPDR

SEQ ID NO: 8256 - protein, 341 aa, Homo sapiens
MGELMAFLLPLIIVLMVKHSDSRTHSLRYFRLGVSDPIHGVPEFISVGYVDSHPITTYDSVTRQKEPRAPWMAENLAPDHWERYTQLLRGWQQMFKVELKRLQRHYNHSGSHTYQRMIGCELLEDGSTTGFLQYAYDGQDFLIFNKDTLSWLAVDNVAHTIKQAWEANQHELLYQKNWLEEECIAWLKRFLEYGKDTLQRTEPPLVRVNRKETFPGVTALFCKAHGFYPPEIYMTWMKNGEEIVQEIDYGDILPSGDGTYQAWASIELDPQSSNLYSCHVEHCGVHMVLQVPQESETIPLVMKAVSGSIVLVIVLAGVGVLVWRRRPREQNGAIYLPTPDR

SEQ ID NO: 8257 - protein, 565 aa, Homo sapiens
MGQTSVSTLSPQPGSVDGLDKASIANSDGPTAGSQTPPFKRKGKLSTIGKIFKPWKWRKKKTSDKFRETSAVLERKISTRQSREELIRRGVLKELPDQDGDVTVNFENSNGHMIPIGEESTREENVVKSEEGNGSVSEKTPPLEEQAEDKKAGSSHSKKTTGSKASASPSTSSTSSRPKASKETVSSKAGTVGTTKGKRKTDKQPITSHLSSDTTTSGTSDLKGEPAETRVESFKLEQTVPGAEEQNTGKFKSMVPPPPVAPAPSPLAPPLPLEDQCITASDTPVVLVSVGADLPVSALDPSQLLWAEEPTNRTTLYSGTGLSVNRENAKCFTTKEELGKTVPQLLTPGLMGESSESFSASEDEGHREYQANDSDSDGPILYTDDEDEDEDEDGSGESALASKIRRRDTLAIKLGNRPSKKELEDKNILQRTSEEERQEIRQQIGTKLVRRLSQRPTTEELEQRNILKQKNEEEEQEAKMELKRRLSRKLSLRPTVAELQARRILRFNEYVEVTDSPDYDRRADKPWARLTPADKAAIRKELNEFKSTEMEVHEESRQFTRFHRP

SEQ ID NO: 8258 - protein, 622 aa, Homo sapiens
MAEAGWRPAASPVDPAGQAAAVPVPEPEAPAPPAAPALRWLPGDPSPRGRSQSDLSSSSSRGRPLRVHISGSVDGLDKASIANSDGPTAGSQTPPFKRKGKLSTIGKIFKPWKWRKKKTSDKFRETSAVLERKISTRQSREELIRRGVLKELPDQDGDVTVNFENSNGHMIPIGEESTREENVVKSEEGNGSVSEKTPPLEEQAEDKKAGSSHSKKTTGSKASASPSTSSTSSRPKASKETVSSKAGTVGTTKGKRKTDKQPITSHLSSDTTTSGTSDLKGEPAETRVESFKLEQTVPGAEEQNTGKFKSMVPPPPVAPAPSPLAPPLPLEDQCITASDTPVVLVSVGADLPVSALDPSQLLWAEEPTNRTTLYSGTGLSVNRENAKCFTTKEELGKTVPQLLTPGLMGESSESFSASEDEGHREYQANDSDSDGPILYTDDEDEDEDEDGSGESALASKIRRRDTLAIKLGNRPSKKELEDKNILQRTSEEERQEIRQQIGTKLVRRLSQRPTTEELEQRNILKQKNEEEEQEAKMELKRRLSRKLSLRPTVAELQARRILRFNEYVEVTDSPDYDRRADKPWARLTPADKAAIRKELNEFKSTEMEVHEESRQFTRFHRP

SEQ ID NO: 8259 - protein, 811 aa, Homo sapiens
MKARTRPLRASHDIVPTITQGSRDGHRSPARDPRTTPACRDSLQNGHTSDSSSGESSGGHRPRRGPSPSHVRFEDESAREAEFRHLERLQQRQRQVLSTVLQAADQGPLRSKPDLADYINGAPRLRDAGQGTFHRLVGSLDRRGHPAPPAPGSERRCQACGSCIDDPRPAQGKAPPVPRTLQELQAACGMERVLGGLSSPLRLLPAEPRLHMEWIRETHIGDTVCPAEVDSALDSTDNSDNCRTDSEEAGTSQAGWACGRTQGSSPRLRLRGSRPRGHRWSKKAEAELPWGLQAQQHLPRADDVEVENEVKEGRGHTPEGTLFLREDAKPPDLELKRVSLGPQWQPGPGLGSHQPHPLDSRTPCRTAYATTAPMTPESSGPGGQAQVTESHESLEIVSPSSLQQSHAEPSAPHQAWQPTASLCPEGWAPTPPPSRKTTSPVSHRKAALAGLLRLGDQTEPVGIPRPPSRSAVLRTCELPPSQTQPSRPQVRHPLLALSTNNCNNSAPRGLQEPYGGAVHEGRVERGPCSREPEPPLENSRDGGPQGFLGSADVATINSTGITLSLSSEESESSKESEGSLQRTGSGSGGHVLSRASAGAGTGPGSPSAAPLDQNKKRSSSIASTLGLKKLFSALGQSSRPKLGKSRSYSVEQLQPAPPGLTSQSRAPSLQSLHPVSPSHQRRKAASFQNLHSLLSSKGNRSSLYLVAGPGDHSAAGRPAKTSPRRALSVEDVGAPSLARTVGRLVEVFPDGTSQLQLQRSPGGTFGFCVASGNGRPDSGMPSPLPQPHGWGGLSKQGRAFWLWSEAFLVFG

SEQ ID NO: 8260 - protein, 696 aa, Homo sapiens
MKFAEHLSAHITPEWRKQYIQYEAFKDMLYSAQDQAPSVEVTDEDTVKRYFAKFEEKFFQTCEKELAKINTFYSEKLAEAQRRFATLQNELQSSLDAQKESTGVTTLRQRRKPVFHLSHEERVQHRNIKDLKLAFSEFYLSLILLQNYQNLNFTGFRKILKKHDKILETSRGADWRVAHVEVAPFYTCKKINQLISETEAVVTNELEDGDRQKAMKRLRVPPLGAAQPAPAWTTFRVGLFCGIFIVLNITLVLAAVFKLETDRSIWPLIRIYRGGFLLIEFLFLLGINTYGWRQAGVNHVLIFELNPRSNLSHQHLFEIAGFLGILWCLSLLACFFAPISVIPTYVYPLALYGFMVFFLINPTKTFYYKSRFWLLKLLFRVFTAPFHKVGFADFWLADQLNSLSVILMDLEYMICFYSLELKWDESKGLLPNNSEESGICHKYTYGVRAIVQCIPAWLRFIQCLRRYRDTKRAFPHLVNAGKYSTTFFMVTFAALYSTHKERGHSDTMVFFYLWIVFYIISSCYTLIWDLKMDWGLFDKNAGENTFLREEIVYPQKAYYYCAIIEDVILRFAWTIQISITSTTLLPHSGDIIATVFAPLEVFRRFVWNFFRLENEHLNNCGEFRAVRDISVAPLNADDQTLLEQMMDQDDGVRNRQKNRSWKYNQSISLRRPRLASQSKARDTKVLIEDTDDEANT

SEQ ID NO: 8261 - protein, 373 aa, Homo sapiens
MLRSVWNFLKRHKKKCIFLGTVLGGVYILGKYGQKKIREIQEREAAEYIAQARRQYHFESNQRTCNMTVLSMLPTLREALMQQLNSESLTALLKNRPSNKLEIWEDLKIISFTRSTVAVYSTCMLVVLLRVQLNIIGGYIYLDNAAVGKNGTTILAPPDVQQQYLSSIQHLLGDGLTELITVIKQAVQKVLGSVSLKHSLSLLDLEQKLKEIRNLVEQHKSSSWINKDGSKPLLCHYMMPDEETPLAVQACGLSPRDITTIKLLNETRDMLESPDFSTVLNTCLNRGFSRLLDNMAEFFRPTEQDLQHGNSMNSLSSVSLPLAKIIPIVNGQIHSVCSETPSHFVQDLLTMEQVKDFAANVYEAFSTPQQLEK

SEQ ID NO: 8262 - protein, 282 aa, Homo sapiens
MASSFLPAGAITGDSGGELSSGDDSGEVEFPHSPEIEETSCLAELFEKAAAHLQGLIQVASREQLLYLYARYKQVKVGNCNTPKPSFFDFEGKQKWEAWKALGDSSPSQAMQEYIAVVKKLDPGWNPQIPEKKGKEANTGFGGPVISSLYHEETIREEDKNIFDYCRENNIDHITKAIKSKNVDVNVKDEEGRALLHWACDRGHKELVTVLLQHRADINCQDNEGQTALHYASACEFLDIVELLLQSGADPTLRDQDGCLPEEVTGCKTVSLVLQRHTTGKA

SEQ ID NO: 8263 - protein, 604 aa, Homo sapiens
MRRCNSGSGPPPSLLLLLLWLLAVPGANAAPRSALYSPSDPLTLLQADTVRGAVLGSRSAWAVEFFASWCGHCIAFAPTWKALAEDVKAWRPALYLAALDCAEETNSAVCRDFNIPGFPTVRFFKAFTKNGSGAVFPVAGADVQTLRERLIDALESHHDTWPPACPPLEPAKLEEIDGFFARNNEEYLALIFEKGGSYLGREVALDLSQHKGVAVRRVLNTEANVVRKFGVTDFPSCYLLFRNGSVSRVPVLMESRSFYTAYLQRLSGLTREAAQTTVAPTTANKIAPTVWKLADRSKIYMADLESALHYILRIEVGRFPVLEGQRLVALKKFVAVLAKYFPGRPLVQNFLHSVNEWLKRQKRNKIPYSFFKTALDDRKEGAVLAKKVNWIGCQGSEPHFRGFPCSLWVLFHFLTVQAARQNVDHSQEAAKAKEVLPAIRGYVHYFFGCRDCASHFEQMAAASMHRVGSPNAAVLWLWSSHNRVNARLAGAPSEDPQFPKVQWPPRELCSACHNERLDVPVWDVEATLNFLKAHFSPSNIILDFPAAGSAARRDVQNVAAAPELAMGALELESRNSTLDPGKPEMMKSPTNTTPHVPAEGPELI

SEQ ID NO: 8264 - protein, 747 aa, Homo sapiens
MRRCNSGSGPPPSLLLLLLWLLAVPGANAAPRSALYSPSDPLTLLQADTVRGAVLGSRSAWAVEFFASWCGHCIAFAPTWKALAEDVKAWRPALYLAALDCAEETNSAVCRDFNIPGFPTVRFFKAFTKNGSGAVFPVAGADVQTLRERLIDALESHHDTWPPACPPLEPAKLEEIDGFFARNNEEYLALIFEKGGSYLGREVALDLSQHKGVAVRRVLNTEANVVRKFGVTDFPSCYLLFRNGSVSRVPVLMESRSFYTAYLQRLSGLTREAAQTTVAPTTANKIAPTVWKLADRSKIYMADLESALHYILRIEVGRFPVLEGQRLVALKKFVAVLAKYFPGRPLVQNFLHSVNEWLKRQKRNKIPYSFFKTALDDRKEGAVLAKKVNWIGCQGSEPHFRGFPCSLWVLFHFLTVQAARQNVDHSQEAAKAKEVLPAIRGYVHYFFGCRDCASHFEQMAAASMHRVGSPNAAVLWLWSSHNRVNARLAGAPSEDPQFPKVQWPPRELCSACHNERLDVPVWDVEATLNFLKAHFSPSNIILDFPAAGSAARRDVQNVAAAPELAMGALELESRNSTLDPGKPEMMKSPTNTTPHVPAEGPEASRPPKLHPGLRAAPGQEPPEHMAELQRNEQEQPLGQWHLSKRDTGAALLAESRAEKNRLWGPLEVRRVGRSSKQLVDIPEGQLEARAGRGRGQWLQVLGGGFSYLDISLCVGLYSLSFMGLLAMYTYFQAKIRALKGHAGHPAA

SEQ ID NO: 8265 - protein, 470 aa, Homo sapiens
MADSGLREPQEDSQKDLENDPSVNSQAQETTIIASNAEEAEILHSACGLSKDHQEVETEGPESADTGDKSESPDEANVGKHPKDKTEDENKQSFLDGGKGHHLPSENLGKEPLDPDPSHSPSDKVGRADAHLGSSSVALPKEASDGTGASQEPPTTDSQEAQSPGHSSAGQEGEDTLRRRLLAPEAGSHPQQTQKLEEIKENAQDTMRQINKKGFWSYGPVILVVLVVAVVASSVNSYYSSPAQQVPKNPALEAFLAQFSQLEDKFPGQSSFLWQRGRKFLQKHLNASNPTEPATIIFTAAREGRETLKCLSHHVADAYTSSQKVSPIQIDGAGRTWQDSDTVKLLVDLELSYGFENGQKAAVVHHFESFPAGSTLIFYKYCDHENAAFKDVALVLTVLLEEETLEASVGPRETEEKVRDLLWAKFTNSDTPTSFNHMDSDKLSGLWSRISHLVLPVQPVSSIEEQGCLF

SEQ ID NO: 8266 - protein, 550 aa, Homo sapiens
MVGEEKMSLRNRLSKSRENPEEDEDQRNPAKESLETPSNGRIDIKQLIAKKIKLTAEAEELKPFFMKEVGSHFDDFVTNLIEKSASLDNGGCALTTFSVLEGEKNNHRAKDLRAPPEQGKIFIARRSLLDELLEVDHIRTIYHMFIALLILFILSTLVVDYIDEGRLVLEFSLLSYAFGKFPTVVWTWWIMFLSTFSVPYFLFQHWATGYSKSSHPLIRSLFHGFLFMIFQIGVLGFGPTYVVLAYTLPPASRFIIIFEQIRFVMKAHSFVRENVPRVLNSAKEKSSTVPIPTVNQYLYFLFAPTLIYRDSYPRNPTVRWGYVAMKFAQVFGCFFYVYYIFERLCAPLFRNIKQEPFSARVLVLCVFNSILPGVLILFLTFFAFLHCWLNAFAEMLRFGDRMFYKDWWNSTSYSNYYRTWNVVVHDWLYYYAYKDFLWFFSKRFKSAAMLAVFAVSAVVHEYALAVCLSFFYPVLFVLFMFFGMAFNFIVNDSRKKPIWNVLMWTSLFLGNGVLLCFYSQEWYARQHCPLKNPTFLDYVRPRSWTCRYVF

SEQ ID NO: 8267 - protein, 1161 aa, Homo sapiens
MGQQVGRVGEAPGLQQPQPRGIRGSSAARPSGRRRDPAGRTTETGFNIFTQHEALHRPYGCDVEPQALNEAIRWSSKENLLGATESDPNLFVALYDFVASGDNTLSITKGEKLRVLGYNQNGEWSEVRSKNGQGWVPSNYITPVNSLEKHSWYHGPVSRSAAEYLLSSLINGSFLVRESESSPGQLSISLRYEGRVYHYRINTTADGKVYVTAESRFSTLAELVHHHSTVADGLVTTLHYPAPKCNKPTVYGVSPIHDKWEMERTDITMKHKLGGGQYGEVYVGVWKKYSLTVAVKTLKEDTMEVEEFLKEAAVMKEIKHPNLVQLLGVCTLEPPFYIVTEYMPYGNLLDYLRECNREEVTAVVLLYMATQISSAMEYLEKKNFIHRDLAARNCLVGENHVVKVADFGLSRLMTGDTYTAHAGAKFPIKWTAPESLAYNTFSIKSDVWAFGVLLWEIATYGMSPYPGIDLSQVYDLLEKGYRMEQPEGCPPKVYELMRACWKWSPADRPSFAETHQAFETMFHDSSISEEVAEELGRAASSSSVVPYLPRLPILPSKTRTLKKQVENKENIEGAQDATENSASSLAPGFIRGAQASSGSPALPRKQRDKSPSSLLEDAKETCFTRDRKGGFFSSFMKKRNAPTPPKRSSSFREMENQPHKKYELTGNFSSVASLQHADGFSFTPAQQEANLVPPKCYGGSFAQRNLCNDDGGGGGGSGTAGGGWSGITGFFTPRLIKKTLGLRAGKPTASDDTSKPFPRSNSTSSMSSGLPEQDRMAMTLPRNCQRSKLQLERTVSTSSQPEENVDRANDMLPKKSEESAAPSRERPKAKLLPRGATALPLRTPSGDLAITEKDPPGVGVAGVAAAPKGKEKNGGARLGMAGVPEDGEQPGWPSPAKAAPVLPTTHNHKVPVLISPTLKHTPADVQLIGTDSQGNKFKLLSEHQVTSSGDKDRPRRVKPKCAPPPPPVMRLLQHPSICSDPTEEPTALTAGQSTSETQEGGKKAALGAVPISGKAGRPVMPPPQVPLPTSSISPAKMANGTAGTKVALRKTKQAAEKISADKISKEALLECADLLSSALTEPVPNSQLVDTGHQLLDYCSGYVDCIPQTRNKFAFREAVSKLELSLQELQVSSAAAGVPGTNPVLNNLLSCVQEISDVVQR

SEQ ID NO: 8268 - protein, 153 aa, Homo sapiens
MLRGPWRQLWLFFLLLLPGAPEPRGASRPWEGTDEPGSAWAWPGFQRLQEQLRAAGALSKRYWTLFSCQVWPDDCDEDEEAATGPLGWRLPLLGQRYLDLLTTWYCSFKDCCPRGDCRISNNFTGKNFVARMLVENLYRDGLMSDCVRMFIAT

SEQ ID NO: 8269 - protein, 397 aa, Homo sapiens
MLRGPWRQLWLFFLLLLPGAPEPRGASRPWEGTDEPGSAWAWPGFQRLQEQLRAAGALSKRYWTLFSCQVWPDDCDEDEEAATGPLGWRLPLLGQRYLDLLTTWYCSFKDCCPRGDCRISNNFTGLEWDLNVRLHGQHLVQQLVLRTVRGYLETPQPEKALALSFHGWSGTGKNFVARMLVENLYRDGLMSDCVRMFIATFHFPHPKYVDLYKEQLMSQIRETQQLCHQTLFIFDEAEKLHPGLLEVLGPHLERRAPEGHRAESPWTIFLFLSNLRGDIINEVVLKLLKAGWSREEITMEHLEPHLQAEIVETIDNGFGHSRLVKENLIDYFIPFLPLEYRHVRLCARDAFLSQELLYKEETLDEIAQMMVYVPKEEQLFSSQGCKSISQRINYFLS

SEQ ID NO: 8270 - protein, 307 aa, Homo sapiens
MAALAPLPPLPAQFKSIQHHLRTAQEHDKRDPVVAYYCRLYAMQTGMKIDSKTPECRKFLSKLMDQLEALKKQLGDNEAITQEIVGCAHLENYALKMFLYADNEDRAGRFHKNMIKSFYTASLLIDVITVFGELTDENVKHRKYARWKATYIHNCLKNGETPQAGPVGIEEDNDIEENEDAGAASLPTQPTQPSSSSTYDPSNMPSGNYTGIQIPPGAHAPANTPAEVPHSTGVASNTIQPTPQTIPAIDPALFNTISQGDVRLTPEDFARAQKYCKYAGSALQYEDVSTAVQNLQKALKLLTTGRE

SEQ ID NO: 8271 - protein, 557 aa, Homo sapiens
MDLMNGQASSVNIAATASEKSSSSESLSDKGSELKKSFDAVVFDVLKVTPEEYAGQITLMDVPVFKAIQPDELSSCGWNKKEKYSSAPNAVAFTRRFNHVSFWVVREILHAQTLKIRAEVLSHYIKTAKKLYELNNLHALMAVVSGLQSAPIFRLTKTWALLSRKDKTTFEKLEYVMSKEDNYKRLRDYISSLKMTPCIPYLGIYLSDLTYIDSAYPSTGSILENEQRSNLMNNILRIISDLQQSCEYDIPMLPHVQKYLNSVQYIEELQKFVEDDNYKLSLKIEPGTSTPRSAASREDLVGPEVGASPQSGRKSVAAEGALLPQTPPSPRNLIPHGHRKCHSLGYNFIHKMNTAEFKSATFPNAGPRHLLDDSVMEPHAPSRGQAESSTLSSGISIGSSDGSELSEETSWPAFESSAESEDLAVHLYPGAVTIQGVLRRKTLLKEGKKPTVASWTKYWAALCGTQLFYYAAKSLKATERKHFKSTSNKNVSVIGWMVMMADDPEHPDLFLLTDSEKGNSYKFQAGNRMNAMLWFKHLSAACQSNKQQVPTNLMTFE

SEQ ID NO: 8272 - protein, 583 aa, Homo sapiens
MDLMNGQASSVNIAATASEKSSSSESLSDKGSELKKSFDAVVFDVLKVTPEEYAGQITLMDVPVFKAIQPDELSSCGWNKKEKYSSAPNAVAFTRRFNHVSFWVVREILHAQTLKIRAEVLSHYIKTAKKLYELNNLHALMAVVSGLQSAPIFRLTKTWALLSRKDKTTFEKLEYVMSKEDNYKRLRDYISSLKMTPCIPYLGIYLSDLTYIDSAYPSTGSILENEQRSNLMNNILRIISDLQQSCEYDIPMLPHVQKYLNSVQYIEELQKFVEDDNYKLSLKIEPGTSTPRSAASREDLVGPEVGASPQSGRKSVAAEGALLPQTPPSPRNLIPHGHRKCHSLGYNFIHKMNTAEFKSATFPNAGPRHLLDDSVMEPHAPSRGQAESSTLSSGISIGSSDGSELSEETSWPAFERNRLYHSLGPVTRVARNGYRSHMKASSSAESEDLAVHLYPGAVTIQGVLRRKTLLKEGKKPTVASWTKYWAALCGTQLFYYAAKSLKATERKHFKSTSNKNVSVIGWMVMMADDPEHPDLFLLTDSEKGNSYKFQAGNRMNAMLWFKHLSAACQSNKQQVPTNLMTFE

SEQ ID NO: 8273 - protein, 1280 aa, Homo sapiens
MELSPSSGGAAEALSWPEMFPALESDSPLPPEDLDAVVPVSGAVAGGMLDRILLESVCQQQSWVRVYDVKGPPTHRLSCGQSPYTETTTWERKYCILTDSQLVLLNKEKEIPVEGGQEQQTDSTKGRCLRRTVSVPSEGQFPEYPPEGATKLEVPAERSPRRRSISGTSTSEKPNSMDTANTSPFKVPGFFSKRLKGSIKRTKSQSKLDRNTSFRLPSLRSTDDRSRGLPKLKESRSHESLLSPCSTVECLDLGRGEPVSVKPLHSSILGQDFCFEVTYLSGSKCFSCNSASERDKWMENLRRTVQPNKDNCRRAENVLRLWIIEAKDLAPKKKYFCELCLDDTLFARTTSKTKADNIFWGEHFEFFSLPPLHSITVHIYKDVEKKKKKDKNNYVGLVNIPTASVTGRQFVEKWYPVSTPTPNKGKTGGPSIRIKSRFQTITILPMEQYKEFAEFVTSNYTMLCSVLEPVISVRNKEELACALVHILQSTGRAKDFLTDLVMSEVDRCGEHDVLIFRENTIATKSIEEYLKLVGQQYLHDALGEFIKALYESDENCEVDPSKCSSSELIDHQSNLKMCCELAFCKIINSYCVFPRELKEVFASWKQQCLNRGKQDISERLISASLFLRFLCPAIMSPSLFNLMQEYPDDRTSRTLTLIAKVIQNLANFAKFGNKEEYMAFMNDFLEHEWGGMKRFLLEISNPDTISNTPGFDGYIDLGRELSVLHSLLWEVVSQLDKATVAKLGPLPRVLADITKSLTNPTPIQQQLRRFTEHNSSPNVSGSLSSGLQKIFEDPTDSDLHKLKSPSQDNTDSYFRGKTLLLVQQASSQSMTYSEKDERESSLPNGRSVSLMDLQDTHAAQVEHASVMLDVPIRLTGSQLSITQVASIKQLRETQSTPQSAPQVRRPLHPALNQPGGLQPLSFQNPVYHLNNPIPAMPKASIDSSLENLSTASSRSQSNSEDFKLSGPSNSSMEDFTKRSTQSEDFSRRHTVPDRHIPLALPRQNSTGQAQIRKVDQGGLGARAKAPPSLPHSASLRSTGSMSVVSAALVAEPVQNGSRSRQQSSSSRESPVPKVRAIQRQQTQQVQSPVDSATMSPVERTAAWVLNNGQYEEDVEETEQNLDEAKHAEKYEQEITKLKERLRVSSRRLEEYERRLLVQEQQMQKLLLEYKARLEDSEERLRRQQEEKDSQMKSIISRLMAVEEELKKDHAEMQAVIDAKQKIIDAQEKRIVSLDSANTRLMSALTQVKERYSMQVRNGISPTNPTKLSITENGEFKNSSC

SEQ ID NO: 8274 - protein, 270 aa, Homo sapiens
MADHMMAMNHGRFPDGTNGLHHHPAHRMGMGQFPSPHHHQQQQPQHAFNALMGEHIHYGAGNMNATSGIRHAMGPGTVNGGHPPSALAPAARFNNSQFMGPPVASQGGSLPASMQLQKLNNQYFNHHPYPHNHYMPDLHPAAGHQMNGTNQHFRDCNPKHSGGSSTPGGSGGSSTPGGSGSSSGGGAGSSNSGGGSGSGNMPASVAHVPAAMLPPNVIDTDFIDEEVLMSLVIEMGLDRIKELPELWLGQNEFDFMTDFVCKQQPSRVSC

SEQ ID NO: 8275 - protein, 1228 aa, Homo sapiens
MALAGLCALLACCWGPAAVLATAAGDVDPSKELECKLKSITVSALPFLRENDLSIMHSPSASEPKLLFSVRNDFPGEMVVVDDLENTELPYFVLEISGNTEDIPLVRWRQQWLENGTLLFHIHHQDGAPSLPGQDPTEEPQHESAEEELRILHISVMGGMIALLLSILCLVMILYTRRRWCKRRRVPQPQKSASAEAANEIHYIPSVLIGGHGRESLRNARVQGHNSSGTLSIRETPILDGYEYDITDLRHHLQRECMNGGEDFASQVTRTLDSLQGCNEKSGMDLTPGSDNAKLSLMNKYKDNIIATSPVDSNHQQATLLSHTSSSQRKRINNKARAGSAFLNPEGDSGTEAENDPQLTFYTDPSRSRRRSRVGSPRSPVNKTTLTLISITSCVIGLVCSSHVNCPLVVKITLHVPEHLIADGSRFILLEGSQLDASDWLNPAQVVLFSQQNSSGPWAMDLCARRLLDPCEHQCDPETGECLCYEGYMKDPVHKHLCIRNEWGTNQGPWPYTIFQRGFDLVLGEQPSDKIFRFTYTLGEGMWLPLSKSFVIPPAELAINPSAKCKTDMTVMEDAVEVREELMTSSSFDSLEVLLDSFGPVRDCSKDNGGCSKNFRCISDRKLDSTGCVCPSGLSPMKDSSGCYDRHIGVDCSDGFNGGCEQLCLQQMAPFPDDPTLYNILMFCGCIEDYKLGVDGRSCQLITETCPEGSDCGESRELPMNQTLFGEMFFGYNNHSKEVAAGQVLKGTFRQNNFARGLDQQLPDGLVVATVPLENQCLEEISEPTPDPDFLTGMVNFSEVSGYPVLQHWKVRSVMYHIKLNQVAISQALSNALHSLDGATSRADFVALLDQFGNHYIQEAIYGFEESCSIWYPNKQVQRRLWLEYEDISKGNSPSDESEERERDPKVLTFPEYITSLSDSGTKHMAAGVRMECHSKGRCPSSCPLCHVTSSPDTPAEPVLLEVTKAAPIYELVTNNQTQRLLQEATMSSLWCSGTGDVIEDWCRCDSTAFGADGLPTCAPLPQPVLRLSTVHEPSSTLVVLEWEHSEPPIGVQIVDYLLRQEKVTDRMDHSKVETETVLSFVDDIISGAKSPCAMPSQVPDKQLTTISLIIRCLEPDTIYMFTLWGVDNTGRRSRPSDVIVKTPCPVVDDVKAQEIADKIYNLFNGYTSGKEQQTAYNTLLDLGSPTLHRVLYHYNQHYESFGEFTWRCEDELGPRLPACWDSQRSCR

SEQ ID NO: 8276 - protein, 543 aa, Homo sapiens
MPNPKNSKGGRKNKRANSSGDEQENGAGALAAAGAAGAAAGGALAAAAGCGAAAAGAPGAGGAAGAGGAGTGAANAAAAAGAAAAGDAKNEAPCATPLICSFGRPVDLEKDDYQKVVCNNEHCPCSTWMHLQCFYEWESSILVQFNCIGRARSWNEKQCRQNMWTKKGYDLAFRFCSCRCGQGHLKKDTDWYQVKRMQDEKKKKSGSEKNTGRPPGEAAEEAKKCRPPNKPQKGPSHDLPRRHSMDRQNSQEKAVGAAAYGARSPGGSPGQSPPTGYSILSPAHFSGPRSSRYLGEFLKNAIHLEPHKKAMAGGHVFRNAHFDYSPAGLAVHRGGHFDTPVQFLRRLDLSELLTHIPRHKLNTFHVRMEDDAQVGQGEDLRKFILAALSASHRNVVNCALCHRALPVFEQFPLVDGTLFLSPSRHDEIEYDVPCHLQGRLMHLYAVCVDCLEGVHKIICIKCKSRWDGSWHQLGTMYTYDILAASPCCQARLNCKHCGKPVIDVRIGMQYFSEYSNVQQCPHCGNLDYHFVKPFSSFKVLEAY

SEQ ID NO: 8277 - protein, 81 aa, Homo sapiens
MNVDHEVNLLVEEIHRLGSKNADGKLSVKFGVLFRDDKCANLFEALVGTLKAAKRRKIVTYPGELLLQGVHDDVDIILLQD

SEQ ID NO: 8278 - protein, 827 aa, Homo sapiens
MMCLKILRISLAILAGWALCSANSELGWTRKKSLVEREHLNQVLLEGERCWLGAKVRRPRASPQHHLFGVYPSRAGNYLRPYPVGEQEIHHTGRSKPDTEGNAVSLVPPDLTENPAGLRGAVEEPAAPWVGDSPIGQSELLGDDDAYLGNQRSKESLGEAGIQKGSAMAATTTTAIFTTLNEPKPETQRRGWAKSRQRRQVWKRRAEDGQGDSGISSHFQPWPKHSLKHRVKKSPPEESNQNGGEGSYREAETFNSQVGLPILYFSGRRERLLLRPEVLAEIPREAFTVEAWVKPEGGQNNPAIIAGVFDNCSHTVSDKGWALGIRSGKDKGKRDARFFFSLCTDRVKKATILISHSRYQPGTWTHVAATYDGRHMALYVDGTQVASSLDQSGPLNSPFMASCRSLLLGGDSSEDGHYFRGHLGTLVFWSTALPQSHFQHSSQHSSGEEEATDLVLTASFEPVNTEWVPFRDEKYPRLEVLQGFEPEPEILSPLQPPLCGQTVCDNVELISQYNGYWPLRGEKVIRYQVVNICDDEGLNPIVSEEQIRLQHEALNEAFSRYNISWQLSVHQVHNSTLRHRVVLVNCEPSKIGNDHCDPECEHPLTGYDGGDCRLQGRCYSWNRRDGLCHVECNNMLNDFDDGDCCDPQVADVRKTCFDPDSPKRAYMSVKELKEALQLNSTHFLNIYFASSVREDLAGAATWPWDKDAVTHLGGIVLSPAYYGMPGHTDTMIHEVGHVLGLYHVFKGVSERESCNDPCKETVPSMETGDLCADTAPTPKSELCREPEPTSDTCGFTRFPGAPFTNYMSYTGITTVLFCFLLRIHGGL

SEQ ID NO: 8279 - protein, 1791 aa, Homo sapiens
MMCLKILRISLAILAGWALCSANSELGWTRKKSLVEREHLNQVLLEGERCWLGAKVRRPRASPQHHLFGVYPSRAGNYLRPYPVGEQEIHHTGRSKPDTEGNAVSLVPPDLTENPAGLRGAVEEPAAPWVGDSPIGQSELLGDDDAYLGNQRSKESLGEAGIQKGSAMAATTTTAIFTTLNEPKPETQRRGWAKSRQRRQVWKRRAEDGQGDSGISSHFQPWPKHSLKHRVKKSPPEESNQNGGEGSYREAETFNSQVGLPILYFSGRRERLLLRPEVLAEIPREAFTVEAWVKPEGGQNNPAIIAGVFDNCSHTVSDKGWALGIRSGKDKGKRDARFFFSLCTDRVKKATILISHSRYQPGTWTHVAATYDGRHMALYVDGTQVASSLDQSGPLNSPFMASCRSLLLGGDSSEDGHYFRGHLGTLVFWSTALPQSHFQHSSQHSSGEEEATDLVLTASFEPVNTEWVPFRDEKYPRLEVLQGFEPEPEILSPLQPPLCGQTVCDNVELISQYNGYWPLRGEKVIRYQVVNICDDEGLNPIVSEEQIRLQHEALNEAFSRYNISWQLSVHQVHNSTLRHRVVLVNCEPSKIGNDHCDPECEHPLTGYDGGDCRLQGRCYSWNRRDGLCHVECNNMLNDFDDGDCCDPQVADVRKTCFDPDSPKRAYMSVKELKEALQLNSTHFLNIYFASSVREDLAGAATWPWDKDAVTHLGGIVLSPAYYGMPGHTDTMIHEVGHVLGLYHVFKGVSERESCNDPCKETVPSMETGDLCADTAPTPKSELCREPEPTSDTCGFTRFPGAPFTNYMSYTDDNCTDNFTPNQVARMHCYLDLVYQQWTESRKPTPIPIPPMVIGQTNKSLTIHWLPPISGVVYDRASGSLCGACTEDGTFRQYVHTASSRRVCDSSGYWTPEEAVGPPDVDQPCEPSLQAWSPEVHLYHMNMTVPCPTEGCSLELLFQHPVQADTLTLWVTSFFMESSQVLFDTEILLENKESVHLGPLDTFCDIPLTIKLHVDGKVSGVKVYTFDERIEIDAALLTSQPHSPLCSGCRPVRYQVLRDPPFASGLPVVVTHSHRKFTDVEVTPGQMYQYQVLAEAGGELGEASPPLNHIHGAPYCGDGKVSERLGEECDDGDLVSGDGCSKVCELEEGFNCVGEPSLCYMYEGDGICEPFERKTSIVDCGIYTPKGYLDQWATRAYSSHEDKKKCPVSLVTGEPHSLICTSYHPDLPNHRPLTGWFPCVASENETQDDRSEQPEGSLKKEDEVWLKVCFNRPGEARAIFIFLTTDGLVPGEHQQPTVTLYLTDVRGSNHSLGTYGLSCQHNPLIINVTHHQNVLFHHTTSVLLNFSSPRVGISAVALRTSSRIGLSAPSNCISEDEGQNHQGQSCIHRPCGKQDSCPSLLLDHADVVNCTSIGPGLMKCAITCQRGFALQASSGQYIRPMQKEILLTCSSGHWDQNVSCLPVDCGVPDPSLVNYANFSCSEGTKFLKRCSISCVPPAKLQGLSPWLTCLEDGLWSLPEVYCKLECDAPPIILNANLLLPHCLQDNHDVGTICKYECKPGYYVAESAEGKVRNKLLKIQCLEGGIWEQGSCIPVVCEPPPPVFEGMYECTNGFSLDSQCVLNCNQEREKLPILCTKEGLWTQEFKLCENLQGECPPPPSELNSVEYKCEQGYGIGAVCSPLCVIPPSDPVMLPENITADTLEHWMEPVKVQSIVCTGRRQWHPDPVLVHCIQSCEPFQADGWCDTINNRAYCHYDGGDCCSSTLSSKKVIPFAADCDLDECTCRDPKAEENQ

SEQ ID NO: 8280 - protein, 731 aa, Homo sapiens
MSGSRQAGSGSAGTSPGSSAASSVTSASSSLSSSPSPPSVAVSAAALVSGGVAQAAGSGGLGGPVRPVLVAPAVSGSGGGAVSTGLSRHSCAARPSAGVGGSSSSLGSGSRKRPLLAPLCNGLINSYEDKSNDFVCPICFDMIEEAYMTKCGHSFCYKCIHQSLEDNNRCPKCNYVVDNIDHLYPNFLVNELILKQKQRFEEKRFKLDHSVSSTNGHRWQIFQDWLGTDQDNLDLANVNLMLELLVQKKKQLEAESHAAQLQILMEFLKVARRNKREQLEQIQKELSVLEEDIKRVEEMSGLYSPVSEDSTVPQFEAPSPSHSSIIDSTEYSQPPGFSGSSQTKKQPWYNSTLASRRKRLTAHFEDLEQCYFSTRMSRISDDSRTASQLDEFQECLSKFTRYNSVRPLATLSYASDLYNGSSIVSSIEFDRDCDYFAIAGVTKKIKVYEYDTVIQDAVDIHYPENEMTCNSKISCISWSSYHKNLLASSDYEGTVILWDGFTGQRSKVYQEHEKRCWSVDFNLMDPKLLASGSDDAKVKLWSTNLDNSVASIEAKANVCCVKFSPSSRYHLAFGCADHCVHYYDLRNTKQPIMVFKGHRKAVSYAKFVSGEEIVSASTDSQLKLWNVGKPYCLRSFKGHINEKNFVGLASNGDYIACGSENNSLYLYYKGLSKTLLTFKFDTVKSVLDKDRKEDDTNEFVSAVCWRALPDGESNVLIAANSQGTIKVLELV

SEQ ID NO: 8281 - protein, 228 aa, Homo sapiens
MASEELQKDLEEVKVLLEKATRKRVRDALTAEKSKIETEIKNKMQQKSQKKAELLDNEKPAAVVAPITTGYTVKISNYGWDQSDKFVKIYITLTGVHQVPTENVQVHFTERSFDLLVKNLNGKSYSMIVNNLLKPISVEGSSKKVKTDTVLILCRKKVENTRWDYLTQVEKECKEKEKPSYDTETDPSEGLMNVLKKIYEDGDDDMKRTINKAWVESREKQAKGDTEF

SEQ ID NO: 8282 - protein, 116 aa, Homo sapiens
MAEPLQPDPGAAEDAAAQAVETPGWKAPEDAGPQPGSYEIRHYGPAKWVSTSVESMDWDSAIQTGFTKLNSYIQGKNEKEMKIKMTAPVTSYVEPGSGPFSLSMDFLVPKRIKNNF

SEQ ID NO: 8283 - protein, 464 aa, Homo sapiens
MYSNVIGTVTSGKRKVYLLSLLLIGFWDCVTCHGSPVDICTAKPRDIPMNPMCIYRSPEKKATEDEGSEQKIPEATNRRVWELSKANSRFATTFYQHLADSKNDNDNIFLSPLSISTAFAMTKLGACNDTLQQLMEVFKFDTISEKTSDQIHFFFAKLNCRLYRKANKSSKLVSANRLFGDKSLTFNETYQDISELVYGAKLQPLDFKENAEQSRAAINKWVSNKTEGRITDVIPSEAINELTVLVLVNTIYFKGLWKSKFSPENTRKELFYKADGESCSASMMYQEGKFRYRRVAEGTQVLELPFKGDDITMVLILPKPEKSLAKVEKELTPEVLQEWLDELEEMMLVVHMPRFRIEDGFSLKEQLQDMGLVDLFSPEKSKLPGIVAEGRDDLYVSDAFHKAFLEVNEEGSEAAASTAVVIAGRSLNPNRVTFKANRPFLVFIREVPLNTIIFMGRVANPCVK

SEQ ID NO: 8284 - protein, 503 aa, Homo sapiens
MEKGGNIQLEIPDFSNSVLSHLNQLRMQGRLCDIVVNVQGQAFRAHKVVLAASSPYFRDHMSLNEMSTVSISVIKNPTVFEQLLSFCYTGRICLQLADIISYLTAASFLQMQHIIDKCTQILEGIHFKINVAEVEAELSQTRTKHQERPPESHRVTPNLNRSLSPRHNTPKGNRRGQVSAVLDIRELSPPEESTSPQIIEPSSDVESREPILRINRAGQWYVETGVADRGGRSDDEVRVLGAVHIKTENLEEWLGPENQPSGEDGSSAEEVTAMVIDTTGHGSVGQENYTLGSSGAKVARPTSSEVDRFSPSGSVVPLTERHRARSESPGRMDEPKQPSSQVEESAMMGVSGYVEYLREQEVSERWFRYNPRLTCIYCAKSFNQKGSLDRHMRLHMGITPFVCRMCGKKYTRKDQLEYHIRKHTGNKPFHCHVCGKSFPFQAILNQHFRKNHPGCIPLEGPHSISPETTVTSRGQAEEESPSQEETVAPGEAVQGSVSTTGPD

SEQ ID NO: 8285 - protein, 297 aa, Homo sapiens
MYAQPVTNTKEVKWQKVLYERQPFPDNYVDRRFLEELRKNIHARKYQYWAVVFESSVVIQQLCSVCVFVVIWWYMDEGLLAPHWLLGTGLASSLIGYVLFDLIDGGEGRKKSGQTRWADLKSALVFITFTYGFSPVLKTLTESVSTDTIYAMSVFMLLGHLIFFDYGANAAIVSSTLSLNMAIFASVCLASRLPRSLHAFIMVTFAIQIFALWPMLQKKLKACTPRSYVGVTLLFAFSAVGGLLSISAVGAVLFALLLMSISCLCPFYLIRLQLFKENIHGPWDEAEIKEDLSRFLS

SEQ ID NO: 8286 - protein, 489 aa, Homo sapiens
MALLFLLPLVMQGVSRAEMGTADLGPSSVPTPTNVTIESYNMNPIVYWEYQIMPQVPVFTVEVKNYGVKNSEWIDACINISHHYCNISDHVGDPSNSLWVRVKARVGQKESAYAKSEEFAVCRDGKIGPPKLDIRKEEKQIMIDIFHPSVFVNGDEQEVDYDPETTCYIRVYNVYVRMNGSEIQYKILTQKEDDCDEIQCQLAIPVSSLNSQYCVSAEGVLHVWGVTTEKSKEVCITIFNSSIKGSLWIPVVAALLLFLVLSLVFICFYIKKINPLKEKSIILPKSLISVVRSATLETKPESKYVSLITSYQPFSLEKEVVCEEPLSPATVPGMHTEDNPGKVEHTEELSSITEVVTTEENIPDVVPGSHLTPIERESSSPLSSNQSEPGSIALNSYHSRNCSESDHSRNGFDTDSSCLESHSSLSDSEFPPNNKGEIKTEGQELITVIKAPTSFGYDKPHVLVDLLVDDSGKESLIGYRPTEDSKEFS

SEQ ID NO: 8287 - protein, 209 aa, Homo sapiens
MRAPGRPALRPLPLPPLLLLLLAAPWGRAVPCVSGGLPKPANITFLSINMKNVLQWTPPEGLQGVKVTYTVQYFIYGQKKWLNKSECRNINRTYCDLSAETSDYEHQYYAKVKAIWGTKCSKWAESGRFYPFLETQIGPPEVALTTDEKSISVVLTAPEKWKRNPEDLPVSMQQIYSNLKYNVSVLNTKSNRTVSLKWNGAYIHVPLCS

SEQ ID NO: 8288 - protein, 532 aa, Homo sapiens
MGKKVAIIGAGVSGLASIRSCLEEGLEPTCFEKSNDIGGLWKFSDHAEEGRASIYKSVFSNSSKEMMCFPDFPFPDDFPNFMHNSKIQEYIIAFAKEKNLLKYIQFKTFVSSVNKHPDFATTGQWDVTTERDGKKESAVFDAVMVCSGHHVYPNLPKESFPGLNHFKGKCFHSRDYKEPGVFNGKRVLVVGLGNSGCDIATELSRTAEQVMISSRSGSWVMSRVWDNGYPWDMLLVTRFGTFLKNNLPTAISDWLYVKQMNARFKHENYGLMPLNGVLRKEPVFNDELPASILCGIVSVKPNVKEFTETSAIFEDGTIFEGIDCVIFATGYSFAYPFLDESIIKSRNNEIILFKGVFPPLLEKSTIAVIGFVQSLGAAIPTVDLQSRWAAQVIKGTCTLPSMEDMMNDINEKMEKKRKWFGKSETIQTDYIVYMDELSSFIGAKPNIPWLFLTDPKLAMEVYFGPCSPYQFRLVGPGQWPGARNAILTQWDRSLKPMQTRVVGRLQKPCFFFHWLKLFAIPILLIAVFLVLT

SEQ ID NO: 8289 - protein, 217 aa, Homo sapiens
MTSSYGHVLERQPALGGRLDSPGNLDTLQAKKNFSVSHLLDLEEAGDMVAAQADENVGEAGRSLLESPGLTSGSDTPQQDNDQLNSEEKKKRKQRRNRTTFNSSQLQALERVFERTHYPDAFVREDLARRVNLTEARVQVWFQNRRAKFRRNERAMLANKNASLLKSYSGDVTAVEQPIVPRPAPRPTDYLSWGTASPYRSSSLPRCCLHEGLHNGF

SEQ ID NO: 8290 - protein, 394 aa, Homo sapiens
MSWAAVLAVAAARFGHFWGCRWPGPMAQGWAGFSEEELRRLKQTKDPFEPQRRLPAKKSRQQLQREKALVEQSQKLGLQDGSTSLLPEQLLSAPKQRVNVQKPPFSSPTLPSHFTLTSPVGDGQPQGIESQPKELGLENSHDGHNNVEILPPKPDCKLEKKKVELQEKSRWEVLQQEQRLMEEKNKRKKALLAKAIAERSKRTQAETMKLKRIQKELQALDDMVSADIGILRNRIDQASLDYSYARKRFDRAEAEYIAAKLDIQRKTEIKEQLTEHLCTIIQQNELRKAKKLEELMQQLDVEADEETLELEVEVERLLHEQEVESRRPVVRLERPFQPAEESVTLEFAKENRKCQEQAVSPKVDDQCGNSSSIPFLSPNCPNQEGNDISAALAT

SEQ ID NO: 8291 - protein, 752 aa, Homo sapiens
MGDPMLGERKECQKIIRLKSLNANTDITSLARKVVEECKLIHPSKLNEVEQLLYYLQNRRDSLSGKEKKEKSSKPKDPPPFEGMEIDEVANINDMDEYIELLYEDIPDKVRGSALILQLARNPDNLEELLLNETALGALARVLREDWKQSVELATNIIYIFFCFSSFSQFHGLITHYKIGALCMNIIDHELKRHELWQEELSKKKKAVDEDPENQTLRKDYEKTFKKYQGLVVKQEQLLRVALYLLLNLAEDTRTELKMRNKNIVHMLVKALDRDNFELLILVVSFLKKLSIFMENKNDMVEMDIVEKLVKMIPCEHEDLLNITLRLLLNLSFDTGLRNKMVQVGLLPKLTALLGNDNYKQIAMCVLYHISMDDRFKSMFAYTDCIPQLMKMLFECSDERIDLELISFCINLAANKRNVQLICEGNGLKMLMKRALKFKDPLLMKMIRNISQHDGPTKNLFIDYVGDLAAQISNDEEEEFVIECLGTLANLTIPDLDWELVLKEYKLVPYLKDKLKPGAAEDDLVLEVVIMIGTVSMDDSCAALLAKSGIIPALIELLNAQQEDDEFVCQIIYVFYQMVFHQATRDVIIKETQAPAYLIDLMHDKNNEIRKVCDNTLDIIAEYDEEWAKKIQSEKFRWHNSQWLEMVESRQMDESEQYLYGDDRIEPYIHEGDILERPDLFYNSDGLIASEGAISPDFFNDYHLQNGDVVGQHSFPGSLGMDGFGQPVGILGRPATAYGFRPDEPYYYGYGS

SEQ ID NO: 8292 - protein, 748 aa, Homo sapiens
MQGEDARYLKSIRLKSLNANTDITSLARKVVEECKLIHPSKLNEVEQLLYYLQNRRDSLSGKEKKEKSSKPKDPPPFEGMEIDEVANINDMDEYIELLYEDIPDKVRGSALILQLARNPDNLEELLLNETALGALARVLREDWKQSVELATNIIYIFFCFSSFSQFHGLITHYKIGALCMNIIDHELKRHELWQEELSKKKKAVDEDPENQTLRKDYEKTFKKYQGLVVKQEQLLRVALYLLLNLAEDTRTELKMRNKNIVHMLVKALDRDNFELLILVVSFLKKLSIFMENKNDMVEMDIVEKLVKMIPCEHEDLLNITLRLLLNLSFDTGLRNKMVQVGLLPKLTALLGNDNYKQIAMCVLYHISMDDRFKSMFAYTDCIPQLMKMLFECSDERIDLELISFCINLAANKRNVQLICEGNGLKMLMKRALKFKDPLLMKMIRNISQHDGPTKNLFIDYVGDLAAQISNDEEEEFVIECLGTLANLTIPDLDWELVLKEYKLVPYLKDKLKPGAAEDDLVLEVVIMIGTVSMDDSCAALLAKSGIIPALIELLNAQQEDDEFVCQIIYVFYQMVFHQATRDVIIKETQAPAYLIDLMHDKNNEIRKVCDNTLDIIAEYDEEWAKKIQSEKFRWHNSQWLEMVESRQMDESEQYLYGDDRIEPYIHEGDILERPDLFYNSDGLIASEGAISPDFFNDYHLQNGDVVGQHSFPGSLGMDGFGQPVGILGRPATAYGFRPDEPYYYGYGS

SEQ ID NO: 8293 - protein, 742 aa, Homo sapiens
MGSENSALKSYTLREPPFTLPSGLAVYPAVLQDGKFASVFVYKRENEDKVNKAAKHLKTLRHPCLLRFLSCTVEADGIHLVTERVQPLEVALETLSSAEVCAGIYDILLALIFLHDRGHLTHNNVCLSSVFVSEDGHWKLGGMETVCKVSQATPEFLRSIQSIRDPASIPPEEMSPEFTTLPECHGHARDAFSFGTLVESLLTILNEQVSADVLSSFQQTLHSTLLNPIPKCRPALCTLLSHDFFRNDFLEVVNFLKSLTLKSEEEKTEFFKFLLDRVSCLSEELIASRLVPLLLNQLVFAEPVAVKSFLPYLLGPKKDHAQGETPCLLSPALFQSRVIPVLLQLFEVHEEHVRMVLLSHIEAYVEHFTQEQLKKVILPQVLLGLRDTSDSIVAITLHSLAVLVSLLGPEVVVGGERTKIFKRTAPSFTKNTDLSLEDSPMCVVCSHHSQISPILENPFSSIFPKCFFSGSTPINSKKHIQRDYYNTLLQTGDPFSQPIKFPINGLSDVKNTSEDSENFPSSSKKSEEWPDWSEPEEPENQTVNIQIWPREPCDDVKSQCTTLDVEESSWDDCEPSSLDTKVNPGGGITATKPVTSGEQKPIPALLSLTEESMPWKSSLPQKISLVQRGDDADQIEPPKVSSQERPLKVPSELGLGEEFTIQVKKKPVKDPEMDWFADMIPEIKPSAAFLILPELRTEMVPKKDDVSPVMQFSSKFAAAEITEGEAEGWEEEGELNWEDNNW

SEQ ID NO: 8294 - protein, 688 aa, Homo sapiens
MGSENSALKSYTLREPPFTLPSGLAVYPAVLQDGKFASVFVYKRENEDKVNKAAKHLKTLRHPCLLRFLSCTVEADGIHLVTERVQPLEVALETLSSAEVCAGIYDILLALIFLHDRGHLTHNNVCLSSVFVSEDGHWKLGGMETVCKVSQATPEFLRSIQSIRDPASIPPEEMSPEFTTLPECHGHARDAFSFGTLVESLLTILNEQVSADVLSSFQQTLHSTLLNPIPKCRPALCTLLSHDFFRNDFLEVVNFLKSLTLKSEEEKTEFFKFLLDRVSCLSEELIASRLVPLLLNQLVFAEPVAVKSFLPYLLGPKKDHAQGETPCLLSPALFQSRVIPVLLQLFEVHEEHVRMVLLSHIEAYVEHFTQEQLKKVILPQVLLGLRDTSDSIVAITLHSLAVLVSLLGPEVVVGGERTKIFKRTAPSFTKNTDLSLEGDPFSQPIKFPINGLSDVKNTSEDSENFPSSSKKSEEWPDWSEPEEPENQTVNIQIWPREPCDDVKSQCTTLDVEESSWDDCEPSSLDTKVNPGGGITATKPVTSGEQKPIPALLSLTEESMPWKSSLPQKISLVQRGDDADQIEPPKVSSQERPLKVPSELGLGEEFTIQVKKKPVKDPEMDWFADMIPEIKPSAAFLILPELRTEMVPKKDDVSPVMQFSSKFAAAEITEGEAEGWEEEGELNWEDNNW

SEQ ID NO: 8295 - protein, 484 aa, Homo sapiens
MIASQFLSALTLVLLIKESGAWSYNTSTEAMTYDEASAYCQQRYTHLVAIQNKEEIEYLNSILSYSPSYYWIGIRKVNNVWVWVGTQKPLTEEAKNWAPGEPNNRQKDEDCVEIYIKREKDVGMWNDERCSKKKLALCYTAACTNTSCSGHGECVETINNYTCKCDPGFSGLKCEQIVNCTALESPEHGSLVCSHPLGNFSYNSSCSISCDRGYLPSSMETMQCMSSGEWSAPIPACNVVECDAVTNPANGFVECFQNPGSFPWNTTCTFDCEEGFELMGAQSLQCTSSGNWDNEKPTCKAVTCRAVRQPQNGSVRCSHSPAGEFTFKSSCNFTCEEGFMLQGPAQVECTTQGQWTQQIPVCEVVKCSSLAVPGKINMSCSGEPVFGTVCKFACPEGWTLNGSAARTCGATGHWSGLLPTCEAPTESNIPLVAGLSAAGLSLLTLAPFLLWLRKCLRKAKKFVPASSCQSLESDGSYQKPSYIL

SEQ ID NO: 8296 - protein, 485 aa, Homo sapiens
MIASQFLSALTLVLLIKESGAWSYNTSTEAMTYDEASAYCQQRYTHLVAIQNKEEIEYLNSILSYSPSYYWIGIRKVNNVWVWVGTQKPLTEEAKNWAPGEPNNRQKDEDCVEIYIKREKDVGMWNDERCSKKKLALCYTAACTNTSCSGHGECVETINNYTCKCDPGFSGLKCEQMVECDAVTNPANGFVECFQNPGSFPWNTTCTFDCEEGFELMGAQSLQCTSSGNWDNEKPTCKAVTCRAVRQPQNGSVRCSHSPAGEFTFKSSCNFTCEEGFMLQGPAQVECTTQGQWTQQIPVCEAVRCDAVHQPPKGLVRCAHSPIGEFTYKSSCAFSCEEGFELHGSTQLECTSQGQWTEEVPSCQVVKCSSLAVPGKINMSCSGEPVFGTVCKFACPEGWTLNGSAARTCGATGHWSGLLPTCEAPTESNIPLVAGLSAAGLSLLTLAPFLLWLRKCLRKAKKFVPASSCQSLESDGSYQKPSYIL

SEQ ID NO: 8297 - protein, 547 aa, Homo sapiens
MIASQFLSALTLVLLIKESGAWSYNTSTEAMTYDEASAYCQQRYTHLVAIQNKEEIEYLNSILSYSPSYYWIGIRKVNNVWVWVGTQKPLTEEAKNWAPGEPNNRQKDEDCVEIYIKREKDVGMWNDERCSKKKLALCYTAACTNTSCSGHGECVETINNYTCKCDPGFSGLKCEQIVNCTALESPEHGSLVCSHPLGNFSYNSSCSISCDRGYLPSSMETMQCMSSGEWSAPIPACNVVECDAVTNPANGFVECFQNPGSFPWNTTCTFDCEEGFELMGAQSLQCTSSGNWDNEKPTCKAVTCRAVRQPQNGSVRCSHSPAGEFTFKSSCNFTCEEGFMLQGPAQVECTTQGQWTQQIPVCEAVRCDAVHQPPKGLVRCAHSPIGEFTYKSSCAFSCEEGFELHGSTQLECTSQGQWTEEVPSCQVVKCSSLAVPGKINMSCSGEPVFGTVCKFACPEGWTLNGSAARTCGATGHWSGLLPTCEAPTESNIPLVAGLSAAGLSLLTLAPFLLWLRKCLRKAKKFVPASSCQSLESDGSYQKPSYIL

SEQ ID NO: 8298 - protein, 547 aa, Homo sapiens
MIASQFLSALTLVLLIKESGAWSYNTSTEAMTYDEASAYCQQRYTHLVAIQNKEEIEYLNSILSYSPSYYWIGIRKVNNVWVWVGTQKPLTEEAKNWAPGEPNNRQKDEDCVEIYIKREKDVGMWNDERCSKKKLALCYTAACTNTSCSGHGECVETINNYTCKCDPGFSGLKCEQIVNCTALESPEHGSLVCSHPLGNFSYNSSCSISCDRGYLPSSMETMQCMSSGEWSAPIPACNVVECDAVTNPANGFVECFQNPGSFPWNTTCTFDCEEGFELMGAQSLQCTSSGNWDNEKPTCKAVTCRAVRQPQNGSVRCSHSPAGEFTFKSSCNFTCEEGFMLQGPAQVECTTQGQWTQQIPVCEAFQCTALSNPERGYMNCLPSASGSFRYGSSCEFSCEQGFVLKGSKRLQCGPTGEWDNEKPTCEVVKCSSLAVPGKINMSCSGEPVFGTVCKFACPEGWTLNGSAARTCGATGHWSGLLPTCEAPTESNIPLVAGLSAAGLSLLTLAPFLLWLRKCLRKAKKFVPASSCQSLESDGSYQKPSYIL

SEQ ID NO: 8299 - protein, 2229 aa, Homo sapiens
MFPGCPRLWVLVVLGTSWVGWGSQGTEAAQLRQFYVAAQGISWSYRPEPTNSSLNLSVTSFKKIVYREYEPYFKKEKPQSTISGLLGPTLYAEVGDIIKVHFKNKADKPLSIHPQGIRYSKLSEGASYLDHTFPAEKMDDAVAPGREYTYEWSISEDSGPTHDDPPCLTHIYYSHENLIEDFNSGLIGPLLICKKGTLTEGGTQKTFDKQIVLLFAVFDESKSWSQSSSLMYTVNGYVNGTMPDITVCAHDHISWHLLGMSSGPELFSIHFNGQVLEQNHHKVSAITLVSATSTTANMTVGPEGKWIISSLTPKHLQAGMQAYIDIKNCPKKTRNLKKITREQRRHMKRWEYFIAAEEVIWDYAPVIPANMDKKYRSQHLDNFSNQIGKHYKKVMYTQYEDESFTKHTVNPNMKEDGILGPIIRAQVRDTLKIVFKNMASRPYSIYPHGVTFSPYEDEVNSSFTSGRNNTMIRAVQPGETYTYKWNILEFDEPTENDAQCLTRPYYSDVDIMRDIASGLIGLLLICKSRSLDRRGIQRAADIEQQAVFAVFDENKSWYLEDNINKFCENPDEVKRDDPKFYESNIMSNFTLSAINGYVPESITTLGFCFDDTVQWHFCSVGTQNEILTIHFTGHSFIYGKRHEDTLTLFPMRGESVTVTMDNVGTWMLTSMNSSPRSKKLRLKFRDVKCIPDDDEDSYEIFEPPESTVMATRKMHDRLEPEDEESDADYDYQNRLAAALGIRSFRNSSLNQEEEEFNLTALALENGTEFVSSNTDIIVGSNYSSPSNISKFTVNNLAEPQKAPSHQQATTAGSPLRHLIGKNSVLNSSTAEHSSPYSEDPIEDPLQPDVTGIRLLSLGAGEFKSQEHAKHKGPKVERDQAAKHRFSWMKLLAHKVGRHLSQDTGSPSGMRPWEDLPSQDTGSPSRMRPWKDPPSDLLLLKQSNSSKILVGRWHLASEKGSYEIIQDTDEDTAVNNWLISPQNASRAWGESTPLANKPGKQSGHPKFPRVRHKSLQVRQDGGKSRLKKSQFLIKTRKKKKEKHTHHAPLSPRTFHPLRSEAYNTFSERRLKHSLVLHKSNETSLPTDLNQTLPSMDFGWIASLPDHNQNSSNDTGQASCPPGLYQTVPPEEHYQTFPIQDPDQMHSTSDPSHRSSSPELSEMLEYDRSHKSFPTDISQMSPSSEHEVWQTVISPDLSQVTLSPELSQTNLSPDLSHTTLSPELIQRNLSPALGQMPISPDLSHTTLSPDLSHTTLSLDLSQTNLSPELSQTNLSPALGQMPLSPDLSHTTLSLDFSQTNLSPELSHMTLSPELSQTNLSPALGQMPISPDLSHTTLSLDFSQTNLSPELSQTNLSPALGQMPLSPDPSHTTLSLDLSQTNLSPELSQTNLSPDLSEMPLFADLSQIPLTPDLDQMTLSPDLGETDLSPNFGQMSLSPDLSQVTLSPDISDTTLLPDLSQISPPPDLDQIFYPSESSQSLLLQEFNESFPYPDLGQMPSPSSPTLNDTFLSKEFNPLVIVGLSKDGTDYIEIIPKEEVQSSEDDYAEIDYVPYDDPYKTDVRTNINSSRDPDNIAAWYLRSNNGNRRNYYIAAEEISWDYSEFVQRETDIEDSDDIPEDTTYKKVVFRKYLDSTFTKRDPRGEYEEHLGILGPIIRAEVDDVIQVRFKNLASRPYSLHAHGLSYEKSSEGKTYEDDSPEWFKEDNAVQPNSSYTYVWHATERSGPESPGSACRAWAYYSAVNPEKDIHSGLIGPLLICQKGILHKDSNMPMDMREFVLLFMTFDEKKSWYYEKKSRSSWRLTSSEMKKSHEFHAINGMIYSLPGLKMYEQEWVRLHLLNIGGSQDIHVVHFHGQTLLENGNKQHQLGVWPLLPGSFKTLEMKASKPGWWLLNTEVGENQRAGMQTPFLIMDRDCRMPMGLSTGIISDSQIKASEFLGYWEPRLARLNNGGSYNAWSVEKLAAEFASKPWIQVDMQKEVIITGIQTQGAKHYLKSCYTTEFYVAYSSNQINWQIFKGNSTRNVMYFNGNSDASTIKENQFDPPIVARYIRISPTRAYNRPTLRLELQGCEVNGCSTPLGMENGKIENKQITASSFKKSWWGDYWEPFRARLNAQGRVNAWQAKANNNKQWLEIDLLKIKKITAIITQGCKSLSSEMYVKSYTIHYSEQGVEWKPYRLKSSMVDKIFEGNTNTKGHVKNFFNPPIISRFIRVIPKTWNQSIALRLELFGCDIY

SEQ ID NO: 8300 - protein, 2224 aa, Homo sapiens
MFPGCPRLWVLVVLGTSWVGWGSQGTEAAQLRQFYVAAQGISWSYRPEPTNSSLNLSVTSFKKIVYREYEPYFKKEKPQSTISGLLGPTLYAEVGDIIKVHFKNKADKPLSIHPQGIRYSKLSEGASYLDHTFPAEKMDDAVAPGREYTYEWSISEDSGPTHDDPPCLTHIYYSHENLIEDFNSGLIGPLLICKKGTLTEGGTQKTFDKQIVLLFAVFDESKSWSQSSSLMYTVNGYVNGTMPDITVCAHDHISWHLLGMSSGPELFSIHFNGQVLEQNHHKVSAITLVSATSTTANMTVGPEGKWIISSLTPKHLQAGMQAYIDIKNCPKKTRNLKKITREQRRHMKRWEYFIAAEEVIWDYAPVIPANMDKKYRSQHLDNFSNQIGKHYKKVMYTQYEDESFTKHTVNPNMKEDGILGPIIRAQVRDTLKIVFKNMASRPYSIYPHGVTFSPYEDEVNSSFTSGRNNTMIRAVQPGETYTYKWNILEFDEPTENDAQCLTRPYYSDVDIMRDIASGLIGLLLICKSRSLDRRGIQRAADIEQQAVFAVFDENKSWYLEDNINKFCENPDEVKRDDPKFYESNIMSTINGYVPESITTLGFCFDDTVQWHFCSVGTQNEILTIHFTGHSFIYGKRHEDTLTLFPMRGESVTVTMDNVGTWMLTSMNSSPRSKKLRLKFRDVKCIPDDDEDSYEIFEPPESTVMATRKMHDRLEPEDEESDADYDYQNRLAAALGIRSFRNSSLNQEEEEFNLTALALENGTEFVSSNTDIIVGSNYSSPSNISKFTVNNLAEPQKAPSHQQATTAGSPLRHLIGKNSVLNSSTAEHSSPYSEDPIEDPLQPDVTGIRLLSLGAGEFKSQEHAKHKGPKVERDQAAKHRFSWMKLLAHKVGRHLSQDTGSPSGMRPWEDLPSQDTGSPSRMRPWKDPPSDLLLLKQSNSSKILVGRWHLASEKGSYEIIQDTDEDTAVNNWLISPQNASRAWGESTPLANKPGKQSGHPKFPRVRHKSLQVRQDGGKSRLKKSQFLIKTRKKKKEKHTHHAPLSPRTFHPLRSEAYNTFSERRLKHSLVLHKSNETSLPTDLNQTLPSMDFGWIASLPDHNQNSSNDTGQASCPPGLYQTVPPEEHYQTFPIQDPDQMHSTSDPSHRSSSPELSEMLEYDRSHKSFPTDISQMSPSSEHEVWQTVISPDLSQVTLSPELSQTNLSPDLSHTTLSPELIQRNLSPALGQMPISPDLSHTTLSPDLSHTTLSLDLSQTNLSPELSQTNLSPALGQMPLSPDLSHTTLSLDFSQTNLSPELSHMTLSPELSQTNLSPALGQMPISPDLSHTTLSLDFSQTNLSPELSQTNLSPALGQMPLSPDPSHTTLSLDLSQTNLSPELSQTNLSPDLSEMPLFADLSQIPLTPDLDQMTLSPDLGETDLSPNFGQMSLSPDLSQVTLSPDISDTTLLPDLSQISPPPDLDQIFYPSESSQSLLLQEFNESFPYPDLGQMPSPSSPTLNDTFLSKEFNPLVIVGLSKDGTDYIEIIPKEEVQSSEDDYAEIDYVPYDDPYKTDVRTNINSSRDPDNIAAWYLRSNNGNRRNYYIAAEEISWDYSEFVQRETDIEDSDDIPEDTTYKKVVFRKYLDSTFTKRDPRGEYEEHLGILGPIIRAEVDDVIQVRFKNLASRPYSLHAHGLSYEKSSEGKTYEDDSPEWFKEDNAVQPNSSYTYVWHATERSGPESPGSACRAWAYYSAVNPEKDIHSGLIGPLLICQKGILHKDSNMPMDMREFVLLFMTFDEKKSWYYEKKSRSSWRLTSSEMKKSHEFHAINGMIYSLPGLKMYEQEWVRLHLLNIGGSQDIHVVHFHGQTLLENGNKQHQLGVWPLLPGSFKTLEMKASKPGWWLLNTEVGENQRAGMQTPFLIMDRDCRMPMGLSTGIISDSQIKASEFLGYWEPRLARLNNGGSYNAWSVEKLAAEFASKPWIQVDMQKEVIITGIQTQGAKHYLKSCYTTEFYVAYSSNQINWQIFKGNSTRNVMYFNGNSDASTIKENQFDPPIVARYIRISPTRAYNRPTLRLELQGCEVNGCSTPLGMENGKIENKQITASSFKKSWWGDYWEPFRARLNAQGRVNAWQAKANNNKQWLEIDLLKIKKITAIITQGCKSLSSEMYVKSYTIHYSEQGVEWKPYRLKSSMVDKIFEGNTNTKGHVKNFFNPPIISRFIRVIPKTWNQSIALRLELFGCDIY

SEQ ID NO: 8301 - protein, 376 aa, Homo sapiens
MNHSERFVFIAEWYDPNASLLRRYELLFYPGDGSVEMHDVKNHRTFLKRTKYDNLHLEDLFIGNKVNVFSRQLVLIDYGDQYTARQLGSRKEKTLALIKPDAISKAGEIIEIINKAGFTITKLKMMMLSRKEALDFHVDHQSRPFFNELIQFITTGPIIAMEILRDDAICEWKRLLGPANSGVARTDASESIRALFGTDGIRNAAHGPDSFASAAREMELFFPSSGGCGPANTAKFTNCTCCIVKPHAVSEGLLGKILMAIRDAGFEISAMQMFNMDRVNVEEFYEVYKGVVTEYHDMVTEMYSGPCVAMEIQQNNATKTFREFCGPADPEIARHLRPGTLRAIFGKTKIQNAVHCTDLPEDGLLEVQYFFKILDN

SEQ ID NO: 8302 - protein, 303 aa, Homo sapiens
MARGKAKEEGSWKKFIWNSEKKEFLGRTGGSWFKILLFYVIFYGCLAGIFIGTIQVMLLTISEFKPTYQDRVAPPGLTQIPQIQKTEISFRPNDPKSYEAYVLNIVRFLEKYKDSAQRDDMIFEDCGDVPSEPKERGDFNHERGERKVCRFKLEWLGNCSGLNDETYGYKEGKPCIIIKLNRVLGFKPKPPKNESLETYPVMKYNPNVLPVQCTGKRDEDKDKVGNVEYFGLGNSPGFPLQYYPYYGKLLQPKYLQPLLAVQFTNLTMDTEIRIECKAYGENIGYSEKDRFQGRFDVKIEVKS

SEQ ID NO: 8303 - protein, 201 aa, Homo sapiens
MDLSLLWVLLPLVTMAWGQYGDYGYPYQQYHDYSDDGWVNLNRQGFSYQCPQGQVIVAVRSIFSKKEGSDRQWNYACMPTPQSLGEPTECWWEEINRAGMEWYQTCSNNGLVAGFQSRYFESVLDREWQFYCCRYSKRCPYSCWLTTEYPGHYGEEMDMISYNYDYYIRGATTTFSAVERDRQWKFIMCRMTEYDCEFANV

SEQ ID NO: 8304 - protein, 114 aa, Homo sapiens
MRLLILALLGICSLTAYIVEGVGSEVSDKRTCVSLTTQRLPVSRIKTYTITEGSLRAVIFITKRGLKVCADPQATWVRDVVRSMDRKSNTRNNMIQTKPTGTQQSTNTAVTLTG

SEQ ID NO: 8305 - protein, 114 aa, Homo sapiens
MRLLILALLGICSLTAYIVEGVGSEVSHRRTCVSLTTQRLPVSRIKTYTITEGSLRAVIFITKRGLKVCADPQATWVRDVVRSMDRKSNTRNNMIQTKPTGTQQSTNTAVTLTG

SEQ ID NO: 8306 - protein, 632 aa, Homo sapiens
MARHRNVRGYNYDEDFEDDDLYGQSVEDDYCISPSTAAQFIYSRRDKPSVEPVEEYDYEDLKESSNSVSNHQLSGFDQARLYSCLDHMREVLGDAVPDEILIEAVLKNKFDVQKALSGVLEQDRVQSLKDKNEATVSTGKIAKGVLFSSSEVSADNVQSSYPQSANHLDYSSKPFDFASSVGKYGLSHNSSVPTHCLLHRKKKLDTRKSEKKLESCKLTKELSLANLIHDMSRDSCESQPSVRLSSTDSLESLLSKNLDADLLRPHASECISKDDSAFKEIPDLKTIIIKGTTPNNSLYIQNNSLSDFQNIPVQDSLGSSNNPLYLTSSLENMTVDNLNASKETEVGNVSLVEQSAKNHTFKNDNLQFSQCESPSLTELFQEHKENNISQCFTLSDLCNQSSASFTDLSLGSFPLSQLANRCQSSPGISELTGSLSSLAFHKASPTRDLENLSLSELIAETIDVDNSQIKKESFEVSLSEVRSPGIDSNIDLSVLIKNPDFVPKPVVDPSIAPSSRTKVLSSKLGKNSNFAKDNKKNNKGSLTRKPPFSLSWTKALAARPSAFASTLCLRYPLKSCKRRTLDLYKTFLYSRQVQDVKDKEISPLVAITPFDFKSASPDDIVKANQKKAFTRE

SEQ ID NO: 8307 - protein, 272 aa, Homo sapiens
MMIHGFQSSHRDFCFGPWKLTASKTHIMKSADVEKLADELHMPSLPEMMFGDNVLRIQHGSGFGIEFNATDALRCVNNYQGMLKVACAEEWQESRTEGEHSKEVIKPYDWTYTTDYKGTLLGESLKLKVVPTTDHIDTEKLKAREQIKFFEEVLLFEDELHDHGVSSLSVKIRVMPSSFFLLLRFFLRIDGVLIRMNDTRLYHEADKTYMLREYTSRESKISSLMHVPPSLFTEPNEISQYLPIKEAVCEKLIFPERIDPNPADSQKSTQVE

SEQ ID NO: 8308 - protein, 684 aa, Homo sapiens
MARHRNVRGYNYDEDFEDDDLYGQSVEDDYCISPSTAAQFIYSRRDKPSVEPVEEYDYEDLKESSNSVSNHQLSGFDQARLYSCLDHMREVLGDAVPDEILIEAVLKNKFDVQKALSGVLEQDRVQSLKDKNEATVSTGKIAKGKPVDSQTSRSESEIVPKVAKMTVSGKKQTMGFEVPGVSSEENGHSFHTPQKGPPIEDAIASSDVLETASKSANPPHTIQASEEQSSTPAPVKKSGKLRQQIDVKAELEKRQGGKQLLNLVVIGHVDAGKSTLMGHMLYLLGNINKRTMHKYEQESKKAGKASFAYAWVLDETGEERERGVTMDVGMTKFETTTKVITLMDAPGHKDFIPNMITGAAQADVAVLVVDASRGEFEAGFETGGQTREHGLLVRSLGVTQLAVAVNKMDQVNWQQERFQEITGKLGHFLKQAGFKESDVGFIPTSGLSGENLITRSQSSELTKWYKGLCLLEQIDSFKPPQRSIDKPFRLCVSDVFKDQGSGFCITGKIEAGYIQTGDRLLAMPPNETCTVKGITLHDEPVDWAAAGDHVSLTLVGMDIIKINVGCIFCGPKVPIKACTRFRARILIFNIEIPITKGFPVLLHYQTVSEPAVIKRLISVLNKSTGEVTKKKPKFLTKGQNALVELQTQRPIALELYKDFKELGRFMLRYGGSTIAAGVVTEIKE

SEQ ID NO: 8309 - protein, 951 aa, Homo sapiens
MSRGGSYPHLLWDVRKRSLGLEDPSRLRSRYLGRREFIQRLKLEATLNVHDGCVNTICWNDTGEYILSGSDDTKLVISNPYSRKVLTTIRSGHRANIFSAKFLPCTNDKQIVSCSGDGVIFYTNVEQDAETNRQCQFTCHYGTTYEIMTVPNDPYTFLSCGEDGTVRWFDTRIKTSCTKEDCKDDILINCRRAATSVAICPPIPYYLAVGCSDSSVRIYDRRMLGTRATGNYAGRGTTGMVARFIPSHLNNKSCRVTSLCYSEDGQEILVSYSSDYIYLFDPKDDTARELKTPSAEERREELRQPPVKRLRLRGDWSDTGPRARPESERERDGEQSPNVSLMQRMSDMLSRWFEEASEVAQSNRGRGRSRPRGGTSQSDISTLPTVPSSPDLEVSETAMEVDTPAEQFLQPSTSSTMSAQAHSTSSPTESPHSTPLLSSPDSEQRQSVEASGHHTHHQSEFLRGPEIALLRKRLQQLRLKKAEQQRQQELAAHTQQQPSTSDQSSHEGSSQDPHASDSPSSVVNKQLGSMSLDEQQDNNNEKLSPKPGTGEPVLSLHYSTEGTTTSTIKLNFTDEWSSIASSSRGIGSHCKSEGQEESFVPQSSVQPPEGDSETKAPEESSEDVTKYQEGVSAENPVENHINITQSDKFTAKPLDSNSGERNDLNLDRSCGVPEESASSEKAKEPETSDQTSTESATNENNTNPEPQFQTEATGPSAHEETSTRDSALQDTDDSDDDPVLIPGARYRAGPGDRFNIRGTTIGDRIMRRSAVARIQEFFRRRKERKEMEELDTLNIRRPLVKMVYKGHRNSRTMIKEANFWGANFVMSGSDCGHIFIWDRHTAEHLMLLEADNHVVNCLQPHPFDPILASSGIDYDIKIWSPLEESRIFNRKLADEVITRNELMLEETRNTITVPASFMLRMLASLNHIRADRLEGDRSEGSGQENENEDEE

SEQ ID NO: 8310 - protein, 880 aa, Homo sapiens
MSRGGSYPHLLWDVRKRSLGLEDPSRLRSRYLGRREFIQRLKLEATLNVHDGCVNTICWNDTGEYILSGSDDTKLVISNPYSRKVLTTIRSGHRANIFSAKFLPCTNDKQIVSCSGDGVIFYTNVEQDAETNRQCQFTCHYGTTYEIMTVPNDPYTFLSCGEDGTVRWFDTRIKTSCTKEDCKDDILINCRRAATSVAICPPIPYYLAVGCSDSSVRIYDRRMLGTRATGNYAGRGTTGMVARFIPSHLNNKSCRVTSLCYSEDGQEILVSYSSDYIYLFDPKDDTARELKTPSAEERREELRQPPVKRLRLRGDWSDTGPRARPESERERDGEQSPNVSLMQRMSDMLSRWFEEASEVAQSNRGRGRSRPRGGTSQSDISTLPTVPSSPDLEVSETAMEVDTPAEQFLQPSTSSTMSAQAHSTSSPTESPHSTPLLSSPDSEQRQSVEASGHHTHHQSDSPSSVVNKQLGSMSLDEQQDNNNEKLSPKPGTGEPVLSLHYSTEGTTTSTIKLNFTDEWSSIASSSRGIGSHCKSEGQEESFVPQSSVQPPEGDSETKAPEESSEDVTKYQEGVSAENPVENHINITQSDKFTAKPLDSNSGERNDLNLDRSCGVPEESASSEKAKEPETSDQTSTESATNENNTNPEPQFQTEATGPSAHEETSTRDSALQDTDDSDDDPVLIPGARYRAGPGDRRSAVARIQEFFRRRKERKEMEELDTLNIRRPLVKMVYKGHRNSRTMIKEANFWGANFVMSGSDCGHIFIWDRHTAEHLMLLEADNHVVNCLQPHPFDPILASSGIDYDIKIWSPLEESRIFNRKLADEVITRNELMLEETRNTITVPASFMLRMLASLNHIRADRLEGDRSEGSGQENENEDEE

SEQ ID NO: 8311 - protein, 766 aa, Homo sapiens
MADGGAASQDESSAAAAAAADSRMNNPSETSKPSMESGDGNTGTQTNGLDFQKQPVPVGGAISTAQAQAFLGHLHQVQLAGTSLQAAAQSLNVQSKSNEESGDSQQPSQPSQQPSVQAAIPQTQLMLAGGQITGLTLTPAQQQLLLQQAQAQAQLLAAAVQQHSASQQHSAAGATISASAATPMTQIPLSQPIQIAQDLQQLQQLQQQNLNLQQFVLVHPTTNLQPAQFIISQTPQGQQGLLQAQNLLTQLPQQSQANLLQSQPSITLTSQPATPTRTIAATPIQTLPQSQSTPKRIDTPSLEEPSDLEELEQFAKTFKQRRIKLGFTQGDVGLAMGKLYGNDFSQTTISRFEALNLSFKNMCKLKPLLEKWLNDAENLSSDSSLSSPSALNSPGIEGLSRRRKKRTSIETNIRVALEKSFLENQKPTSEEITMIADQLNMEKEVIRVWFCNRRQKEKRINPPSSGGTSSSPIKAIFPSPTSLVATTPSLVTSSAATTLTVSPVLPLTSAAVTNLSVTGTSDTTSNNTATVISTAPPASSAVTSPSLSPSPSASASTSEASSASETSTTQTTSTPLSSPLGTSQVMVTASGLQTAAAAALQGAAQLPANASLAAMAAAAGLNPSLMAPSQFAAGGALLSLNPGTLSGALSPALMSNSTLATIQALASGGSLPITSLDATGNLVFANAGGAPNIVTAPLFLNPQNLSLLTSNPVSLVSAAAASAGNSAPVASLHATSTSAESIQNSLFTVASASGAASTTTTASKAQ

SEQ ID NO: 8312 - protein, 319 aa, Homo sapiens
MVGKMWPVLWTLCAVRVTVDAISVETPQDVLRASQGKSVTLPCTYHTSTSSREGLIQWDKLLLTHTERVVIWPFSNKNYIHGELYKNRVSISNNAEQSDASITIDQLTMADNGTYECSVSLMSDLEGNTKSRVRLLVLVPPSKPECGIEGETIIGNNIQLTCQSKEGSPTPQYSWKRYNILNQEQPLAQPASGQPVSLKNISTDTSGYYICTSSNEEGTQFCNITVAVRSPSMNVALYVGIAVGVVAALIIIGIIIYCCCCRGKDDNTEDKEDARPNREAYEEPPEQLRELSREREEEDDYRQEEQRSTGRESPDHLDQ

SEQ ID NO: 8313 - protein, 261 aa, Homo sapiens
MAGDSEQTLQNHQQPNGGEPFLIGVSGGTASGKSSVCAKIVQLLGQNEVDYRQKQVVILSQDSFYRVLTSEQKAKALKGQFNFDHPDAFDNELILKTLKEITEGKTVQIPVYDFVSHSRKEETVTVYPADVVLFEGILAFYSQEVRDLFQMKLFVDTDADTRLSRRVLRDISERGRDLEQILSQYITFVKPAFEEFCLPTKKYADVIIPRGADNLVAINLIVQHIQDILNGGPSKRQTNGCLNGYTPSRKRQASESSSRPH

SEQ ID NO: 8314 - protein, 166 aa, Homo sapiens
MPWRGRRFRLCRRKMAVLSKEYGFVLLTGAASFIMVAHLAINVSKARKKYKVEYPIMYSTDPENGHIFNCIQRAHQNTLEVYPPFLFFLAVGGVYHPRIASGLGLAWIVGRVLYAYGYYTGEPSKRSRGALGSIALLGLVGTTVCSAFQHLGWVKSGLGSGPKCCH

SEQ ID NO: 8315 - protein, 152 aa, Homo sapiens
MAVLSKEYGFVLLTGAASFIMVAHLAINVSKARKKYKVEYPIMYSTDPENGHIFNCIQRAHQNTLEVYPPFLFFLAVGGVYHPRIASGLGLAWIVGRVLYAYGYYTGEPSKRSRGALGSIALLGLVGTTVCSAFQHLGWVKSGLGSGPKCCH

SEQ ID NO: 8316 - protein, 347 aa, Homo sapiens
MDEQPRLMHSHAGVGMAGHPGLSQHLQDGAGGTEGEGGRKQDIGDILQQIMTITDQSLDEAQARKHALNCHRMKPALFNVLCEIKEKTVLSIRGAQEEEPTDPQLMRLDNMLLAEGVAGPEKGGGSAAAAAAAAASGGAGSDNSVEHSDYRAKLSQIRQIYHTELEKYEQACNEFTTHVMNLLREQSRTRPISPKEIERMVSIIHRKFSSIQMQLKQSTCEAVMILRSRFLDARRKRRNFNKQATEILNEYFYSHLSNPYPSEEAKEELAKKCGITVSQVSNWFGNKRIRYKKNIGKFQEEANIYAAKTAVTATNVSAHGSQANSPSTPNSAGGYPSPCYQPDRRIQ

SEQ ID NO: 8317 - protein, 187 aa, Homo sapiens
MKHRLGFLLQKSDSCEHNSSHNKKDKVVICQRVSQEEVKKWAESLENLISHECGLAAFKAFLKSEYSEENIDFWISCEEYKKIKSPSKLSPKAKKIYNEFISVQATKEVNLDSCTREETSRNMLEPTITCFDEAQKKIFNLMEKDSYRRFLKSRFYLDLVNPSSCGAEKQKGAKSSADCASLVPQCA

SEQ ID NO: 8318 - protein, 205 aa, Homo sapiens
MCKGLAGLPASCLRSAKDMKHRLGFLLQKSDSCEHNSSHNKKDKVVICQRVSQEEVKKWAESLENLISHECGLAAFKAFLKSEYSEENIDFWISCEEYKKIKSPSKLSPKAKKIYNEFISVQATKEVNLDSCTREETSRNMLEPTITCFDEAQKKIFNLMEKDSYRRFLKSRFYLDLVNPSSCGAEKQKGAKSSADCASLVPQCA

SEQ ID NO: 8319 - protein, 855 aa, Homo sapiens
MILIPRMLLVLFLLLPILSSAKAQVNPAICRYPLGMSGGQIPDEDITASSQWSESTAAKYGRLDSEEGDGAWCPEIPVEPDDLKEFLQIDLHTLHFITLVGTQGRHAGGHGIEFAPMYKINYSRDGTRWISWRNRHGKQVLDGNSNPYDIFLKDLEPPIVARFVRFIPVTDHSMNVCMRVELYGCVWLDGLVSYNAPAGQQFVLPGGSIIYLNDSVYDGAVGYSMTEGLGQLTDGVSGLDDFTQTHEYHVWPGYDYVGWRNESATNGYIEIMFEFDRIRNFTTMKVHCNNMFAKGVKIFKEVQCYFRSEASEWEPNAISFPLVLDDVNPSARFVTVPLHHRMASAIKCQYHFADTWMMFSEITFQSDAAMYNNSEALPTSPMAPTTYDPMLKVDDSNTRILIGCLVAIIFILLAIIVIILWRQFWQKMLEKASRRMLDDEMTVSLSLPSDSSMFNNNRSSSPSEQGSNSTYDRIFPLRPDYQEPSRLIRKLPEFAPGEEESGCSGVVKPVQPSGPEGVPHYAEADIVNLQGVTGGNTYSVPAVTMDLLSGKDVAVEEFPRKLLTFKEKLGEGQFGEVHLCEVEGMEKFKDKDFALDVSANQPVLVAVKMLRADANKNARNDFLKEIKIMSRLKDPNIIHLLAVCITDDPLCMITEYMENGDLNQFLSRHEPPNSSSSDVRTVSYTNLKFMATQIASGMKYLSSLNFVHRDLATRNCLVGKNYTIKIADFGMSRNLYSGDYYRIQGRAVLPIRWMSWESILLGKFTTASDVWAFGVTLWETFTFCQEQPYSQLSDEQVIENTGEFFRDQGRQTYLPQPAICPDSVYKLMLSCWRRDTKNRPSFQEIHLLLLQQGDE

SEQ ID NO: 8320 - protein, 521 aa, Homo sapiens
MNINDLKLTLSKAGQEHLLRFWNELEEAQQVELYAELQAMNFEELNFFFQKAIEGFNQSSHQKNVDARMEPVPREVLGSATRDQDQLQAWESEGLFQISQNKVAVLLLAGGQGTRLGVAYPKGMYDVGLPSRKTLFQIQAERILKLQQVAEKYYGNKCIIPWYIMTSGRTMESTKEFFTKHKYFGLKKENVIFFQQGMLPAMSFDGKIILEEKNKVSMAPDGNGGLYRALAAQNIVEDMEQRGIWSIHVYCVDNILVKVADPRFIGFCIQKGADCGAKVVEKTNPTEPVGVVCRVDGVYQVVEYSEISLATAQKRSSDGRLLFNAGNIANHFFTVPFLRDVVNVYEPQLQHHVAQKKIPYVDTQGQLIKPDKPNGIKMEKFVFDIFQFAKKFVVYEVLREDEFSPLKNADSQNGKDNPTTARHALMSLHHCWVLNAGGHFIDENGSRLPAIPRATNGKSETITADVNHNLKDANDVPIQCEISPLISYAGEGLESYVADKEFHAPLIIDENGVHELVKNGI

SEQ ID NO: 8321 - protein, 505 aa, Homo sapiens
MNINDLKLTLSKAGQEHLLRFWNELEEAQQVELYAELQAMNFEELNFFFQKAIEGFNQSSHQKNVDARMEPVPREVLGSATRDQDQLQAWESEGLFQISQNKVAVLLLAGGQGTRLGVAYPKGMYDVGLPSRKTLFQIQAERILKLQQVAEKYYGNKCIIPWYIMTSGRTMESTKEFFTKHKYFGLKKENVIFFQQGMLPAMSFDGKIILEEKNKVSMAPDGNGGLYRALAAQNIVEDMEQRGIWSIHVYCVDNILVKVADPRFIGFCIQKGADCGAKVVEKTNPTEPVGVVCRVDGVYQVVEYSEISLATAQKRSSDGRLLFNAGNIANHFFTVPFLRDVVNVYEPQLQHHVAQKKIPYVDTQGQLIKPDKPNGIKMEKFVFDIFQFAKKFVVYEVLREDEFSPLKNADSQNGKDNPTTARHALMSLHHCWVLNAGGHFIDENGSRLPAIPRLKDANDVPIQCEISPLISYAGEGLESYVADKEFHAPLIIDENGVHELVKNGI

SEQ ID NO: 8322 - protein, 513 aa, Homo sapiens
MTTQLPAYVAILLFYVSRASCQDTFTAAVYEHAAILPNATLTPVSREEALALMNRNLDILEGAITSAADQGAHIIVTPEDAIYGWNFNRDSLYPYLEDIPDPEVNWIPCNNRNRFGQTPVQERLSCLAKNNSIYVVANIGDKKPCDTSDPQCPPDGRYQYNTDVVFDSQGKLVARYHKQNLFMGENQFNVPKEPEIVTFNTTFGSFGIFTCFDILFHDPAVTLVKDFHVDTIVFPTAWMNVLPHLSAVEFHSAWAMGMRVNFLASNIHYPSKKMTGSGIYAPNSSRAFHYDMKTEEGKLLLSQLDSHPSHSAVVNWTSYASSIEALSSGNKEFKGTVFFDEFTFVKLTGVAGNYTVCQKDLCCHLSYKMSENIPNEVYALGAFDGLHTVEGRYYLQICTLLKCKTTNLNTCGDSAETASTRFEMFSLSGTFGTQYVFPEVLLSENQLAPGEFQVSTDGRLFSLKPTSGPVLTVTLFGRLYEKDWASNASSGLTAQARIIMLIVIAPIVCSLSW

SEQ ID NO: 8323 - protein, 239 aa, Homo sapiens
MSYTPGVGGDPAQLAQRISSNIQKITQCSVEIQRTLNQLGTPQDSPELRQQLQQKQQYTNQLAKETDKYIKEFGSLPTTPSEQRQRKIQKDRLVAEFTTSLTNFQKVQRQAAEREKEFVARVRASSRVSGSFPEDSSKERNLVSWESQTQPQVQVQDEEITEDDLRLIHERESSIRQLEADIMDINEIFKDLGMMIHEQGDVIDSIEANVENAEVHVQQANQQLSRAADYQKKDSCMLM

SEQ ID NO: 8324 - protein, 751 aa, Homo sapiens
MAKPRLLVLYFALIVVPAWVSSIVLTGTSEPPDAQTVAPAEDETLQNEADNQENVLSQLLGDYDKVKAMSEGSDCQCKCVVRPLGRDACQRINAGASRKEDFYTVETITSGSSCKCACVAPPSALNPCEGDFRLQKLREADSQDLKLSTIIDMLEGAFYGLDLLKLHSVTTKLVGRVDKLEEEVSKNLTKENEQIKEDMEEIRTEMNKRGKENCSENILDSMPDIRSALQRDAAAAYAHPEQYEERFLQEETVSQQINSIELLQTRPLALPEVVKSQRPLQRQVHLRGRPASQPTVIRGITYYKAKVSEEENDIEEQQDEFFSGDNGVDLLIEDQLLRHNGLMTSVTRRPAATRQGHSTAVTSDLNARTAPWSSALPQPSTSDPSIANHASVGPTLQTTSVSPDPTRESVLQPSPQVPATTVAHTATQQPAAPAPPAVSPREALMEAMHTVPVPPTTVRTDSLGKDAPAGWGTTPASPTLSPEEEDDIRNVIGRCKDTLSTITGPTTQNTYGRNEGAWMKDPLAKDERIYVTNYYYGNTLVEFRNLENFKQGRWSNSYKLPYSWIGTGHVVYNGAFYYNRAFTRNIIKYDLKQRYVAAWAMLHDVAYEEATPWRWQGHSDVDFAVDENGLWLIYPALDDEGFSQEVIVLSKLNAADLSTQKETTWRTGLRRNFYGNCFVICGVLYAVDSYNQRNANISYAFDTHTNTQIVPRLLFENEYSYTTQIDYNPKDRLLYAWDNGHQVTYHVIFAY

SEQ ID NO: 8325 - protein, 261 aa, Homo sapiens
MSYTPGVGGDPAQLAQRISSNIQKITQCSVEIQRTLNQLGTPQDSPELRQQLQQKQQYTNQLAKETDKYIKEFGSLPTTPSEQRQRKIQKDRLVAEFTTSLTNFQKVQRQAAEREKEFVARVRASSRVSGSFPEDSSKERNLVSWESQTQPQVQVQDEEITEDDLRLIHERESSIRQLEADIMDINEIFKDLGMMIHEQGDVIDSIEANVENAEVHVQQANQQLSRAADYQRKSRKTLCIIILILVIGVAIISLIIWGLNH

SEQ ID NO: 8326 - protein, 670 aa, Homo sapiens
MGEPAGVAGTMESPFSPGLFHRLDEDWDSALFAELGYFTDTDELQLEAANETYENNFDNLDFDLDLMPWESDIWDINNQICTVKDIKAEPQPLSPASSSYSVSSPRSVDSYSSTQHVPEELDLSSSSQMSPLSLYGENSNSLSSAEPLKEDKPVTGPRNKTENGLTPKKKIQVNSKPSIQPKPLLLPAAPKTQTNSSVPAKTIIIQTVPTLMPLAKQQPIISLQPAPTKGQTVLLSQPTVVQLQAPGVLPSAQPVLAVAGGVTQLPNHVVNVVPAPSANSPVNGKLSVTKPVLQSTMRNVGSDIAVLRRQQRMIKNRESACQSRKKKKEYMLGLEARLKAALSENEQLKKENGTLKRQLDEVVSENQRLKVPSPKRRVVCVMIVLAFIILNYGPMSMLEQDSRRMNPSVSPANQRRHLLGFSAKEAQDTSDGIIQKNSYRYDHSVSNDKALMVLTEEPLLYIPPPPCQPLINTTESLRLNHELRGWVHRHEVERTKSRRMTNNQQKTRILQGALEQGSNSQLMAVQYTETTSSISRNSGSELQVYYASPRSYQDFFEAIRRRGDTFYVVSFRRDHLLLPATTHNKTTRPKMSIVLPAININENVINGQDYEVMMQIDCQVMDTRILHIKSSSVPPYLRDQQRNQTNTFFGSPPAATEATHVVSTIPESLQ

SEQ ID NO: 8327 - protein, 268 aa, Homo sapiens
MWPLTALLLLATLEKPILSLHPPWTTIFKGERVTLKCDGYHPLLLELQPISTLWYLGHLLLPSHKKSIEVQTPGVYRCQTRGAPVSDPIHLSVSNDWLILQVPYAPVFEGEPLVLRCRGWYDKVVYKLHYYHDGQAVRYFHSSANYTVLQARASDSGRYQCSGTMRIPVESAPMFSAKVAVTVQEARHAAAVRVLQVQPRGAPLRLGRRVHSPGARGRGARIVLVRGGYRHPQCPETQSVAAAPGAGFSPGPGLHHRPSSMGRSLGSW

SEQ ID NO: 8328 - protein, 311 aa, Homo sapiens
MWPLTALLLLATLEKPILSLHPPWTTIFKGERVTLKCDGYHPLLLELQPISTLWYLGHLLLPSHKKSIEVQTPGVYRCQTRGAPVSDPIHLSVSNDWLILQVPYAPVFEGEPLVLRCRGWYDKVVYKLHYYHDGQAVRYFHSSANYTVLQARASDSGRYQCSGTMRIPVESAPMFSAKVAVTVQAARCAASTGAPSTQSRSPRSRSSNRTGARRLPPPAVSGNAVRGCSSRGRVLPWTRPPPPPQLHGPQPWLLVIGRFPSESPRCPDRSRWSPPSGTPPPPGCSSRRAAPRLRGHPPALRRRPWNNRLEP

SEQ ID NO: 8329 - protein, 318 aa, Homo sapiens
MWPLTALLLLVPSSGQAATLEKPILSLHPPWTTIFKGERVTLKCDGYHPLLLELQPISTLWYLGHLLLPSHKKSIEVQTPGVYRCQTRGAPVSDPIHLSVSNDWLILQVPYAPVFEGEPLVLRCRGWYDKVVYKLHYYHDGQAVRYFHSSANYTVLQARASDSGRYQCSGTMRIPVESAPMFSAKVAVTVQAARCAASTGAPSTQSRSPRSRSSNRTGARRLPPPAVSGNAVRGCSSRGRVLPWTRPPPPPQLHGPQPWLLVIGRFPSESPRCPDRSRWSPPSGTPPPPGCSSRRAAPRLRGHPPALRRRPWNNRLEP

SEQ ID NO: 8330 - protein, 426 aa, Homo sapiens
MWPLTALLLLVPSSGQAATLEKPILSLHPPWTTIFKGERVTLKCDGYHPLLLELQPISTLWYLGHLLLPSHKKSIEVQTPGVYRCQTRGAPVSDPIHLSVSNDWLILQVPYAPVFEGEPLVLRCRGWYDKVVYKLHYYHDGQAVRYFHSSANYTVLQARASDSGRYQCSGTMRIPVESAPMFSAKVAVTVQELFRAPVLRVMGPREARGAALGGVVLRCDTRLHPQKRDTPLQFAFYKYSRAVRRFDWGAEYTVPEPEVEELESYWCEAATATRSVRKRSPWLQLPGPGSPLDPASTTAPAPWAAALAPGNRPLSFRKPPVSRSVPLVTSVRNTTSTGLQFPASGAPTAGPPACAPPTPLEQSAGALKPDVDLLLREMQLLKGLLSRVVLELKEPQALRELRGTPETPTSHFAVSPGTPETTPVES

SEQ ID NO: 8331 - protein, 165 aa, Homo sapiens
ALYLSLGVLWVAQMLLAASFETLQCEGPVCTEESSCHTEDDLTDAREAGFQVKAYTFSEPFHLIVSYGASSSAAPPTLNPAPQKSAAPGTAPEEAPGPLPPPPTPSSEDPGFSSPLGMPDPHLYHQMGLLLKHMQDVRVLLGHLLMELRELSGHRKPGTTKATAE

SEQ ID NO: 8332 - protein, 613 aa, Homo sapiens
MCCWPLLLLWGLLPGTAAGGSGRTYPHRTLLDSEGKYWLGWSQRGSQIAFRLQVRTAGYVGFGFSPTGAMASADIVVGGVAHGRPYLQDYFTNANRELKKDAQQDYHLEYAMENSTHTIIEFTRELHTCDINDKSITDSTVRVIWAYHHEDAGEAGPKYHDSNRGTKSLRLLNPEKTSVLSTALPYFDLVNQDVPIPNKDTTYWCQMFKIPVFQEKHHVIKVEPVIQRGHESLVHHILLYQCSNNFNDSVLESGHECYHPNMPDAFLTCETVIFAWAIGGEGFSYPPHVGLSLGTPLDPHYVLLEVHYDNPTYEEGLIDNSGLRLFYTMDIRKYDAGVIEAGLWVSLFHTIPPGMPEFQSEGHCTLECLEEALEAEKPSGIHVFAVLLHAHLAGRGIRLRHFRKGKEMKLLAYDDDFDFNFQEFQYLKEEQTILPGDNLITECRYNTKDRAEMTWGGLSTRSEMCLSYLLYYPRINLTRCASIPDIMEQLQFIGVKEIYRPVTTWPFIIKSPKQYKNLSFMDAMNKFKWTKKEGLSFNKLVLSLPVNVRCSKTDNAEWSIQGMTALPPDIERPYKAEPLVCGTSSSSSLHRDFSINLLVCLLLLSCTLSTKSL

SEQ ID NO: 8333 - protein, 233 aa, Homo sapiens
MWQLLLPTALLLLVSAGMRTEDLPKAVVFLEPQWYSVLEKDSVTLKCQGAYSPEDNSTQWFHNENLISSQASSYFIDAATVNDSGEYRCQTNLSTLSDPVQLEVHIGWLLLQAPRWVFKEEDPIHLRCHSWKNTALHKVTYLQNGKDRKYFHHNSDFHIPKATLKDSGSYFCRGLVGSKNVSSETVNITITQGLAVSTISSFSPPGYQVSFCLVMVLLFAVDTGLYFSVKTNI

SEQ ID NO: 8334 - protein, 254 aa, Homo sapiens
MWQLLLPTALLLLVSAGMRTEDLPKAVVFLEPQWYRVLEKDSVTLKCQGAYSPEDNSTQWFHNESLISSQASSYFIDAATVDDSGEYRCQTNLSTLSDPVQLEVHIGWLLLQAPRWVFKEEDPIHLRCHSWKNTALHKVTYLQNGKGRKYFHHNSDFYIPKATLKDSGSYFCRGLFGSKNVSSETVNITITQGLAVSTISSFFPPGYQVSFCLVMVLLFAVDTGLYFSVKTNIRSSTRDWKDHKFKWRKDPQDK

SEQ ID NO: 8335 - protein, 316 aa, Homo sapiens
MTMETQMSQNVCPRNLWLLQPLTVLLLLASADSQAAPPKAVLKLEPPWINVLQEDSVTLTCQGARSPESDSIQWFHNGNLIPTHTQPSYRFKANNNDSGEYTCQTGQTSLSDPVHLTVLSEWLVLQTPHLEFQEGETIMLRCHSWKDKPLVKVTFFQNGKSQKFSHLDPTFSIPQANHSHSGDYHCTGNIGYTLFSSKPVTITVQVPSMGSSSPMGIIVAVVIATAVAAIVAAVVALIYCRKKRISANSTDPVKAAQFEPPGRQMIAIRKRQLEETNNDYETADGGYMTLNPRAPTDDDKNIYLTLPPNDHVNSNN

SEQ ID NO: 8336 - protein, 169 aa, Homo sapiens
MAALLLRHVGRHCLRAHFSPQLCIRNAVPLGTTAKEEMERFWNKNIGSNRPLSPHITIYSWSLPMAMSICHRGTGIALSAGVSLFGMSALLLPGNFESYLELVKSLCLGPALIHTAKFALVFPLMYHTWNGIRHLMWDLGKGLKIPQLYQSGVVVLVLTVLSSMGLAAM

SEQ ID NO: 8337 - protein, 349 aa, Homo sapiens
MTAASMGPVRVAFVVLLALCSRPAVGQNCSGPCRCPDEPAPRCPAGVSLVLDGCGCCRVCAKQLGELCTERDPCDPHKGLFCHFGSPANRKIGVCTAKDGAPCIFGGTVYRSGESFQSSCKYQCTCLDGAVGCMPLCSMDVRLPSPDCPFPRRVKLPGKCCEEWVCDEPKDQTVVGPALAAYRLEDTFGPDPTMIRANCLVQTTEWSACSKTCGMGISTRVTNDNASCRLEKQSRLCMVRPCEADLEENIKKGKKCIRTPKISKPIKFELSGCTSMKTYRAKFCGVCTDGRCCTPHRTTTLPVEFKCPDGEVMKKNMMFIKTCACHYNCPGDNDIFESLYYRKMYGDMA

SEQ ID NO: 8338 - protein, 100 aa, Homo sapiens
MKLLAATVLLLTICSLEGALVRRQAKEPCVESLVSQYFQTVTDYGKDLMEKVKSPELQAEAKSYFEKSKEQLTPLIKKAGTELVNFLSYFVELGTQPATQ

SEQ ID NO: 8339 - protein, 463 aa, Homo sapiens
MAALRALCGFRGVAAQVLRPGAGVRLPIQPSRGVRQWQPDVEWAQQFGGAVMYPSKETAHWKPPPWNDVDPPKDTIVKNITLNFGPQHPAAHGVLRLVMELSGEMVRKCDPHIGLLHRGTEKLIEYKTYLQALPYFDRLDYVSMMCNEQAYSLAVEKLLNIRPPPRAQWIRVLFGEITRLLNHIMAVTTHALDLGAMTPFFWLFEEREKMFEFYERVSGARMHAAYIRPGGVHQDLPLGLMDDIYQFSKNFSLRLDELEELLTNNRIWRNRTIDIGVVTAEEALNYGFSGVMLRGSGIQWDLRKTQPYDVYDQVEFDVPVGSRGDCYDRYLCRVEEMRQSLRIIAQCLNKMPPGEIKVDDAKVSPPKRAEMKTSMESLIHHFKLYTEGYQVPPGATYTAIEAPKGEFGVYLVSDGSSRPYRCKIKAPGFAHLAGLDKMSKGHMLADVVAIIGTQDIVFGEVDR

SEQ ID NO: 8340 - protein, 339 aa, Homo sapiens
MSQTGSHPGRGLAGRWLWGAQPCLLLPIVPLSWLVWLLLLLLASLLPSARLASPLPREEEIVFPEKLNGSVLPGSGAPARLLCRLQAFGETLLLELEQDSGVQVEGLTVQYLGQAPELLGGAEPGTYLTGTINGDPESVASLHWDGGALLGVLQYRGAELHLQPLEGGTPNSAGGPGAHILRRKSPASGQGPMCNVKAPLGSPSPRPRRAKRFASLSRFVETLVVADDKMAAFHGAGLKRYLLTVMAAAAKAFKHPSIRNPVSLVVTRLVILGSGEEGPQVGPSAAQTLRSFCAWQRGLNTPEDSDPDHFDTAILFTRQVRPQSAPQAMHCTILRSATT

SEQ ID NO: 8341 - protein, 837 aa, Homo sapiens
MSQTGSHPGRGLAGRWLWGAQPCLLLPIVPLSWLVWLLLLLLASLLPSARLASPLPREEEIVFPEKLNGSVLPGSGAPARLLCRLQAFGETLLLELEQDSGVQVEGLTVQYLGQAPELLGGAEPGTYLTGTINGDPESVASLHWDGGALLGVLQYRGAELHLQPLEGGTPNSAGGPGAHILRRKSPASGQGPMCNVKAPLGSPSPRPRRAKRFASLSRFVETLVVADDKMAAFHGAGLKRYLLTVMAAAAKAFKHPSIRNPVSLVVTRLVILGSGEEGPQVGPSAAQTLRSFCAWQRGLNTPEDSDPDHFDTAILFTRQDLCGVSTCDTLGMADVGTVCDPARSCAIVEDDGLQSAFTAAHELGHVFNMLHDNSKPCISLNGPLSTSRHVMAPVMAHVDPEEPWSPCSARFITDFLDNGYGHCLLDKPEAPLHLPVTFPGKDYDADRQCQLTFGPDSRHCPQLPPPCAALWCSGHLNGHAMCQTKHSPWADGTPCGPAQACMGGRCLHMDQLQDFNIPQAGGWGPWGPWGDCSRTCGGGVQFSSRDCTRPVPRNGGKYCEGRRTRFRSCNTEDCPTGSALTFREEQCAAYNHRTDLFKSFPGPMDWVPRYTGVAPQDQCKLTCQAQALGYYYVLEPRVVDGTPCSPDSSSVCVQGRCIHAGCDRIIGSKKKFDKCMVCGGDGSGCSKQSGSFRKFRYGYNNVVTIPAGATHILVRQQGNPGHRSIYLALKLPDGSYALNGEYTLMPSPTDVVLPGAVSLRYSGATAASETLSGHGPLAQPLTLQVLVAGNPQDTRLRYSFFVPRPTPSTPRPTPQDWLHRRAQILEILRRRPWAGRK

SEQ ID NO: 8342 - protein, 167 aa, Homo sapiens
MADEATRRVVSEIPVLKTNAGPRDRELWVQRLKEEYQSLIRYVENNKNADNDWFRLESNKEGTRWFGKCWYIHDLLKYEFDIEFDIPITYPTTAPEIAVPELDGKTAKMYRGGKICLTDHFKPLWARNVPKFGLAHLMALGLGPWLAVEIPDLIQKGVIQHKEKCNQ

SEQ ID NO: 8343 - protein, 348 aa, Homo sapiens
MAGLKRRASQVWPEEHGEQEHGLYSLHRMFDIVGTHLTHRDVRVLSFLFVDVIDDHERGLIRNGRDFLLALERQGRCDESNFRQVLQLLRIITRHDLLPYVTLKRRRAVCPDLVDKYLEETSIRYVTPRALSDPEPRPPQPSKTVPPHYPVVCCPTSGPQMCSKRPARGRATLGSQRKRRKSVTPDPKEKQTCGEEVQGFQRWSRLEGEYKELLGHWAVYAIQYIRLRVRAEYCQHETALQGNVFSNKQDPLERQFERFNQANTILKSRDLGSIICDIKFSELTYLDAFWRDYINGSLLEALKGVFITDSLKQAVGHEAIKLLVNVDEEDYELGRQKLLRNLMLQALP

SEQ ID NO: 8344 - protein, 318 aa, Homo sapiens
MAGLKRRASQVWPEEHGEQEHGLYSLHRMFDIVGTHLTHRDVRVLSFLFVDVIDDHERGLIRNGRDFLLALERQGRCDESNFRQVLQLLRIITRHDLLPYVTLKRRRAVCPDLVDKYLEETSIRYVTPRALSDPEPRPPQPSKTVPPHYPVVCCPTSGPQMCSKRPARGRATLGSQRKRRKSVTPDPKEKQTCDIRLRVRAEYCQHETALQGNVFSNKQDPLERQFERFNQANTILKSRDLGSIICDIKFSELTYLDAFWRDYINGSLLEALKGVFITDSLKQAVGHEAIKLLVNVDEEDYELGRQKLLRNLMLQALP

SEQ ID NO: 8345 - protein, 154 aa, Homo sapiens
MAENSGRAGKSSGSGAGKGAVSAEQVIAGFNRLRQEQRGLASKAAELEMELNEHSLVIDTLKEVDETRKCYRMVGGVLVERTVKEVLPALENNKEQIQKIIETLTQQLQAKGKELNEFREKHNIRLMGEDEKPAAKENSEGAGAKASSAGVLVS

SEQ ID NO: 8346 - protein, 510 aa, Homo sapiens
MPLSLGAEMWGPEAWLLLLLLLASFTGRCPAGELETSDVVTVVLGQDAKLPCFYRGDSGEQVGQVAWARVDAGEGAQELALLHSKYGLHVSPAYEGRVEQPPPPRNPLDGSVLLRNAVQADEGEYECRVSTFPAGSFQARLRLRVLVPPLPSLNPGPALEEGQGLTLAASCTAEGSPAPSVTWDTEVKGTTSSRSFKHSRSAAVTSEFHLVPSRSMNGQPLTCVVSHPGLLQDQRITHILHVSFLAEASVRGLEDQNLWHIGREGAMLKCLSEGQPPPSYNWTRLDGPLPSGVRVDGDTLGFPPLTTEHSGIYVCHVSNEFSSRDSQVTVDVLDPQEDSGKQVDLVSASVVVVGVIAALLFCLLVVVVVLMSRYHRRKAQQMTQKYEEELTLTRENSIRRLHSHHTDPRSQPEESVGLRAEGHPDSLKDNSSCSVMSEEPEGRSYSTLTTVREIETQTELLSPGSGRAEEEEDQDEGIKQAMNHFVQENGTLRAKPTGNGIYINGRGHLV

SEQ ID NO: 8347 - protein, 310 aa, Homo sapiens
MKGQQKTAETEEGTVQIQEGAVATGEDPTSVAIASIQSAATFPDPNVKYVFRTENGGQVMYRVIQVSEGQLDGQTEGTGAISGYPATQSMTQAVIQGAFTSDDAVDTEGTAAETHYTYFPSTAVGDGAGGTTSGSTAAVVTTQGSEALLGQATPPGTGQFFVMMSPQEVLQGGSQRSIAPRTHPYSPKSEAPRTTRDEKRRAQHNEVERRRRDKINNWIVQLSKIIPDCSMESTKSGQSKGGILSKACDYIQELRQSNHRLSEELQGLDQLQLDNDVLRQQVEDLKNKNLLLRAQLRHHGLEVVIKNDSN

SEQ ID NO: 8348 - protein, 122 aa, Homo sapiens
MAGGCRAPSSAPTVSLPELRSLLASGRARLFDVRSREEAAAGTIPGALNIPVSELESALQMEPAAFQALYSAEKPKLEDEHLVFFCQMGKRGLQATQLARSLGYTGARNYAGAYREWLEKES

SEQ ID NO: 8349 - protein, 299 aa, Homo sapiens
MGTKAQVERKLLCLFILAILLCSLALGSVTVHSSEPEVRIPENNPVKLSCAYSGFSSPRVEWKFDQGDTTRLVCYNNKITASYEDRVTFLPTGITFKSVTREDTGTYTCMVSEEGGNSYGEVKVKLIVLVPPSKPTVNIPSSATIGNRAVLTCSEQDGSPPSEYTWFKDGIVMPTNPKSTRAFSNSSYVLNPTTGELVFDPLSASDTGEYSCEARNGYGTPMTSNAVRMEAVERNVGVIVAAVLVTLILLGILVFGIWFAYSRGHFDRTKKGTSSKKVIYSQPSARSEGEFKQTSSFLV

SEQ ID NO: 8350 - protein, 325 aa, Homo sapiens
MLSMLRTMTRLCFLLFFSVATSGCSAAAASSLEMLSREFETCAFSFSSLPRSCKEIKERCHSAGDGLYFLRTKNGVVYQTFCDMTSGGGGWTLVASVHENDMRGKCTVGDRWSSQQGNKADYPEGDGNWANYNTFGSAEAATSDDYKNPGYYDIQAKDLGIWHVPNKSPMQHWRNSALLRYRTNTGFLQRLGHNLFGIYQKYPVKYRSGKCWNDNGPAIPVVYDFGDAKKTASYYSPYGQREFVAGFVQFRVFNNERAANALCAGIKVTGCNTEHHCIGGGGFFPQGKPRQCGDFSAFDWDGYGTHVKSSCSREITEAAVLLFYR

SEQ ID NO: 8351 - protein, 370 aa, Homo sapiens
MLGQVVTLILLLLLKVYQGKGCQGSADHVVSISGVPLQLQPNSIQTKVDSIAWKKLLPSQNGFHHILKWENGSLPSNTSNDRFSFIVKNLSLLIKAAQQQDSGLYCLEVTSISGKVQTATFQVFVFESLLPDKVEKPRLQGQGKILDRGRCQVALSCLVSRDGNVSYAWYRGSKLIQTAGNLTYLDEEVDINGTHTYTCNVSNPVSWESHTLNLTQDCQNAHQEFRFWPFLVIIVILSALFLGTLACFCVWRRKRKEKQSETSPKEFLTIYEDVKDLKTRRNHEQEQTFPGGGSTIYSMIQSQSSAPTSQEPAYTLYSLIQPSRKSGSRKRNHSPSFNSTIYEVIGKSQPKAQNPARLSRKELENFDVYS

SEQ ID NO: 8352 - protein, 365 aa, Homo sapiens
MLGQVVTLILLLLLKVYQGKGCQGSADHVVSISGVPLQLQPNSIQTKVDSIAWKKLLPSQNGFHHILKWENGSLPSNTSNDRFSFIVKNLSLLIKAAQQQDSGLYCLEVTSISGKVQTATFQVFVFDKVEKPRLQGQGKILDRGRCQVALSCLVSRDGNVSYAWYRGSKLIQTAGNLTYLDEEVDINGTHTYTCNVSNPVSWESHTLNLTQDCQNAHQEFRFWPFLVIIVILSALFLGTLACFCVWRRKRKEKQSETSPKEFLTIYEDVKDLKTRRNHEQEQTFPGGGSTIYSMIQSQSSAPTSQEPAYTLYSLIQPSRKSGSRKRNHSPSFNSTIYEVIGKSQPKAQNPARLSRKELENFDVYS

SEQ ID NO: 8353 - protein, 228 aa, Homo sapiens
MAGSPTCLTLIYILWQLTEHLSKPKVTMGLQSNKNGTCVTNLTCCMEHGEEDVIYTWKALGQAANESHNGSILPISWRWGESDMTFICVARNPVSRNFSSPILARKLCEGAADDPDSSMVLLCLLLVPLLLSLFVLGLFLWFLKRERQEEYIEEKKRVDICRETPNICPHSGENTEYDTIPHTNRTILKEDPANTVYSTVEIPKKMENPHSLLTMPDTPRLFAYENVI

SEQ ID NO: 8354 - protein, 335 aa, Homo sapiens
MAGSPTCLTLIYILWQLTGSAASGPVKELVGSVGGAVTFPLKSKVKQVDSIVWTFNTTPLVTIQPEGGTIIVTQNRNRERVDFPDGGYSLKLSKLKKNDSGIYYVGIYSSSLQQPSTQEYVLHVYEHLSKPKVTMGLQSNKNGTCVTNLTCCMEHGEEDVIYTWKALGQAANESHNGSILPISWRWGESDMTFICVARNPVSRNFSSPILARKLCEGAADDPDSSMVLLCLLLVPLLLSLFVLGLFLWFLKRERQEEYIEEKKRVDICRETPNICPHSGENTEYDTIPHTNRTILKEDPANTVYSTVEIPKKMENPHSLLTMPDTPRLFAYENVI

SEQ ID NO: 8355 - protein, 169 aa, Homo sapiens
MCSRGWDSCLALELLLLPLSLLVTSIQGHLVHMTVVSGSNVTLNISESLPENYKQLTWFYTFDQKIVEWDSRKSKYFESKFKGRVRLDPQSGALYISKVQKEDNSTYIMRVLKKTGNEQEWKIKLQVLGESGEPKSKSPLQWPQMDHCRASWEAWGTLGEEERKTSGQV

SEQ ID NO: 8356 - protein, 243 aa, Homo sapiens
MCSRGWDSCLALELLLLPLSLLVTSIQGHLVHMTVVSGSNVTLNISESLPENYKQLTWFYTFDQKIVEWDSRKSKYFESKFKGRVRLDPQSGALYISKVQKEDNSTYIMRVLKKTGNEQEWKIKLQVLDPVPKPVIKIEKIEDMDDNCYLKLSCVIPGESVNYTWYGDKRPFPKELQNSVLETTLMPHNYSRCYTCQVSNSVSSKNGTVCLSPPCTLARSFGVEWIASWLVVTVPTILGLLLT

SEQ ID NO: 8357 - protein, 339 aa, Homo sapiens
MAQHHLWILLLCLQTWPEAAGKDSEIFTVNGILGESVTFPVNIQEPRQVKIIAWTSKTSVAYVTPGDSETAPVVTVTHRNYYERIHALGPNYNLVISDLRMEDAGDYKADINTQADPYTTTKRYNLQIYRRLGKPKITQSLMASVNSTCNVTLTCSVEKEEKNVTYNWSPLGEEGNVLQIFQTPEDQELTYTCTAQNPVSNNSDSISARQLCADIAMGFRTHHTGLLSVLAMFFLLVLILSSVFLFRLFKRRQGSCLNTFTKNPYAASKKTIYTYIMASRNTQPAESRIYDEILQSKVLPSKEEPVNTVYSEVQFADKMGKASTQDSKPPGTSSYEIVI

SEQ ID NO: 8358 - protein, 272 aa, Homo sapiens
MAQHHLWILLLCLQTWPEAAGKDSEIFTVNGILGESVTFPVNIQEPRQVKIIAWTSKTSVAYVTPGDSETAPVVTVTHRNYYERIHALGPNYNLVISDLRMEDAGDYKADINTQADPYTTTKRYNLQIYRRLGKPKITQSLMASVNSTCNVTLTCSVEKEEKNVTYNWSPLGEEGNVLQIFQTPEDQELTYTCTAQNPVSNNSDSISARQLCADIAMGFRTHHTGLLSVLAMFFLLVLILSSVFLFRLFKRRQGASLQGRASEHSLFRSAVC

SEQ ID NO: 8359 - protein, 328 aa, Homo sapiens
MAQHHLWILLLCLQTWPEAAGKDSEIFTVNGILGESVTFPVNIQEPRQVKIIAWTSKTSVAYVTPGDSETAPVVTVTHRNYYERIHALGPNYNLVISDLRMEDAGDYKADINTQADPYTTTKRYNLQIYRRLGKPKITQSLMASVNSTCNVTLTCSVEKEEKNVTYNWSPLGEEGNVLQIFQTPEDQELTYTCTAQNPVSNNSDSISARQLCADIAMGFRTHHTGLLSVLAMFFLLVLILSSVFLFRLFKRRQDAASKKTIYTYIMASRNTQPAESRIYDEILQSKVLPSKEEPVNTVYSEVQFADKMGKASTQDSKPPGTSSYEIVI

SEQ ID NO: 8360 - protein, 221 aa, Homo sapiens
MLWLFQSLLFVFCFGPGQLRNIQVTNHSQLFQNMTCELHLTCSVEDADDNVSFRWEALGNTLSSQPNLTVSWDPRISSEQDYTCIAENAVSNLSFSVSAQKLCEDVKIQYTDTKMILFMVSGICIVFGFIILLLLVLRKRRDSLSLSTQRTQGPAESARNLEYVSVSPTNNTVYASVTHSNRETEIWTPRENDTITIYSTINHSKESKPTFSRATALDNVV

SEQ ID NO: 8361 - protein, 332 aa, Homo sapiens
MLWLFQSLLFVFCFGPGNVVSQSSLTPLMVNGILGESVTLPLEFPAGEKVNFITWLFNETSLAFIVPHETKSPEIHVTNPKQGKRLNFTQSYSLQLSNLKMEDTGSYRAQISTKTSAKLSSYTLRILRQLRNIQVTNHSQLFQNMTCELHLTCSVEDADDNVSFRWEALGNTLSSQPNLTVSWDPRISSEQDYTCIAENAVSNLSFSVSAQKLCEDVKIQYTDTKMILFMVSGICIVFGFIILLLLVLRKRRDSLSLSTQRTQGPAESARNLEYVSVSPTNNTVYASVTHSNRETEIWTPRENDTITIYSTINHSKESKPTFSRATALDNVV

SEQ ID NO: 8362 - protein, 331 aa, Homo sapiens
MLWLFQSLLFVFCFGPGNVVSQSSLTPLMVNGILGESVTLPLEFPAGEKVNFITWLFNETSLAFIVPHETKSPEIHVTNPKQGKRLNFTQSYSLQLSNLKMEDTGSYRAQISTKTSAKLSSYTLRILRQLRNIQVTNHSQLFQNMTCELHLTCSVEDADDNVSFRWEALGNTLSSQPNLTVSWDPRISSEQDYTCIAENAVSNLSFSVSAQKLCEDVKIQYTDTKMILFMVSGICIVFGFIILLLLVLRKRRDSLSLSTQRTQGPESARNLEYVSVSPTNNTVYASVTHSNRETEIWTPRENDTITIYSTINHSKESKPTFSRATALDNVV

SEQ ID NO: 8363 - protein, 1368 aa, Homo sapiens
METQLQSIFEEVVKTEVIEEAFPGMFMDTPEDEKTKLISCLGAFRQFWGGLSQESHEQCIQWIVKFIHGQHSPKRISFLYDCLAMAVETGLLPPRLVCESLINSDTLEWERTQLWALTFKLVRKIIGGVDYKGVRDLLKVILEKILTIPNTVSSAVVQQLLAAREVIAYILERNACLLPAYFAVTEIRKLYPEGKLPHWLLGNLVSDFVDTFRPTARINSICGRCSLLPVVNNSGAICNSWKLDPATLRFPLKGLLPYDKDLFEPQTALLRYVLEQPYSRDMVCNMLGLNKQHKQRCPVLEDQLVDLVVYAMERSETEEKFDDGGTSQLLWQHLSSQLIFFVLFQFASFPHMVLSLHQKLAGRGLIKGRDHLMWVLLQFISGSIQKNALADFLPVMKLFDLLYPEKEYIPVPDINKPQSTHAFAMTCIWIHLNRKAQNDNSKLQIPIPHSLRLHHEFLQQSLRNKSLQMNDYKIALLCNAYSTNSECFTLPMGALVETIYGNGIMRIPLPGTNCMASGSITPLPMNLLDSLTVHAKMSLIHSIATRVIKLAHAKSSVALAPALVETYSRLLVYMEIESLGIKGFISQLLPTVFKSHAWGILHTLLEMFSYRMHHIQPHYRVQLLSHLHTLAAVAQTNQNQLHLCVESTALRLITALGSSEVQPQFTRFLSDPKTVLSAESEELNRALILTLARATHVTDFFTGSDSIQGTWCKDILQTIMSFTPHNWASHTLSCFPGPLQAFFKQNNVPQESRFNLKKNVEEEYRKWKSMSNENDIITHFSMQGSPPLFLCLLWKMLLETDHINQIGYRVLERIGARALVAHVRTFADFLVYEFSTSAGGQQLNKCIEILNDMVWKYNIVTLDRLILCLAMRSHEGNEAQVCYFIIQLLLLKPNDFRNRVSDFVKENSPEHWLQNDWHTKHMNYHKKYPEKLYFEGLAEQVDPPVQIQSPYLPIYFGNVCLRFLPVFDIVIHRFLELLPVSKSLETLLDHLGGLYKFHDRPVTYLYNTLHYYEMHLRDRAFLKRKLVHAIIGSLKDNRPQGWCLSDTYLKCAMNAREENPWVPDDTYYCRLIGRLVDTMAGKSPGPFPNCDWRFNEFPNPAAHALHVTCVELMALAVSGKEVGNALLNVVLKSQPLVPRENITAWMNAIGLIITALPEPYWIVLHDRIVSVISSPSLTSETEWVGYPFRLFDFTACHQSYSEMSCSYTLALAHAVWHHSSIGQLSLIPKFLTEVLLPIVKTEFQLLYVYHLVGPFLQRFQQERTRCMIEIGVAFYDMLLNVDQCSTHLNYMDPICDFLYHMKYMFTGDSVKEQVEKIICNLKPALKLRLRFITHISKMEPAAVPPQAMNSGSPAPQSNQVPVSLPVTQ

SEQ ID NO: 8364 - protein, 1233 aa, Homo sapiens
MLTKFETKSARVKGLSFHPKRPWILTSLHNGVIQLWDYRMCTLIDKFDEHDGPVRGIDFHKQQPLFVSGGDDYKIKVWNYKLRRCLFTLLGHLDYIRTTFFHHEYPWILSASDDQTIRVWNWQSRTCVCVLTGHNHYVMCAQFHPTEDLVVSASLDQTVRVWDISGLRKKNLSPGAVESDVRGITGVDLFGTTDAVVKHVLEGHDRGVNWAAFHPTMPLIVSGADDRQVKIWRMNESKAWEVDTCRGHYNNVSCAVFHPRQELILSNSEDKSIRVWDMSKRTGVQTFRRDHDRFWVLAAHPNLNLFAAGHDGGMIVFKLERERPAYAVHGNMLHYVKDRFLRQLDFNSSKDVAVMQLRSGSKFPVFNMSYNPAENAVLLCTRASNLENSTYDLYTIPKDADSQNPDAPEGKRSSGLTAVWVARNRFAVLDRMHSLLIKNLKNEITKKVQVPNCDEIFYAGTGNLLLRDADSITLFDVQQKRTLASVKISKVKYVIWSADMSHVALLAKHEHSCPLPLTAIVICNRKLDALCNIHENIRVKSGAWDESGVFIYTTSNHIKYAVTTGDHGIIRTLDLPIYVTRVKGNNVYCLDRECRPRVLTIDPTEFKFKLALINRKYDEVLHMVRNAKLVGQSIIAYLQKKGYPEVALHFVKDEKTRFSLALECGNIEIALEAAKALDDKNCWEKLGEVALLQGNHQIVEMCYQRTKNFDKLSFLYLITGNLEKLRKMMKIAEIRKDMSGHYQNALYLGDVSERVRILKNCGQKSLAYLTAATHGLDEEAESLKETFDPEKETIPDIDPNAKLLQPPAPIMPLDTNWPLLTVSKGFFEGTIASKGKGGALAADIDIDTVGTEGWGEDAELQLDEDGFVEATEGLGDDALGKGQEEGGGWDVEEDLELPPELDISPGAAGGAEDGFFVPPTKGTSPTQIWCNNSQLPVDHILAGSFETAMRLLHDQVGVIQFGPYKQLFLQTYARGRTTYQALPCLPSMYGYPNRNWKDAGLKNGVPAVGLKLNDLIQRLQLCYQLTTVGKFEEAVEKFRSILLSVPLLVVDNKQEIAEAQQLITICREYIVGLSVETERKKLPKETLEQQKRICEMAAYFTHSNLQPVHMILVLRTALNLFFKLKNFKTAATFARRLLELGPKPEVAQQTRKILSACEKNPTDAYQLNYDMHNPFDICAASYRPIYRGKPVEKCPLSGACYSPEFKGQICRVTTVTEIGKDVIGLRISPLQFR

SEQ ID NO: 8365 - protein, 299 aa, Homo sapiens
MAAAEEGCSVGAEADRELEELLESALDDFDKAKPSPAPPSTTTAPDASGPQKRSPGDTAKDALFASQEKFFQELFDSELASQATAEFEKAMKELAEEEPHLVEQFQKLSEAAGRVGSDMTSQQEFTSCLKETLSGLAKNATDLQNSSMSEEELTKAMEGLGMDEGDGEGNILPIMQSIMQNLLSKDVLYPSLKEITEKYPEWLQSHRESLPPEQFEKYQEQHSVMCKICEQFEAETPTDSETTQKARFEMVLDLMQQLQDLGHPPKELAGEMPPGLNFDLDALNLSGPPGASGEQCLIM

SEQ ID NO: 8366 - protein, 108 aa, Homo sapiens
MAEYGTLLQDLTNNITLEDLEQLKSACKEDIPSEKNNLSYIEHIFEISRRPDLLTMVVDYRTRVLKISEEDELDTKLTRIPSAKKYKDIIRQPSEEEIIKLAPPPKKA

SEQ ID NO: 8367 - protein, 396 aa, Homo sapiens
MSATDRMGPRAVPGLRLALLLLLVLGTPKSGVQGQEGLDFPEYDGVDRVINVNAKNYKNVFKKYEVLALLYHEPPEDDKASQRQFEMEELILELAAQVLEDKGVGFGLVDSEKDAAVAKKLGLTEVDSMYVFKGDEVIEYDGEFSADTIVEFLLDVLEDPVELIEGERELQAFENIEDEIKLIGYFKSKDSEHYKAFEDAAEEFHPYIPFFATFDSKVAKKLTLKLNEIDFYEAFMEEPVTIPDKPNSEEEIVNFVEEHRRSTLRKLKPESMYETWEDDMDGIHIVAFAEEADPDGFEFLETLKAVAQDNTENPDLSIIWIDPDDFPLLVPYWEKTFDIDLSAPQIGVVNVTDADSVWMEMDDEEDLPSAEELEDWLEDVLEGEINTEDDDDDDDD

SEQ ID NO: 8368 - protein, 322 aa, Homo sapiens
MSAKSRTIGIIGAPFSKGQPRGGVEEGPTVLRKAGLLEKLKEQECDVKDYGDLPFADIPNDSPFQIVKNPRSVGKASEQLAGKVAEVKKNGRISLVLGGDHSLAIGSISGHARVHPDLGVIWVDAHTDINTPLTTTSGNLHGQPVSFLLKELKGKIPDVPGFSWVTPCISAKDIVYIGLRDVDPGEHYILKTLGIKYFSMTEVDRLGIGKVMEETLSYLLGRKKRPIHLSFDVDGLDPSFTPATGTPVVGGLTYREGLYITEEIYKTGLLSGLDIMEVNPSLGKTPEEVTRTVNTAVAITLACFGLAREGNHKPIDYLNPPK

SEQ ID NO: 8369 - protein, 423 aa, Homo sapiens [sequence omitted]

SEQ ID NO: 8370 - protein, 198 aa, Homo sapiens
MCAFPWLLLLLLLQEGSQRRLWRWCGSEEVVAVLQESISLPLEIPPDEEVENIIWSSHKSLATVVPGKEGHPATIMVTNPHYQGQVSFLDPSYSLHISNLSWEDSGLYQAQVNLRTSQISTMQQYNICVYHPNYASEKPSTAFCLLAKGLLIFLLLVILAMGLWVIRVQKRHKMPRMKKLMRNRMKLRKEAKPGSSPA

SEQ ID NO: 8371 - protein, 289 aa, Homo sapiens
MCAFPWLLLLLLLQEGSQRRLWRWCGSEEVVAVLQESISLPLEIPPDEEVENIIWSSHKSLATVVPGKEGHPATIMVTNPHYQGQVSFLDPSYSLHISNLSWEDSGLYQAQVNLRTSQISTMQQYNICVYRWLSEPQITVNFESSGEGACSMSLVCSVEKAGMDMTYSWLSRGDSTYTFHEGPVLSTSWRPGDSALSYTCRANNPISNVSSCPIPDGPFYADPNYASEKPSTAFCLLAKGLLIFLLLVILAMGLWVIRVQKRHKMPRMKKLMRNRMKLRKEAKPGSSPA

SEQ ID NO: 8372 - protein, 1179 aa, Homo sapiens
MVWCLGLAVLSLVISQGADGRGKPEVVSVVGRAGESVVLGCDLLPPAGRPPLHVIEWLRFGFLLPIFIQFGLYSPRIDPDYVGRVRLQKGASLQIEGLRVEDQGWYECRVFFLDQHIPEDDFANGSWVHLTVNSPPQFQETPPAVLEVQELEPVTLRCVARGSPLPHVTWKLRGKDLGQGQGQVQVQNGTLRIRRVERGSSGVYTCQASSTEGSATHATQLLVLGPPVIVVPPKNSTVNASQDVSLACHAEAYPANLTYSWFQDNINVFHISRLQPRVRILVDGSLRLLATQPDDAGCYTCVPSNGLLHPPSASAYLTVLYPAQVTAMPPETPLPIGMPGVIRCPVRANPPLLFVSWTKDGKALQLDKFPGWSQGTEGSLIIALGNEDALGEYSCTPYNSLGTAGPSPVTRVLLKAPPAFIERPKEEYFQEVGRELLIPCSAQGDPPPVVSWTKVGRGLQGQAQVDSNSSLILRPLTKEAHGHWECSASNAVARVATSTNVYVLGTSPHVVTNVSVVALPKGANVSWEPGFDGGYLQRFSVWYTPLAKRPDRMHHDWVSLAVPVGAAHLLVPGLQPHTQYQFSVLAQNKLGSGPFSEIVLSAPEGLPTTPAAPGLPPTEIPPPLSPPRGLVAVRTPRGVLLHWDPPELVPKRLDGYVLEGRQGSQGWEVLDPAVAGTETELLVPGLIKDVLYEFRLVAFAGSFVSDPSNTANVSTSGLEVYPSRTQLPGLLPQPVLAGVVGGVCFLGVAVLVSILAGCLLNRRRAARRRRKRLRQDPPLIFSPTGKSAAPSALGSGSPDSVAKLKLQGSPVPSLRQSLLWGDPAGTPSPHPDPPSSRGPLPLEPICRGPDGRFVMGPTVAAPQERSGREQAEPRTPAQRLARSFDCSSSSPSGAPQPLCIEDISPVAPPPAAPPSPLPGPGPLLQYLSLPFFREMNVDGDWPPLEEPSPAAPPDYMDTRRCPTSSFLRSPETPPVSPRESLPGAVVGAGATAEPPYTALADWTLRERLLPGLLPAAPRGSLTSQSSGRGSASFLRPPSTAPSAGGSYLSPAPGDTSSWASGPERWPRREHVVTVSKRRNTSVDENYEWDSEFPGDMELLETLHLGLASSRLRPEAEPELGVKTPEEGCLLNTAHVTGPEARCAALREEFLAFRRRRDATRARLPAYRQPVPHPEQATLL

SEQ ID NO: 8373 - protein, 199 aa, Homo sapiens
MANRGPAYGLSREVQQKIEKQYDADLEQILIQWITTQCRKDVGRPQPGRENFQNWLKDGTVLCELINALYPEGQAPVKKIQASTMAFKQMEQISQFLQAAERYGINTTDIFQTVDLWEGKNMACVQRTLMNLGGLAVARDDGLFSGDPNWFPKKSKENPRNFSDNQLQEGKNVIGLQMGTNRGASQAGMTGYGMPRQIL

SEQ ID NO: 8374 - protein, 414 aa, Homo sapiens
MRVGGAFHLLLVCLSPALLSAVRINGDGQEVLYLAEGDNVRLGCPYVLDPEDYGPNGLDIEWMQVNSDPAHHRENVFLSYQDKRINHGSLPHLQQRVRFAASDPSQYDASINLMNLQVSDTATYECRVKKTTMATRKVIVTVQARPAVPMCWTEGHMTYGNDVVLKCYASGGSQPLSYKWAKISGHHYPYRAGSYTSQHSYHSELSYQESFHSSINQGLNNGDLVLKDISRADDGLYQCTVANNVGYSVCVVEVKVSDSRRIGVIIGIVLGSLLALGCLAVGIWGLVCCCCGGSGAGGARGAFGYGNGGGVGGGACGDLASEIREDAVAPGCKASGRGSRVTHLLGYPTQNVSRSLRRKYAPPPCGGPEDVALAPCTAAAACEAGPSPVYVKVKSAEPADCAEGPVQCKNGLLV

SEQ ID NO: 8375 - protein, 434 aa, Homo sapiens
MLLWTAVLLFVPCVGKTVWLYLQAWPNPVFEGDALTLRCQGWKNTPLSQVKFYRDGKFLHFSKENQTLSMGAATVQSRGQYSCSGQVMYIPQTFTQTSETAMVQVQELFPPPVLSAIPSPEPREGSLVTLRCQTKLHPLRSALRLLFSFHKDGHTLQDRGPHPELCIPGAKEGDSGLYWCEVAPEGGQVQKQSPQLEVRVQAPVSRPVLTLHHGPADPAVGDMVQLLCEAQRGSPPILYSFYLDEKIVGNHSAPCGGTTSLLFPVKSEQDAGNYSCEAENSVSRERSEPKKLSLKGSQVLFTPASNWLVPWLPASLLGLMVIAAALLVYVRSWRKAGPLPSQIPPTAPGGEQCPLYANVHHQKGKDEGVVYSVVHRTSKRSEARSAEFTVGRKDSSIICAEVRCLQPSEVSSTEVNMRSRTLQEPLSDCEEVLC

SEQ ID NO: 8376 - protein, 150 aa, Homo sapiens
MGVQPPNFSWVLPGRLAGLALPRLPAHYQFLLDLGVRHLVSLTERGPPHSDSCPGLTLHRLRIPDFCPPAPDQIDRFVQIVDEANARGEAVGVHCALGFGRTGTMLACYLVKERGLAAGDAIAEIRRLRPGSIETYEQEKAVFQFYQRTK

SEQ ID NO: 8377 - protein, 102 aa, Homo sapiens
MEKLLCFLVLTSLSHAFGQTDMSRKAFVFPKESDTSYVSLKAPLTKPLKAFTVCLHFYTELSSTHEINTIYLGGPFSPNVLNWRALKYEVQGEVFTKPQLWP

SEQ ID NO: 8378 - protein, 91 aa, Homo sapiens
MEKLLCFLVLTSLSHAFGQTDMSRKAFVFPKESDTSYVSLKAPLTKPLKAFTVCLHFYTELSSTRGPNVLNWRALKYEVQGEVFTKPQLWP

SEQ ID NO: 8379 - protein, 224 aa, Homo sapiens
MAPAMESPTLLCVALLFFAPDGVLAVSSTKWFHNGSLSEETNSSLNIVNAKFEDSGEYKCQHQQVNESEPVYLEVFSDWLLLQASAEVVMEGQPLFLRCHGWRNWDVYKVIYYKDGEALKYWYENHNISITNATVEDSGTYYCTGKVWQLDYESEPLNITVIKAPREKYWLQFFIPLLVVILFAVDTGLFISTQQQVTFLLKIKRTRKGFRLLNPHPKPNPKNN

SEQ ID NO: 8380 - protein, 257 aa, Homo sapiens
MAPAMESPTLLCVALLFFAPDGVLAVPQKPKVSLNPPWNRIFKGENVTLTCNGNNFFEVSSTKWFHNGSLSEETNSSLNIVNAKFEDSGEYKCQHQQVNESEPVYLEVFSDWLLLQASAEVVMEGQPLFLRCHGWRNWDVYKVIYYKDGEALKYWYENHNISITNATVEDSGTYYCTGKVWQLDYESEPLNITVIKAPREKYWLQFFIPLLVVILFAVDTGLFISTQQQVTFLLKIKRTRKGFRLLNPHPKPNPKNN

SEQ ID NO: 8381 - protein, 432 aa, Homo sapiens
MGAPAASLLLLLLLFACCWAPGGANLSQDGYWQEQDLELGTLAPLDEAISSTVWSSPDMLASQDSQPWTSDETVVAGGTVVLKCQVKDHEDSSLQWSNPAQQTLYFGEKRALRDNRIQLVTSTPHELSISISNVALADEGEYTCSIFTMPVRTAKSLVTVLGIPQKPIITGYKSSLREKDTATLNCQSSGSKPAARLTWRKGDQELHGEPTRIQEDPNGKTFTVSSSVTFQVTREDDGASIVCSVNHESLKGADRSTSQRIEVLYTPTAMIRPDPPHPREGQKLLLHCEGRGNPVPQQYLWEKEGSVPPLKMTQESALIFPFLNKSDSGTYGCTATSNMGSYKAYYTLNVNDPSPVPSSSSTYHAIIGGIVAFIVFLLLIMLIFLGHYLIRHKGTYLTHEAKGSDDAPDADTAIINAEGGQSGGDDKKEYFI

SEQ ID NO: 8382 - protein, 398 aa, Homo sapiens
MGAPAASLLLLLLLFACCWAPGGANLSQDDSQPWTSDETVVAGGTVVLKCQVKDHEDSSLQWSNPAQQTLYFGEKRALRDNRIQLVTSTPHELSISISNVALADEGEYTCSIFTMPVRTAKSLVTVLGIPQKPIITGYKSSLREKDTATLNCQSSGSKPAARLTWRKGDQELHGEPTRIQEDPNGKTFTVSSSVTFQVTREDDGASIVCSVNHESLKGADRSTSQRIEVLYTPTAMIRPDPPHPREGQKLLLHCEGRGNPVPQQYLWEKEGSVPPLKMTQESALIFPFLNKSDSGTYGCTATSNMGSYKAYYTLNVNDPSPVPSSSSTYHAIIGGIVAFIVFLLLIMLIFLGHYLIRHKGTYLTHEAKGSDDAPDADTAIINAEGGQSGGDDKKEYFI

SEQ ID NO: 8383 - protein, 755 aa, Homo sapiens
MTESASSTSGQEFDVFSVMDWKDGVGTLPGSDLKFRVNEFGALEVITDENEMENVKKATATTTWMVPTAQEVFSEKTGMPFRLKDPVKVEGLQFCENCCQYGNVDECLSGGNYCSQNCARHIKDKDQKEERDVEEDNEEEDPKCSRKKKPKLSLKADTKEDGEERDDEMENKQDVRILRGSQRARRKRRGDSAVLKQGLPPKGKKAWCWASYLEEEKAVAVPAKLFKEHQSFPYNKNGFKVGMKLEGVDPEHQSVYCVLTVAEVCGYRIKLHFDGYSDCYDFWVNADALDIHPVGWCEKTGHKLHPPKGYKEEEFNWQTYLKTCKAQAAPKSLFENQNITVIPSGFRVGMKLEAVDKKNPSFICVATVTDMVDNRFLVHFDNWDESYDYWCEASSPHIHPVGWCKEHRRTLITPPGYPNVKHFSWDKYLEETNSLPAPARAFKVKPPHGFQKKMKLEVVDKRNPMFIRVATVADTDDHRVKVHFDGWNNCYDYWIDADSPDIHPVGWCSKTGHPLQPPLSPLELMEASEHGGCSTPGCKGIGHFKRARHLGPHSAANCPYSEINLNKDRIFPDRLSGEMPPASPSFPRNKRTDANESSSSPEIRDQHADDVKEDFEERTESEMRTSHEARGAREEPTVQQAQRRSAVFLSFKSPIPCLPLRWEQQSKLLPTVAGIPASKVSKWSTDEVSEFIQSLPGCEEHGKVFKDEQIDGEAFLLMTQTDIVKIMSIKLGPALKIFNSILMFKAAEKNSHNEL

SEQ ID NO: 8384 - protein, 663 aa, Homo sapiens
MSWLSSSQGVVLTAYHPSGKDQTVGNSHAKAGEEATSSRRYGQYTMNQESTTIKVMEKPPFDRSISQDSLDELSMEDYWIELENIKKSSENSQEDQEVVVVKEPDEGELEEEWLKEAGLSNLFGESAGDPQESIVFLSTLTRTQAAAVQKRVETVSQTLRKKNKQYQIPDVRDIFAQQRESKETAPGGTESQSLRTNENKYQGRDDEASNLVGEEKLIPPEETPAPETDINLEVSFAEQALNQKESSKEKIQKSKGDDATLPSFRLPKDKTGTTRIGDLAPQDMKKVCHLALIELTALYDVLGIELKQQKAVKIKTKDSGLFCVPLTALLEQDQRKVPGMRIPLIFQKLISRIEERGLETEGLLRIPGAAIRIKNLCQELEAKFYEGTFNWESVKQHDAASLLKLFIRELPQPLLSVEYLKAFQAVQNLPTKKQQLQALNLLVILLPDANRDTLKALLEFLQRVIDNKEKNKMTVMNVAMVMAPNLFMCHALGLKSSEQREFVMAAGTANTMHLLIKYQKLLWTIPKFIVNQVRKQNTENHKKDKRAMKKLLKKMAYDREKYEKQDKSTNDADVPQGVIRVQAPHLSKVSMAIQLTEELKASDVLARFLSQESGVAQTLKKGEVFLYEIGGNIGERCLDDDTYMKDLYQLNPNAEWVIKSKPL

SEQ ID NO: 8385 - protein, 231 aa, Homo sapiens
MLLLFLLFEGLCCPGENTAAPQALQSYHLAAEEQLSFRMLQTSSFANHSWAHSEGSGWLGDLQTHGWDTVLGTIRFLKPWSHGNFSKQELKNLQSLFQLYFHSFIQIVQASAGQFQLELKPEAWLSCGPSPGPGRLQLVCHVSGFYPKPVWVMWMRGGYSIFLILICLTVIVTLVILVVVDSRLKKQSPVFLMGANTQDTKNSRHQFCLAQVSWIKNRVLKKWKTRLNQLW

SEQ ID NO: 8386 - protein, 286 aa, Homo sapiens
MLLLFLLFEGLCCPGENTAAPQALQSYHLAAEEQLSFRMLQTSSFANHSWAHSEGSGWLGDLQTHGWDTVLGTIRFLKPWSHGNFSKQELKNLQSLFQLYFHSFIQIVQASAGQFQLELKPEAWLSCGPSPGPGRLQLVCHVSGFYPKPVWVMWMRGEQEQRGTQRGDVLPNADETWYLRATLDVAAGEAAGLSCRVKHSSLGGHDLIIHWGGYSIFLILICLTVIVTLVILVVVDSRLKKQSPVFLMGANTQDTKNSRHQFCLAQVSWIKNRVLKKWKTRLNQLW

SEQ ID NO: 8387 - protein, 376 aa, Homo sapiens
MLLLFLLFEGLCCPGENTAAPQALQSYHLAAEEQLSFRMLQTSSFANHSWAHSEGSGWLGDLQTHGWDTVLGTIRFLKPWSHGNFSKQELKNLQSLFQLYFHSFIQIVQASAGQFQLEYPFEIQILAGCRMNAPQIFLNMAYQGSDFLSFQGISWEPSPGAGIRAQNICKVLNRYLDIKEILQSLLGHTCPRFLAGLMEAGESELKRKVKPEAWLSCGPSPGPGRLQLVCHVSGFYPKPVWVMWMRGEQEQRGTQRGDVLPNADETWYLRATLDVAAGEAAGLSCRVKHSSLGGHDLIIHWGGYSIFLILICLTVIVTLVILVVVDSRLKKQSPVFLMGANTQDTKNSRHQFCLAQVSWIKNRVLKKWKTRLNQLW

SEQ ID NO: 8388 - protein, 290 aa, Homo sapiens
MLLLFLLFEGLCCPGENTAAPQALQSYHLAAEEQLSFRMLQTSSFANHSWAHSEGSGWLGDLQTHGWDTVLGTIRFLKPWSHGNFSKQELKNLQSLFQLYFHSFIQIVQASAGQFQLEYPFEIQILAGCRMNAPQIFLNMAYQGSDFLSFQGISWEPSPGAGIRAQNICKVLNRYLDIKEILQSLLGHTCPRFLAGLMEAGESELKRKVKPEAWLSCGPSPGPGRLQLVCHVSGFYPKPVWVMWMRGEQEQRGTQRGDVLPNADETWWIFHLSHPDLFDCDSYPGHIGCS

SEQ ID NO: 8389 - protein, 321 aa, Homo sapiens
MLLLFLLFEGLCCPGENTAAPQALQSYHLAAEEQLSFRMLQTSSFANHSWAHSEGSGWLGDLQTHGWDTVLGTIRFLKPWSHGNFSKQELKNLQSLFQLYFHSFIQIVQASAGQFQLEYPFEIQILAGCRMNAPQIFLNMAYQGSDFLSFQGISWEPSPGAGIRAQNICKVLNRYLDIKEILQSLLGHTCPRFLAGLMEAGESELKRKVKPEAWLSCGPSPGPGRLQLVCHVSGFYPKPVWVMWMRGGYSIFLILICLTVIVTLVILVVVDSRLKKQSPVFLMGANTQDTKNSRHQFCLAQVSWIKNRVLKKWKTRLNQLW

SEQ ID NO: 8390 - protein, 101 aa, Homo sapiens
MLLLFLLFEGLCCPGENTAVKPEAWLSCGPSPGPGRLQLVCHVSGFYPKPVWVMWMRGEQEQRGTQRGDVLPNADETWWIFHLSHPDLFDCDSYPGHIGCS

SEQ ID NO: 8391 - protein, 298 aa, Homo sapiens
MLLLFLLFEGLCCPGENTAAPQALQSYHLAAEEQLSFRMLQTSSFANHSWAHSEGSGWLGDLQTHGWDTVLGTIRFLKPWSHGNFSKQELKNLQSLFQLYFHSFIQIVQASAGQFQLELKPEAWLSCGPSPGPGRLQLVCHVSGFYPKPVWVMWMRGEQEQRGTQRGDVLPNADETWYLRATLDVAAGEAAGLSCRVKHSSLGGHDLIIHWGGYSIFLILICLTVIVTLVILVVVDSRLKKQSSNKNILSPHTPSPVFLMGANTQDTKNSRHQFCLAQVSWIKNRVLKKWKTRLNQLW

SEQ ID NO: 8392 - protein, 187 aa, Homo sapiens
MLLLFLLFEGLCCPGENTAVKPEAWLSCGPSPGPGRLQLVCHVSGFYPKPVWVMWMRGEQEQRGTQRGDVLPNADETWYLRATLDVAAGEAAGLSCRVKHSSLGGHDLIIHWGGYSIFLILICLTVIVTLVILVVVDSRLKKQSPVFLMGANTQDTKNSRHQFCLAQVSWIKNRVLKKWKTRLNQLW

SEQ ID NO: 8393 - protein, 388 aa, Homo sapiens
MLLLFLLFEGLCCPGENTAAPQALQSYHLAAEEQLSFRMLQTSSFANHSWAHSEGSGWLGDLQTHGWDTVLGTIRFLKPWSHGNFSKQELKNLQSLFQLYFHSFIQIVQASAGQFQLEYPFEIQILAGCRMNAPQIFLNMAYQGSDFLSFQGISWEPSPGAGIRAQNICKVLNRYLDIKEILQSLLGHTCPRFLAGLMEAGESELKRKVKPEAWLSCGPSPGPGRLQLVCHVSGFYPKPVWVMWMRGEQEQRGTQRGDVLPNADETWYLRATLDVAAGEAAGLSCRVKHSSLGGHDLIIHWGGYSIFLILICLTVIVTLVILVVVDSRLKKQSSNKNILSPHTPSPVFLMGANTQDTKNSRHQFCLAQVSWIKNRVLKKWKTRLNQLW

SEQ ID NO: 8394 - protein, 333 aa, Homo sapiens
MLFLQFLLLALLLPGGDNADASQEHVSFHVIQIFSFVNQSWARGQGSGWLDELQTHGWDSESGTIIFLHNWSKGNFSNEELSDLELLFRFYLFGLTREIQDHASQDYSKYPFEVQVKAGCELHSGKSPEGFFQVAFNGLDLLSFQNTTWVPSPGCGSLAQSVCHLLNHQYEGVTETVYNLIRSTCPRFLLGLLDAGKMYVHRQVRPEAWLSSRPSLGSGQLLLVCHASGFYPKPVWVTWMRNEQEQLGTKHGDILPNADGTWYLQVILEVASEEPAGLSCRVRHSSLGGQDIILYWGHHFSMNWIALVVIVPLVILIVLVLWFKKHCSYQDIL

SEQ ID NO: 8395 - protein, 335 aa, Homo sapiens
MGCLLFLLLWALLQAWGSAEVPQRLFPLRCLQISSFANSSWTRTDGLAWLGELQTHSWSNDSDTVRSLKPWSQGTFSDQQWETLQHIFRVYRSSFTRDVKEFAKMLRLSYPLELQVSAGCEVHPGNASNNFFHVAFQGKDILSFQGTSWEPTQEAPLWVNLAIQVLNQDKWTRETVQWLLNGTCPQFVSGLLESGKSELKKQVKPKAWLSRGPSPGPGRLLLVCHVSGFYPKPVWVKWMRGEQEQQGTQPGDILPNADETWYLRATLDVVAGEAAGLSCRVKHSSLEGQDIVLYWGGSYTSMGLIALAVLACLLFLLIVGFTSRFKRQTSYQGVL

SEQ ID NO: 8396 - protein, 571 aa, Homo sapiens
MNEAIPSGKETSIELDVHHPPTVTLSIEPQTVQEGERVVFTCQATANPEILGYRWAKGGFLIEDAHESRYETNVDYSFFTEPVSCEVHNKVGSTNVSTLVNVHFAPRIVVDPKPTTTDIGSDVTLTCVWVGNPPLTLTWTKKDSNMGPRPPGSPPEAALSAQVLSNSNQLLLKSVTQADAGTYTCRAIVPRIGVAEREVPLYVNGPPIISSEAVQYAVRGDGGKVECFIGSTPPPDRIAWAWKENFLEVGTLERYTVERTNSGSGVLSTLTINNVMEADFQTHYNCTAWNSFGPGTAIIQLEEREVLPVGIIAGATIGASILLIFFFIALVFFLYRRRKGSRKDVTLRKLDIKVETVNREPLTMHSDREDDTASVSTATRVMKAIYSSFKDDVDLKQDLRCDTIDTREEYEMKDPTNGYYNVRAHEDRPSSRAVLYADYRAPGPARFDGRPSSRLSHSSGYAQLNTYSRGPASDYGPEPTPPGPAAPAGTDTTSQLSYENYEKFNSHPFPGAAGYPTYRLGYPQAPPSGLERTPYEAYDPIGKYATATRFSYTSQHSDYGQRFQQRMQTHV

SEQ ID NO: 8397 - protein, 657 aa, Homo sapiens
MLSLLVWILTLSDTFSQVPPEDTRIDGGPVILLQAGTPHNLTCRAFNAKPAATIIWFRDGTQQEGAVASTELLKDGKRETTVSQLLINPTDLDIGRVFTCRSMNEAIPSGKETSIELDVHHPPTVTLSIEPQTVQEGERVVFTCQATANPEILGYRWAKGGFLIEDAHESRYETNVDYSFFTEPVSCEVHNKVGSTNVSTLVNVHFAPRIVVDPKPTTTDIGSDVTLTCVWVGNPPLTLTWTKKDSNMVLSNSNQLLLKSVTQADAGTYTCRAIVPRIGVAEREVPLYVNGPPIISSEAVQYAVRGDGGKVECFIGSTPPPDRIAWAWKENFLEVGTLERYTVERTNSGSGVLSTLTINNVMEADFQTHYNCTAWNSFGPGTAIIQLEEREVLPVGIIAGATIGASILLIFFFIALVFFLYRRRKGSRKDVTLRKLDIKVETVNREPLTMHSDREDDTASVSTATRVMKAIYSSFKDDVDLKQDLRCDTIDTREEYEMKDPTNGYYNVRAHEDRPSSRAVLYADYRAPGPARFDGRPSSRLSHSSGYAQLNTYSRGPASDYGPEPTPPGPAAPAGTDTTSQLSYENYEKFNSHPFPGAAGYPTYRLGYPQAPPSGLERTPYEAYDPIGKYATATRFSYTSQHSDYGQRFQQRMQTHV

SEQ ID NO: 8398 - protein, 347 aa, Homo sapiens
MALLFSLILAICTRPGFLASPSGVRLVGGLHRCEGRVEVEQKGQWGTVCDDGWDIKDVAVLCRELGCGAASGTPSGILYEPPAEKEQKVLIQSVSCTGTEDTLAQCEQEEVYDCSHDEDAGASCENPESSFSPVPEGVRLADGPGHCKGRVEVKHQNQWYTVCQTGWSLRAAKVVCRQLGCGRAVLTQKRCNKHAYGRKPIWLSQMSCSGREATLQDCPSGPWGKNTCNHDEDTWVECEDPFDLRLVGGDNLCSGRLEVLHKGVWGSVCDDNWGEKEDQVVCKQLGCGKSLSPSFRDRKCYGPGVGRIWLDNVRCSGEEQSLEQCQHRFWGFHDCTHQEDVAVICSG

SEQ ID NO: 8399 - protein, 429 aa, Homo sapiens
MLPRLLLLICAPLCEPAELFLIASPSHPTEGSPVTLTCKMPFLQSSDAQFQFCFFRDTRALGPGWSSSPKLQIAAMWKEDTGSYWCEAQTMASKVLRSRRSQINVHRVPVADVSLETQPPGGQVMEGDRLVLICSVAMGTGDITFLWYKGAVGLNLQSKTQRSLTAEYEIPSVRESDAEQYYCVAENGYGPSPSGLVSITVRIPVSRPILMLRAPRAQAAVEDVLELHCEALRGSPPILYWFYHEDITLGSRSAPSGGGASFNLSLTEEHSGNYSCEANNGLGAQRSEAVTLNFTVPTGARSNHLTSGVIEGLLSTLGPATVALLFCYGLKRKIGRRSARDPLRSLPSPLPQEFTYLNSPTPGQLQPIYENVNVVSGDEVYSLAYYNQPEQESVAAETLGTHMEDKVSLDIYSRLRKANITDVDYEDAM

SEQ ID NO: 8400 - protein, 202 aa, Homo sapiens
MLLWSLLVIFDAVTEQADSLTLVAPSSVFEGDSIVLKCQGEQNWKIQKMAYHKDNKELSVFKKFSDFLIQSAVLSDSGNYFCSTKGQLFLWDKTSNIVKIKVQGPDGYRRDLMTAGVLWGLFGVLGFTGVALLLYALFHKISGESSATNEPRGASRPNPQEFTYSSPTPDMEELQPVYVNANIRTLLENKDSQVIYSSVKKS

SEQ ID NO: 8401 - protein, 734 aa, Homo sapiens
MLLWLLLLILTPGREQSGVAPKAVLLLNPPWSTAFKGEKVALICSSISHSLAQGDTYWYHDEKLLKIKHDKIQITEPGNYQCKTRGSSLSDAVHVEFSPDWLILQALHPVFEGDNVILRCQGKDNKNTHQKVYYKDGKQLPNSYNLEKITVNSVSRDNSKYHCTAYRKFYILDIEVTSKPLNIQVQELFLHPVLRASSSTPIEGSPMTLTCETQLSPQRPDVQLQFSLFRDSQTLGLGWSRSPRLQIPAMWTEDSGSYWCEVETVTHSIKKRSLRSQIRVQRVPVSNVNLEIRPTGGQLIEGENMVLICSVAQGSGTVTFSWHKEGRVRSLGRKTQRSLLAELHVLTVKESDAGRYYCAADNVHSPILSTWIRVTVRIPVSHPVLTFRAPRAHTVVGDLLELHCESLRGSPPILYRFYHEDVTLGNSSAPSGGGASFNLSLTAEHSGNYSCDADNGLGAQHSHGVSLRVTVPVSRPVLTLRAPGAQAVVGDLLELHCESLRGSFPILYWFYHEDDTLGNISAHSGGGASFNLSLTTEHSGNYSCEADNGLGAQHSKVVTLNVTGTSRNRTGLTAAGITGLVLSILVLAAAAALLHYARARRKPGGLSATGTSSHSPSECQEPSSSRPSRIDPQEPTHSKPLAPMELEPMYSNVNPGDSNPIYSQIWSIQHTKENSANCPMMHQEHEELTVLYSELKKTHPDDSAGEASSRGRAHEEDDEENYENVPRVLLASDH

SEQ ID NO: 8402 - protein, 742 aa, Homo sapiens
MLLWLLLLILTPGREQSGVAPKAVLLLNPPWSTAFKGEKVALICSSISHSLAQGDTYWYHDEKLLKIKHDKIQITEPGNYQCKTRGSSLSDAVHVEFSPDWLILQALHPVFEGDNVILRCQGKDNKNTHQKVYYKDGKQLPNSYNLEKITVNSVSRDNSKYHCTAYRKFYILDIEVTSKPLNIQVQELFLHPVLRASSSTPIEGSPMTLTCETQLSPQRPDVQLQFSLFRDSQTLGLGWSRSPRLQIPAMWTEDSGSYWCEVETVTHSIKKRSLRSQIRVQRVPVSNVNLEIRPTGGQLIEGENMVLICSVAQGSGTVTFSWHKEGRVRSLGRKTQRSLLAELHVLTVKESDAGRYYCAADNVHSPILSTWIRVTVRIPVSHPVLTFRAPRAHTVVGDLLELHCESLRGSPPILYRFYHEDVTLGNSSAPSGGGASFNLSLTAEHSGNYSCDADNGLGAQHSHGVSLRVTVPVSRPVLTLRAPGAQAVVGDLLELHCESLRGSFPILYWFYHEDDTLGNISAHSGGGASFNLSLTTEHSGNYSCEADNGLGAQHSKVVTLNVTGTSRNRTGLTAAGITGLVLSILVLAAAAALLHYARARRKPGGLSATGTSSHSPSECQEPSSSRPSRIDPQEPTHSKPLAPMELEPMYSNVNPGDSNPIYSQIWSIQHTKENSANCPMMHQEHEELTVLYSELKKTHPDDSAGEASSRGRAHEEDDEENYENILNPRKNKVQDFPCLCNT

SEQ ID NO: 8403 - protein, 592 aa, Homo sapiens
MLLWVILLVLAPVSGQFARTPRPIIFLQPPWTTVFQGERVTLTCKGFRFYSPQKTKWYHRYLGKEILRETPDNILEVQESGEYRCQAQGSPLSSPVHLDFSSASLILQAPLSVFEGDSVVLRCRAKAEVTLNNTIYKNDNVLAFLNKRTDFHIPHACLKDNGAYRCTGYKESCCPVSSNTVKIQVQEPFTRPVLRASSFQPISGNPVTLTCETQLSLERSDVPLRFRFFRDDQTLGLGWSLSPNFQITAMWSKDSGFYWCKAATMPYSVISDSPRSWIQVQIPASHPVLTLSPEKALNFEGTKVTLHCETQEDSLRTLYRFYHEGVPLRHKSVRCERGASISFSLTTENSGNYYCTADNGLGAKPSKAVSLSVTVPVSHPVLNLSSPEDLIFEGAKVTLHCEAQRGSLPILYQFHHEGAALERRSANSAGGVAISFSLTAEHSGNYYCTADNGFGPQRSKAVSLSVTVPVSHPVLTLSSAEALTFEGATVTLHCEVQRGSPQILYQFYHEDMPLWSSSTPSVGRVSFSFSLTEGHSGNYYCTADNGFGPQRSEVVSLFVTGKCWVLASHPPLAEFSLTHSFKNLFALSSFLP

SEQ ID NO: 8404 - protein, 759 aa, Homo sapiens
MLLWVILLVLAPVSGQFARTPRPIIFLQPPWTTVFQGERVTLTCKGFRFYSPQKTKWYHRYLGKEILRETPDNILEVQESGEYRCQAQGSPLSSPVHLDFSSASLILQAPLSVFEGDSVVLRCRAKAEVTLNNTIYKNDNVLAFLNKRTDFHIPHACLKDNGAYRCTGYKESCCPVSSNTVKIQVQEPFTRPVLRASSFQPISGNPVTLTCETQLSLERSDVPLRFRFFRDDQTLGLGWSLSPNFQITAMWSKDSGFYWCKAATMPYSVISDSPRSWIQVQIPASHPVLTLSPEKALNFEGTKVTLHCETQEDSLRTLYRFYHEGVPLRHKSVRCERGASISFSLTTENSGNYYCTADNGLGAKPSKAVSLSVTVPVSHPVLNLSSPEDLIFEGAKVTLHCEAQRGSLPILYQFHHEGAALERRSANSAGGVAISFSLTAEHSGNYYCTADNGFGPQRSKAVSLSVTVPVSHPVLTLSSAEALTFEGATVTLHCEVQRGSPQILYQFYHEDMPLWSSSTPSVGRVSFSFSLTEGHSGNYYCTADNGFGPQRSEVVSLFVTVPVSRPILTLRVPRAQAVVGDLLELHCEAPRGSPPILYWFYHEDVTLGSSSAPSGGEASFNLSLTAEHSGNYSCEANNGLVAQHSDTISLSVIVPVSRPILTFRAPRAQAVVGDLLELHCEALRGSSPILYWFYHEDVTLGKISAPSGGGASFNLSLTTEHSGIYSCEADNGLEAQRSEMVTLKVAGEWALPTSSTSEN

SEQ ID NO: 8405 - protein, 512 aa, Homo sapiens
MKAGCSIVEKPEGGGGYQFPDWAYKTESSPGSRQIQLWHFILELLQKEEFRHVIAWQQGEYGEFVIKDPDEVARLWGRRKCKPQMNYDKLSRALRYYYNKRILHKTKGKRFTYKFNFNKLVMPNYPFINIRSSGVVPQSAPPVPTASSRFHFPPLDTHSPTNDVQPGRFSASSLTASGQESSNGTDRKTELSELEDGSAADWRRGVDPVSSRNAIGGGGIGHQKRKPDIMLPLFARPGMYPDPHSPFAVSPIPGRGGVLNVPISPALSLTPTIFSYSPSPGLSPFTSSSCFSFNPEEMKHYLHSQACSVFNYHLSPRTFPRYPGLMVPPLQCQMHPEESTQFSIKLQPPPVGRKNRERVESSEESAPVTTPTMASIPPRIKVEPASEKDPESLRQSAREKEEHTQEEGTVPSRTIEEEKGTIFARPAAPPIWPSVPISTPSGEPLEVTEDSEDRPGKEPSAPEKKEDALMPPKLRLKRRWNDDPEARELSKSGKFLWNGSGPQGLATAAADA

SEQ ID NO: 8406 - protein, 1562 aa, Homo sapiens
MSVRLPQSIDRLSSLSSLGDSAPERKSPSHHRQPSDASETTGLVQRCVIIQKDQHGFGFTVSGDRIVLVQSVRPGGAAMKAGVKEGDRIIKVNGTMVTNSSHLEVVKLIKSGAYVALTLLGSSPSSMGISGLQQDPSPAGAPRITSVIPSPPPPPPLPPPQRITGPKPLQDPEVQKHATQILRNMLRQEEKELQRICEVYSRNPASLLEEQIEGARRRVTQLQLKIQQETGGSVDILPLYGDTSQRPSEGRLSLDSQEGDSGLDSGTERFPSLSESLMNRNSVLSDPGLDSPRTSPVIMARVAQHHRRQGSDAAVPSTGDQGVDQSPKPLIIGPEEDYDPGYFNNESDIIFQDLEKLKSRPAHLGVFLRYIFSQADPSPLLFYLCAEVYQQASPKDSRSLGKDIWNIFLEKNAPLRVKIPEMLQAEIDSRLRNSEDARGVLCEAQEAAMPEIQEQIHDYRTKRTLGLGSLYGENDLLDLDGDPLRERQVAEKQLAALGDILSKYEEDRSAPMDFALNTYMSHAGIRLREARPSNTAEKAQSAPDKDKWLPFFPKTKKSSNSKKEKDALEDKKRNPILKYIGKPKSSSQSTFHIPLSPVEVKPGNVRNIIQHFENNQQYDAPEPGTQRLSTGSFPEDLLESDSSRSEIRLGRSESLKGREEMKRSRKAENVPRSRSDVDMDAAAEATRLHQSASSSTSSLSTRSLENPTPPFTPKMGRRSIESPSLGFCTDTLLPHLLEDDLGQLSDLEPEPDAQNWQHTVGKDVVAGLTQREIDRQEVINELFVTEASHLRTLRVLDLIFYQRMKKENLMPREELARLFPNLPELIEIHNSWCEAMKKLREEGPIIKEISDLMLARFDGPAREELQQVAAQFCSYQSIALELIKTKQRKESRFQLFMQEAESHPQCRRLQLRDLIISEMQRLTKYPLLLESIIKHTEGGTSEHEKLCRARDQCREILKYVNEAVKQTENRHRLEGYQKRLDATALERASNPLAAEFKSLDLTTRKMIHEGPLTWRISKDKTLDLHVLLLEDLLVLLQKQDEKLLLKCHSKTAVGSSDSKQTFSPVLKLNAVLIRSVATDKRAFFIICTSKLGPPQIYELVALTSSDKNTWMELLEEAVRNATRHPGAAPMPVHPPPPGPREPAQQGPTPSRVELDDSDVFHGEPEPEELPGGTGSQQRVQGKHQVLLEDPEQEGSAEEEELGVLPCPSTSLDGENRGIRTRNPIHLAFPGPLFMEGLADSALEDVENLRHLILWSLLPGHTMETQAAQEPEDDLTPTPSVISVTSHPWDPGSPGQAPPGGEGDNTQLAGLEGERPEQEDMGLCSLEHLPPRTRNSGIWESPELDRNLAEDASSTEAAGGYKVVRKAEVAGSKVVPALPESGQSEPGPPEVEGGTKATGNCFYVSMPSGPPDSSTDHSEAPMSPPQPDSLPAGQTEPQPQLQGGNDDPRRPSRSPPSLALRDVGMIFHTIEQLTLKLNRLKDMELAHRELLKSLGGESSGGTTPVGSFHTEAARWTDGSLSPPAKEPLASDSRNSHELGPCPEDGSDAPLEDSTADAAASPGP

SEQ ID NO: 8407 - protein, 1297 aa, Homo sapiens
MAVPSLWPWGACLPVIFLSLGFGLDTVEVCPSLDIRSEVAELRQLENCSVVEGHLQILLMFTATGEDFRGLSFPRLTQVTDYLLLFRVYGLESLRDLFPNLAVIRGTRLFLGYALVIFEMPHLRDVALPALGAVLRGAVRVEKNQELCHLSTIDWGLLQPAPGANHIVGNKLGEECADVCPGVLGAAGEPCAKTTFSGHTDYRCWTSSHCQRVCPCPHGMACTARGECCHTECLGGCSQPEDPRACVACRHLYFQGACLWACPPGTYQYESWRCVTAERCASLHSVPGRASTFGIHQGSCLAQCPSGFTRNSSSIFCHKCEGLCPKECKVGTKTIDSIQAAQDLVGCTHVEGSLILNLRQGYNLEPQLQHSLGLVETITGFLKIKHSFALVSLGFFKNLKLIRGDAMVDGNYTLYVLDNQNLQQLGSWVAAGLTIPVGKIYFAFNPRLCLEHIYRLEEVTGTRGRQNKAEINPRTNGDRAACQTRTLRFVSNVTEADRILLRWERYEPLEARDLLSFIVYYKESPFQNATEHVGPDACGTQSWNLLDVELPLSRTQEPGVTLASLKPWTQYAVFVRAITLTTEEDSPHQGAQSPIVYLRTLPAAPTVPQDVISTSNSSSHLLVRWKPPTQRNGNLTYYLVLWQRLAEDGDLYLNDYCHRGLRLPTSNNDPRFDGEDGDPEAEMESDCCPCQHPPPGQVLPPLEAQEASFQKKFENFLHNAITIPISPWKVTSINKSPQRDSGRHRRAAGPLRLGGNSSDFEIQEDKVPRERAVLSGLRHFTEYRIDIHACNHAAHTVGCSAATFVFARTMPHREADGIPGKVAWEASSKNSVLLRWLEPPDPNGLILKYEIKYRRLGEEATVLCVSRLRYAKFGGVHLALLPPGNYSARVRATSLAGNGSWTDSVAFYILGPEEEDAGGLHVLLTATPVGLTLLIVLAALGFFYGKKRNRTLYASVNPEYFSASDMYVPDEWEVPREQISIIRELGQGSFGMVYEGLARGLEAGEESTPVALKTVNELASPRECIEFLKEASVMKAFKCHHVVRLLGVVSQGQPTLVIMELMTRGDLKSHLRSLRPEAENNPGLPQPALGEMIQMAGEIADGMAYLAANKFVHRDLAARNCMVSQDFTVKIGDFGMTRDVYETDYYRKGGKGLLPVRWMAPESLKDGIFTTHSDVWSFGVVLWEIVTLAEQPYQGLSNEQVLKFVMDGGVLEELEGCPLQLQELMSRCWQPNPRLRPSFTHILDSIQEELRPSFRLLSFYYSPECRGARGSLPTTDAEPDSSPTPRDCSPQNGGPGH

SEQ ID NO: 8408 - protein, 790 aa, Homo sapiens
MLRGGRRGQLGWHSWAAGPGSLLAWLILASAGAAPCPDACCPHGSSGLRCTRDGALDSLHHLPGAENLTELYIENQQHLQHLELRDLRGLGELRNLTIVKSGLRFVAPDAFHFTPRLSRLNLSFNALESLSWKTVQGLSLQELVLSGNPLHCSCALRWLQRWEEEGLGGVPEQKLQCHGQGPLAHMPNASCGVPTLKVQVPNASVDVGDDVLLRCQVEGRGLEQAGWILTELEQSATVMKSGGLPSLGLTLANVTSDLNRKNVTCWAENDVGRAEVSVQVNVSFPASVQLHTAVEMHHWCIPFSVDGQPAPSLRWLFNGSVLNETSFIFTEFLEPAANETVRHGCLRLNQPTHVNNGNYTLLAANPFGQASASIMAAFMDNPFEFNPEDPIPDTNSTSGDPVEKKDETPFGVSVAVGLAVFACLFLSTLLLVLNKCGRRNKFGINRPAVLAPEDGLAMSLHFMTLGGSSLSPTEGKGSGLQGHIIENPQYFSDACVHHIKRRDIVLKWELGEGAFGKVFLAECHNLLPEQDKMLVAVKALKEASESARQDFQREAELLTMLQHQHIVRFFGVCTEGRPLLMVFEYMRHGDLNRFLRSHGPDAKLLAGGEDVAPGPLGLGQLLAVASQVAAGMVYLAGLHFVHRDLATRNCLVGQGLVVKIGDFGMSRDIYSTDYYRVGGRTMLPIRWMPPESILYRKFTTESDVWSFGVVLWEIFTYGKQPWYQLSNTEAIDCITQGRELERPRACPPEVYAIMRGCWQREPQQRHSIKDVHARLQALAQAPPVYLDVLG

SEQ ID NO: 8409 - protein, 1472 aa, Homo sapiens
MDTTAAAALPAFVALLLLSPWPLLGSAQGQFSAGGCTFDDGPGACDYHQDLYDDFEWVHVSAQEPHYLPPEMPQGSYMIVDSSDHDPGEKARLQLPTMKENDTHCIDFSYLLYSQKGLNPGTLNILVRVNKGPLANPIWNVTGFTGRDWLRAELAVSTFWPNEYQVIFEAEVSGGRSGYIAIDDIQVLSYPCDKSPHFLRLGDVEVNAGQNATFQCIATGRDAVHNKLWLQRRNGEDIPVAQTKNINHRRFAASFRLQEVTKTDQDLYRCVTQSERGSGVSNFAQLIVREPPRPIAPPQLLGVGPTYLLIQLNANSIIGDGPIILKEVEYRMTSGSWTETHAVNAPTYKLWHLDPDTEYEIRVLLTRPGEGGTGLPGPPLITRTKCAEPMRTPKTLKIAEIQARRIAVDWESLGYNITRCHTFNVTICYHYFRGHNESKADCLDMDPKAPQHVVNHLPPYTNVSLKMILTNPEGRKESEETIIQTDEDVPGPVPVKSLQGTSFENKIFLNWKEPLDPNGIITQYEISYSSIRSFDPAVPVAGPPQTVSNLWNSTHHVFMHLHPGTTYQFFIRASTVKGFGPATAINVTTNISAPTLPDYEGVDASLNETATTITVLLRPAQAKGAPISAYQIVVEELHPHRTKREAGAMECYQVPVTYQNAMSGGAPYYFAAELPPGNLPEPAPFTVGDNRTYQGFWNPPLAPRKGYNIYFQAMSSVEKETKTQCVRIATKAAATEEPEVIPDPAKQTDRVVKIAGISAGILVFILLLLVVILIVKKRRSYYSYSYYLKLAKKRKDAMGNTRQEMTHMVNAMDRSYADQSTLHAEDPLSITFMDQHNFSPRLPNDPLVPTAVLVPITDENHSATAESSRLLDVPRYLCEGTESPYQTGQLHPAIRVADLLQHINLMKTSDSYGFKEEYESFFEGQSASWDVAKKDQNRAKNRYGNIIAYDHSRVILQPVEDDPSSDYINANYIDIWLYRDGYQRPSHYIATQGPVHETVYDFWRMIWQEQSACIVMVTNLVEVGRVKCYKYWPDDTEVYGDFKVTCVEMEPLAEYVVRTFTLERRGYNEIREVKQFHFTGWPDHGVPYHATGLLSFIRRVKLSNPPSAGPIVVHCSAGAGRTGCYIVIDIMLDMAEREGVVDIYNCVKALRSRRINMVQTEEQYIFIHDAILEACLCGETAIPVCEFKAAYFDMIRIDSQTNSSHLKDEFQTLNSVTPRLQAEDCSIACLPRNHDKNRFMDMLPPDRCLPFLITIDGESSNYINAALMDSYRQPAAFIVTQYPLPNTVKDFWRLVYDYGCTSIVMLNEVDLSQGCPQYWPEEGMLRYGPIQVECMSCSMDCDVINRIFRICNLTRPQEGYLMVQQFQYLGWASHREVPGSKRSFLKLILQVEKWQEECEEGEGRTIIHCLNGGGRSGMFCAIGIVVEMVKRQNVVDVFHAVKTLRNSKPNMVEAPEQYRFCYDVALEYLESS

SEQ ID NO: 8410 - protein, 1458 aa, Homo sapiens
MDTTAAAALPAFVALLLLSPWPLLGSAQGQFSAGGCTFDDGPGACDYHQDLYDDFEWVHVSAQEPHYLPPEMPQGSYMIVDSSDHDPGEKARLQLPTMKENDTHCIDFSYLLYSQKGLNPGTLNILVRVNKGPLANPIWNVTGFTGRDWLRAELAVSTFWPNEYQVIFEAEVSGGRSGYIAIDDIQVLSYPCDKSPHFLRLGDVEVNAGQNATFQCIATGRDAVHNKLWLQRRNGEDIPVAQTKNINHRRFAASFRLQEVTKTDQDLYRCVTQSERGSGVSNFAQLIVREPPRPIAPPQLLGVGPTYLLIQLNANSIIGDGPIILKEVEYRMTSGSWTETHAVNAPTYKLWHLDPDTEYEIRVLLTRPGEGGTGLPGPPLITRTKCAEPMRTPKTLKIAEIQARRIAVDWESLGYNITRCHTFNVTICYHYFRGHNESKADCLDMDPKAPQHVVNHLPPYTNVSLKMILTNPEGRKESEETIIQTDEDVPGPVPVKSLQGTSFENKIFLNWKEPLDPNGIITQYEISYSSIRSFDPAVPVAGPPQTVSNLWNSTHHVFMHLHPGTTYQFFIRASTVKGFGPATAINVTTNISAPTLPDYEGVDASLNETATTITVLLRPAQAKGAPISAYQIVVEELHPHRTKREAGAMECYQVPVTYQNAMSGGAPYYFAAELPPGNLPEPAPFTVGDNRTYQGFWNPPLAPRKGYNIYFQAMSSVEKETKTQCVRIATKAAATEEPEVIPDPAKQTDRVVKIAGISAGILVFILLLLVVILIVKKSKLAKKRKDAMGNTRQEMTHMVNAMDRSYADQSTLHAEDPLSITFMDQHNFSPRLPNDPLVPTAVLDENHSATAESSRLLDVPRYLCEGTESPYQTGQLHPAIRVADLLQHINLMKTSDSYGFKEEYESFFEGQSASWDVAKKDQNRAKNRYGNIIAYDHSRVILQPVEDDPSSDYINANYIDIWLYRDGYQRPSHYIATQGPVHETVYDFWRMIWQEQSACIVMVTNLVEVGRVKCYKYWPDDTEVYGDFKVTCVEMEPLAEYVVRTFTLERRGYNEIREVKQFHFTGWPDHGVPYHATGLLSFIRRVKLSNPPSAGPIVVHCSAGAGRTGCYIVIDIMLDMAEREGVVDIYNCVKALRSRRINMVQTEEQYIFIHDAILEACLCGETAIPVCEFKAAYFDMIRIDSQTNSSHLKDEFQTLNSVTPRLQAEDCSIACLPRNHDKNRFMDMLPPDRCLPFLITIDGESSNYINAALMDSYRQPAAFIVTQYPLPNTVKDFWRLVYDYGCTSIVMLNEVDLSQGCPQYWPEEGMLRYGPIQVECMSCSMDCDVINRIFRICNLTRPQEGYLMVQQFQYLGWASHREVPGSKRSFLKLILQVEKWQEECEEGEGRTIIHCLNGGGRSGMFCAIGIVVEMVKRQNVVDVFHAVKTLRNSKPNMVEAPEQYRFCYDVALEYLESS

SEQ ID NO: 8411 - protein, 1446 aa, Homo sapiens
MDTTAAAALPAFVALLLLSPWPLLGSAQGQFSAGGCTFDDGPGACDYHQDLYDDFEWVHVSAQEPHYLPPEMPQGSYMIVDSSDHDPGEKARLQLPTMKENDTHCIDFSYLLYSQKGLNPGTLNILVRVNKGPLANPIWNVTGFTGRDWLRAELAVSTFWPNEYQVIFEAEVSGGRSGYIAIDDIQVLSYPCDKSPHFLRLGDVEVNAGQNATFQCIATGRDAVHNKLWLQRRNGEDIPVAQTKNINHRRFAASFRLQEVTKTDQDLYRCVTQSERGSGVSNFAQLIVREPPRPIAPPQLLGVGPTYLLIQLNANSIIGDGPIILKEVEYRMTSGSWTETHAVNAPTYKLWHLDPDTEYEIRVLLTRPGEGGTGLPGPPLITRTKCAEPMRTPKTLKIAEIQARRIAVDWESLGYNITRCHTFNVTICYHYFRGHNESKADCLDMDPKAPQHVVNHLPPYTNVSLKMILTNPEGRKESEETIIQTDEDVPGPVPVKSLQGTSFENKIFLNWKEPLDPNGIITQYEISYSSIRSFDPAVPVAGPPQTVSNLWNSTHHVFMHLHPGTTYQFFIRASTVKGFGPATAINVTTNISAPTLPDYEGVDASLNETATTITVLLRPAQAKGAPISAYQIVVEELHPHRTKREAGAMECYQVPVTYQNAMSGGAPYYFAAELPPGNLPEPAPFTVGDNRTYQGFWNPPLAPRKGYNIYFQAMSSVEKETKTQCVRIATKAAATEEPEVIPDPAKQTDRVVKIAGISAGILVFILLLLVVILIVKKSKLAKKRKDAMGNTRQEMTHMVNAMDRSYADQSTLHAEDPLSITFMDQHNFSPRYENHSATAESSRLLDVPRYLCEGTESPYQTGQLHPAIRVADLLQHINLMKTSDSYGFKEEYESFFEGQSASWDVAKKDQNRAKNRYGNIIAYDHSRVILQPVEDDPSSDYINANYIDIWLYRDGYQRPSHYIATQGPVHETVYDFWRMIWQEQSACIVMVTNLVEVGRVKCYKYWPDDTEVYGDFKVTCVEMEPLAEYVVRTFTLERRGYNEIREVKQFHFTGWPDHGVPYHATGLLSFIRRVKLSNPPSAGPIVVHCSAGAGRTGCYIVIDIMLDMAEREGVVDIYNCVKALRSRRINMVQTEEQYIFIHDAILEACLCGETAIPVCEFKAAYFDMIRIDSQTNSSHLKDEFQTLNSVTPRLQAEDCSIACLPRNHDKNRFMDMLPPDRCLPFLITIDGESSNYINAALMDSYRQPAAFIVTQYPLPNTVKDFWRLVYDYGCTSIVMLNEVDLSQGCPQYWPEEGMLRYGPIQVECMSCSMDCDVINRIFRICNLTRPQEGYLMVQQFQYLGWASHREVPGSKRSFLKLILQVEKWQEECEEGEGRTIIHCLNGGGRSGMFCAIGIVVEMVKRQNVVDVFHAVKTLRNSKPNMVEAPEQYRFCYDVALEYLESS

SEQ ID NO: 8412 - protein, 1439 aa, Homo sapiens
MDTTAAAALPAFVALLLLSPWPLLGSAQGQFSAGGCTFDDGPGACDYHQDLYDDFEWVHVSAQEPHYLPPEMPQGSYMIVDSSDHDPGEKARLQLPTMKENDTHCIDFSYLLYSQKGLNPGTLNILVRVNKGPLANPIWNVTGFTGRDWLRAELAVSTFWPNEYQVIFEAEVSGGRSGYIAIDDIQVLSYPCDKSPHFLRLGDVEVNAGQNATFQCIATGRDAVHNKLWLQRRNGEDIPVAQTKNINHRRFAASFRLQEVTKTDQDLYRCVTQSERGSGVSNFAQLIVREPPRPIAPPQLLGVGPTYLLIQLNANSIIGDGPIILKEVEYRMTSGSWTETHAVNAPTYKLWHLDPDTEYEIRVLLTRPGEGGTGLPGPPLITRTKCAEPMRTPKTLKIAEIQARRIAVDWESLGYNITRCHTFNVTICYHYFRGHNESKADCLDMDPKAPQHVVNHLPPYTNVSLKMILTNPEGRKESEETIIQTDEDVPGPVPVKSLQGTSFENKIFLNWKEPLDPNGIITQYEISYSSIRSFDPAVPVAGPPQTVSNLWNSTHHVFMHLHPGTTYQFFIRASTVKGFGPATAINVTTNISAPTLPDYEGVDASLNETATTITVLLRPAQAKGAPISAYQIVVEELHPHRTKREAGAMECYQVPVTYQNAMSGGAPYYFAAELPPGNLPEPAPFTVGDNRTYQGFWNPPLAPRKGYNIYFQAMSSVEKETKTQCVRIATKAATEEPEVIPDPAKQTDRVVKIAGISAGILVFILLLLVVILIVKKSKLAKKRKDAMGNTRQEMTHMVNAMDRSYADQSTLHAEDPLSITFMDQHNFSPRYENHSATAESSRLLDVPRYLCEGTESPYQTGQLHPAIRVADLLQHINLMKTSDSYGFKEEYESFFEGQSASWDVAKKDQNRAKNRYGNIIAYDHSRVILQPVEDDPSSDYINANYIDGYQRPSHYIATQGPVHETVYDFWRMIWQEQSACIVMVTNLVEVGRVKCYKYWPDDTEVYGDFKVTCVEMEPLAEYVVRTFTLERRGYNEIREVKQFHFTGWPDHGVPYHATGLLSFIRRVKLSNPPSAGPIVVHCSAGAGRTGCYIVIDIMLDMAEREGVVDIYNCVKALRSRRINMVQTEEQYIFIHDAILEACLCGETAIPVCEFKAAYFDMIRIDSQTNSSHLKDEFQTLNSVTPRLQAEDCSIACLPRNHDKNRFMDMLPPDRCLPFLITIDGESSNYINAALMDSYRQPAAFIVTQYPLPNTVKDFWRLVYDYGCTSIVMLNEVDLSQGCPQYWPEEGMLRYGPIQVECMSCSMDCDVINRIFRICNLTRPQEGYLMVQQFQYLGWASHREVPGSKRSFLKLILQVEKWQEECEEGEGRTIIHCLNGGGRSGMFCAIGIVVEMVKRQNVVDVFHAVKTLRNSKPNMVEAPEQYRFCYDVALEYLESS

SEQ ID NO: 8413 - protein, 138 aa, Homo sapiens
MPNFSGNWKIIRSENFEELLKVLGVNVMLRKIAVAAASKPAVEIKQEGDTFYIKTSTTVRTTEINFKVGEEFEEQTVDGRPCKSLVKWESENKMVCEQKLLKGEGPKTSWTRELTNDGELILTMTADDVVCTRVYVRE

SEQ ID NO: 8414 - protein, 1440 aa, Homo sapiens
MDTTAAAALPAFVALLLLSPWPLLGSAQGQFSAGGCTFDDGPGACDYHQDLYDDFEWVHVSAQEPHYLPPEMPQGSYMIVDSSDHDPGEKARLQLPTMKENDTHCIDFSYLLYSQKGLNPGTLNILVRVNKGPLANPIWNVTGFTGRDWLRAELAVSTFWPNEYQVIFEAEVSGGRSGYIAIDDIQVLSYPCDKSPHFLRLGDVEVNAGQNATFQCIATGRDAVHNKLWLQRRNGEDIPVAQTKNINHRRFAASFRLQEVTKTDQDLYRCVTQSERGSGVSNFAQLIVREPPRPIAPPQLLGVGPTYLLIQLNANSIIGDGPIILKEVEYRMTSGSWTETHAVNAPTYKLWHLDPDTEYEIRVLLTRPGEGGTGLPGPPLITRTKCAEPMRTPKTLKIAEIQARRIAVDWESLGYNITRCHTFNVTICYHYFRGHNESKADCLDMDPKAPQHVVNHLPPYTNVSLKMILTNPEGRKESEETIIQTDEDVPGPVPVKSLQGTSFENKIFLNWKEPLDPNGIITQYEISYSSIRSFDPAVPVAGPPQTVSNLWNSTHHVFMHLHPGTTYQFFIRASTVKGFGPATAINVTTNISAPTLPDYEGVDASLNETATTITVLLRPAQAKGAPISAYQIVVEELHPHRTKREAGAMECYQVPVTYQNAMSGGAPYYFAAELPPGNLPEPAPFTVGDNRTYQGFWNPPLAPRKGYNIYFQAMSSVEKETKTQCVRIATKAAATEEPEVIPDPAKQTDRVVKIAGISAGILVFILLLLVVILIVKKSKLAKKRKDAMGNTRQEMTHMVNAMDRSYADQSTLHAEDPLSITFMDQHNFSPRYENHSATAESSRLLDVPRYLCEGTESPYQTGQLHPAIRVADLLQHINLMKTSDSYGFKEEYESFFEGQSASWDVAKKDQNRAKNRYGNIIAYDHSRVILQPVEDDPSSDYINANYIDGYQRPSHYIATQGPVHETVYDFWRMIWQEQSACIVMVTNLVEVGRVKCYKYWPDDTEVYGDFKVTCVEMEPLAEYVVRTFTLERRGYNEIREVKQFHFTGWPDHGVPYHATGLLSFIRRVKLSNPPSAGPIVVHCSAGAGRTGCYIVIDIMLDMAEREGVVDIYNCVKALRSRRINMVQTEEQYIFIHDAILEACLCGETAIPVCEFKAAYFDMIRIDSQTNSSHLKDEFQTLNSVTPRLQAEDCSIACLPRNHDKNRFMDMLPPDRCLPFLITIDGESSNYINAALMDSYRQPAAFIVTQYPLPNTVKDFWRLVYDYGCTSIVMLNEVDLSQGCPQYWPEEGMLRYGPIQVECMSCSMDCDVINRIFRICNLTRPQEGYLMVQQFQYLGWASHREVPGSKRSFLKLILQVEKWQEECEEGEGRTIIHCLNGGGRSGMFCAIGIVVEMVKRQNVVDVFHAVKTLRNSKPNMVEAPEQYRFCYDVALEYLESS

SEQ ID NO: 8415 - protein, 370 aa, Homo sapiens
MNVTPEVKSRGMKFAEEQLLKHGWTQGKGLGRKENGITQALRVTLKQDTHGVGHDPAKEFTNHWWNELFNKTAANLVVETGQDGVQIRSLSKETTRYNHPKPNLLYQKFVKMATLTSGGEKPNKDLESCSDDDNQGSKSPKILTDEMLLQACEGRTAHKAARLGITMKAKLARLEAQEQAFLARLKGQDPGAPQLQSESKPPKKKKKKRRQKEEEEATASERNDADEKHPEHAEQNIRKSKKKKRRHQEGKVSDEREGTTKGNEKEDAAGTSGLGELNSREQTNQSLRKGKKKKRWHHEEEKMGVLEEGGKGKEAAGSVRTEEVESRAYADPCSRRKKRQQQEEEDLNLEDRGEETFRWWNQGSREQSMQ

SEQ ID NO: 8416 - protein, 245 aa, Homo sapiens
MSRLRALLGLGLLVAGSRVPRIKSQTIACRSGPTWWGPQRLNSGGRWDSEVMASTVVKYLSQEEAQAVDQELFNEYQFSVDQLMELAGLSCATAIAKAYPPTSMSRSPPTVLVICGPGNNGGDGLVCARHLKLFGYEPTIYYPKRPNKPLFTALVTQCQKMDIPFLGEMPAEPMTIDELYELVVDAIFGFSFKGDVREPFHSILSVLKGLTVPIASIDIPSGAGIQKVGWGRLGPYPPDSCPHQV

SEQ ID NO: 8417 - protein, 260 aa, Homo sapiens
MSRLRALLGLGLLVAGSRVPRIKSQTIACRSGPTWWGPQRLNSGGRWDSEVMASTVVKYLSQEEAQAVDQELFNEYQFSVDQLMELAGLSCATAIAKAYPPTSMSRSPPTVLVICGPGNNGGDGLVCARHLKLFGYEPTIYYPKRPNKPLFTALVTQCQKMDIPFLGEMPAELQGRCSGTVPQHPECPEGTHCAHCQHRHSLRMGRGEGKCWRDPARLAHIPHSPQKICNPVYRSLPLPGGSFCATCSGEEVPAEPATLP

SEQ ID NO: 8418 - protein, 288 aa, Homo sapiens
MSRLRALLGLGLLVAGSRVPRIKSQTIACRSGPTWWGPQRLNSGGRWDSEVMASTVVKYLSQEEAQAVDQELFNEYQFSVDQLMELAGLSCATAIAKAYPPTSMSRSPPTVLVICGPGNNGGDGLVCARHLKLFGYEPTIYYPKRPNKPLFTALVTQCQKMDIPFLGEMPAEPMTIDELYELVVDAIFGFSFKGDVREPFHSILSVLKGLTVPIASIDIPSGWDVEKGNAGGIQPDLLISLTAPKKSATQFTGRYHYLGGRFVPPALEKKYQLNLPPYPDTECVYRLQ

SEQ ID NO: 8419 - protein, 507 aa, Homo sapiens
MMGHRPVLVLSQNTKRESGRKVQSGNINAAKIQVQHPAAKSMIEISRTQDEEVGDGTTSVIILAGEMLSVAEHFLEQQMHPTVVISAYRKALDDMISTLKKISIPVDISDSDMMLNIINSSITTKAISRWSSLACNIALDAVKMVQFEENGRKEIDIKKYARVEKIPGGIIEDSCVLRGVMINKDVTHPRMRRYIKNPRIVLLDSSLEYKKGESQTDIEITREEDFTRILQMEEEYIQQLCEDIIQLKPDVVITEKGISDLAQHYLMRANITAIRRVRKTDNNRIARACGARIVSRPEELREDDVGTGAGLLEIKKIGDEYFTFITDCKDPKACTILLRGASKEILSEVERNLQDAMQVCRNVLLDPQLVPGGGASEMAVAHALTEKSKAMTGVEQWPYRAVAQALEVIPRTLIQNCGASTIRLLTSLRAKHTQENCETWGVNGETGTLVDMKELGIWEPLAVKLQTYKTAVETAVLLLRIDDIVSGHKKKGDDQSRQGGAPDAGQE

SEQ ID NO: 8420 - protein, 100 aa, Homo sapiens
MRALTLLALLALAALCIAGQAGAKPSGAESSKGAAFVSKQEGSEVVKRPRRYLYQWLGAPVPYPDPLEPRREVCELNPDCDELADHIGFQEAYRRFYGPV

SEQ ID NO: 8421 - protein, 220 aa, Homo sapiens
MAEASSANLGSGCEEKRHEGSSSESVPPGTTISRVKLLDTMVDTFLQKLVAAGSYQRFTDCYKCFYQLQPAMTQQIYDKFIAQLQTSIREEISDIKEEGNLEAVLNALDKIVEEGKVRKEPACNGTPCGAMCRNRRPRTSSWQMPSWQGGGRWRSCSYRSRPSSRPGRCEAQRCRVQQRCSLCVQAGGQRGSEETQALPVSMAGSPSPLPGSPGAQEGGV

SEQ ID NO: 8422 - protein, 205 aa, Homo sapiens
MAEASSANLGSGCEEKRHEGSSSESVPPGTTISRVKLLDTMVDTFLQKLVAAGSYQRFTDCYKCFYQLQPAMTQQIYDKFIAQLQTSIREEISDIKEEGNLEAVLNALDKIVEEGKVRKEPAWRPSGIPEKDLHSVMAPYFLQQRDTLRRHVQKQEAENQQLADAVLAGRRQVEELQLQVQAQQQAWQALHREQRELVAVLREPE

SEQ ID NO: 8423 - protein, 180 aa, Homo sapiens
MAEASSANLGSGCEEKRHEGSSSESVPPGTTISRVKLLDTMVDTFLQKLVAAGSYQRFTDCYKCFYQLQPAMTQQIYDKFIAQLQTSIREEISDIKEEGNLEAVLNALDKIVEEGKVRKEPACNGTPCGAMCRNRRPRTSSWQMPSWQGGGRWRSCSYRSRPSSRPGRLYTENRGSWLLC

SEQ ID NO: 8424 - protein, 145 aa, Homo sapiens
MAKSLLKTASLSGRTKLLHQTGLSLYSTSHGFYEEEVKKTLQQFPGGSIDLQKEDNGIGILTLNNPSRMNAFSGVMMLQLLEKVIELENWTEGKGLIVRGAKNTFSSGSDLNAVKSLGTPETSFNKCCAGSRLGIGWRSRIYYSM

SEQ ID NO: 8425 - protein, 664 aa, Homo sapiens
METPSQRRATRSGAQASSTPLSPTRITRLQEKEDLQELNDRLAVYIDRVRSLETENAGLRLRITESEEVVSREVSGIKAAYEAELGDARKTLDSVAKERARLQLELSKVREEFKELKARNTKKEGDLIAAQARLKDLEALLNSKEAALSTALSEKRTLEGELHDLRGQVAKLEAALGEAKKQLQDEMLRRVDAENRLQTMKEELDFQKNIYSEELRETKRRHETRLVEIDNGKQREFESRLADALQELRAQHEDQVEQYKKELEKTYSAKLDNARQSAERNSNLVGAAHEELQQSRIRIDSLSAQLSQLQKQLAAKEAKLRDLEDSLARERDTSRRLLAEKEREMAEMRARMQQQLDEYQELLDIKLALDMEIHAYRKLLEGEEERLRLSPSPTSQRSRGRASSHSSQTQGGGSVTKKRKLESTESRSSFSQHARTSGRVAVEEVDEEGKFVRLRNKSNEDQSMGNWQIKRQNGDDPLLTYRFPPKFTLKAGQVVTIWAAGAGATHSPPTDLVWKAQNTWGCGNSLRTALINSTGEEVAMRKLVRSVTVVEDDEDEDGDDLLHHHHGSHCSSSGDPAEYNLRSRTVLCGTCGQPADKASASGSGAQVGGPISSGSSASSVTVTRSYRSVGGSGGGSFGDNLVTRSYLLGNSSPRTQSPQNCSIM

SEQ ID NO: 8426 - protein, 572 aa, Homo sapiens
METPSQRRATRSGAQASSTPLSPTRITRLQEKEDLQELNDRLAVYIDRVRSLETENAGLRLRITESEEVVSREVSGIKAAYEAELGDARKTLDSVAKERARLQLELSKVREEFKELKARNTKKEGDLIAAQARLKDLEALLNSKEAALSTALSEKRTLEGELHDLRGQVAKLEAALGEAKKQLQDEMLRRVDAENRLQTMKEELDFQKNIYSEELRETKRRHETRLVEIDNGKQREFESRLADALQELRAQHEDQVEQYKKELEKTYSAKLDNARQSAERNSNLVGAAHEELQQSRIRIDSLSAQLSQLQKQLAAKEAKLRDLEDSLARERDTSRRLLAEKEREMAEMRARMQQQLDEYQELLDIKLALDMEIHAYRKLLEGEEERLRLSPSPTSQRSRGRASSHSSQTQGGGSVTKKRKLESTESRSSFSQHARTSGRVAVEEVDEEGKFVRLRNKSNEDQSMGNWQIKRQNGDDPLLTYRFPPKFTLKAGQVVTIWAAGAGATHSPPTDLVWKAQNTWGCGNSLRTALINSTGEEVAMRKLVRSVTVVEDDEDEDGDDLLHHHHVSGSRR

SEQ ID NO: 8427 - protein, 95 aa, Homo sapiens
MLRPKALTQVLSQANTGGVQSTLLLNNEGSLLAYSGYGDTDARVTAAIASNIWAAYDRNGNQAFNEDNLKFILMDCMAQALVQYLEEPLTQVAAS

SEQ ID NO: 8428 - protein, 125 aa, Homo sapiens
MLRPKALTQVLSQANTGGVQSTLLLNNEGSLLAYSGYGDTDARVTAAIASNIWAAYDRNGNQAFNEDNLKFILMDCMEGRVAITRVANLLLCMYAKETVGFGMLKAKAQALVQYLEEPLTQVAAS

SEQ ID NO: 8429 - protein, 601 aa, Homo sapiens
MAEPSGAETRPPIRVTVKTPKDKEEIVICDRASVKEFKEEISRRFKAQQDQLVLIFAGKILKDGDTLNQHGIKDGLTVHLVIKTPQKAQDPAAATASSPSTPDPASAPSTTPASPATPAQPSTSGSASSDAGSGSRRSSGGGPSPGAGEGSPSATASILSGFGGILGLGSLGLGSANFMELQQQMQRQLMSNPEMLSQIMENPLVQDMMSNPDLMRHMIMANPQMQQLMERNPEISHMLNNPELMRQTMELARNPAMMQEMMRNQDRALSNLESIPGGYNALRRMYTDIQEPMFSAAREQFGNNPFSSLAGNSDSSSSQPLRTENREPLPNPWSPSPPTSQAPGSGGEGTGGSGTSQVHPTVSNPFGINAASLGSGMFNSPEMQALLQQISENPQLMQNVISAPYMRSMMQTLAQNPDFAAQMMVNVPLFAGNPQLQEQLRLQLPVFLQQMQNPESLSILTNPRAMQALLQIQQGLQTLQTEAPGLVPSLGSFGISRTPAPSAGSNAGSTPEAPTSSPATPATSSPTGASSAQQQLMQQMIQLLAGSGNSQVQTPEVRFQQQLEQLNSMGFINREANLQALIATGGDINAAIERLLGSQLS

SEQ ID NO: 8430 - protein, 359 aa, Homo sapiens
MMAGCGEIDHSINMLPTNRKANESCSNTAPSLTVPECAICLQTCVHPVSLPCKHVFCYLCVKGASWLGKRCALCRQEIPEDFLDKPTLLSPEELKAASRGNGEYAWYYEGRNGWWQYDERTSRELEDAFSKGKKNTEMLIAGFLYVADLENMVQYRRNEHGRRRKIKRDIIDIPKKGVAGLRLDCDANTVNLARESSADGADSVSAQSGASVQPLVSSVRPLTSVDGQLTSPATPSPDASTSLEDSFAHLQLSGDNTAERSHRGEGEEDHESPSSGRVPAPDTSIEETESDASSDSEDVSAVVAQHSLTQQRLLVSNANQTVPDRSDRSGTDRSVAGGGTVSVSVRSRRPDGQCTVTEV

SEQ ID NO: 8431 - protein, 292 aa, Homo sapiens
MHLRLISWLFIILNFMEYIGSQNASRGRRQRRMHPNVSQGCQGGCATCSDYNGCLSCKPRLFFALERIGMKQIGVCLSSCPSGYYGTRYPDINKCTKCKADCDTCFNKNFCTKCKSGFYLHLGKCLDNCPEGLEANNHTMECVSIVHCEVSEWNPWSPCTKKGKTCGFKRGTETRVREIIQHPSAKGNLCPPTNETRKCTVQRKKCQKGERGKKGRERKRKKPNKGESKEAIPDSKSLESSKEIPEQRENKQQQKKRKVQDKQKSGIEVTLAEGLTSVSQRTQPTPCRRRYL

SEQ ID NO: 8432 - protein, 564 aa, Homo sapiens
MSAGSATHPGAGGRRSKWDQPAPAPLLFLPPAAPGGEVTSSGGSPGGTTAAPSGALDAAAAVAAKINAMLMAKGKLKPTQNASEKLQAPGKGLTSNKSKDDLVVAEVEINDVPLTCRNLLTRGQTQDEISRLSGAAVSTRGRFMTTEEKAKVGPGDRPLYLHVQGQTRELVDRAVNRIKEIITNGVVKAATGTSPTFNGATVTVYHQPAPIAQLSPAVSQKPPFQSGMHYVQDKLFVGLEHAVPTFNVKEKVEGPGCSYLQHIQIETGAKVFLRGKGSGCIEPASGREAFEPMYIYISHPKPEGLAAAKKLCENLLQTVHAEYSRFVNQINTAVPLPGYTQPSAISSVPPQPPYYPSNGYQSGYPVVPPPQQPVQPPYGVPSIVPPAVSLAPGVLPALPTGVPPVPTQYPITQVQPPASTGQSPMGGPFIPAAPVKTALPAGPQPQPQPQPPLPSQPQAQKRRFTEELPDERESGLLGYQHGPIHMTNLGTGFSSQNEIEGAGSKPASSSGKERERDRQLMPPPAFPVTGIKTESDERNGSGTLTGSHGECDIAGGTGEWLRLV

SEQ ID NO: 8433 - protein, 614 aa, Homo sapiens [sequence omitted]

SEQ ID NO: 8434 - protein, 219 aa, Homo sapiens
MDSGTRPVGSCCSSPAGLSREYKLVMLGAGGVGKSAMTMQFISHRFPEDHDPTIEDAYKIRIRIDDEPANLDILDTAGQAEFTAMRDQYMRAGEGFIICYSITDRRSFHEVREFKQLIYRVRRTDDTPVVLVGNKSDLKQLRQVTKEEGLALAREFSCPFFETSAAYRYYIDDVFHALVREIRRKEKEAVLAMEKKSKPKNSVWKRLKSPFRKKKDSVT

SEQ ID NO: 8435 - protein, 431 aa, Homo sapiens
MAEITNIRPSFDVSPVVAGLIGASVLVVCVSVTVFVWSCCHQQAEKKQKNPPYKFIHMLKGISIYPETLSNKKKIIKVRRDKDGPGREGGRRNLLVDAAEAGLLSRDKDPRGPSSGSCIDQLPIKMDYGEELRSPITSLTPGESKTTSPSSPEEDVMLGSLTFSVDYNFPKKALVVTIQEAHGLPVMDDQTQGSDPYIKMTILPDKRHRVKTRVLRKTLDPVFDETFTFYGIPYSQLQDLVLHFLVLSFDRFSRDDVIGEVMVPLAGVDPSTGKVQLTRDIIKRNIQKCISRGELQVSLSYQPVAQRMTVVVLKARHLPKMDITGLSGNPYVKVNVYYGRKRIAKKKTHVKKCTLNPIFNESFIYDIPTDLLPDISIEFLVIDFDRTTKNEVVGRLILGAHSVTASGAEHWREVCESPRKPVAKWHSLSEY

SEQ ID NO: 8436 - protein, 88 aa, Homo sapiens
MALSTIVSQRKQIKRKAPRGFLKRVFKRKKPQLRLEKSGDLLVHLNCLLFVHRLAEESRTNACASKCRVINKEHVLAAAKVILKKSRG

SEQ ID NO: 8437 - protein, 458 aa, Homo sapiens
MALSCTLNRYLLLMAQEHLEFRLPEIKSLLLLFGGQFASSQETYGKSPFWILSIPSEDIARNLMKRTVCAKSIFELWGHGQSPEELYSSLKNYPVEKMVPFLHSDSTYKIKIHTFNKTLTQEEKIKRIDALEFLPFEGKVNLKKPQHVFSVLEDYGLDPNCIPENPHNIYFGRWIADGQRELIESYSVKKRHFIGNTSMDAGLSFIMANHGKVKENDIVFDPFVGTGGLLIACAHFGAYVYGTDIDYNTVHGLGKATRKNQKWRGPDENIRANLRQYGLEKYYLDVLVSDASKPSWRKGTYFDAIITDPPYGIRESTRRTGSQKEIPKGIEKWEKCPESHVPVSLSYHLSDMFLDLLNFAAETLVLGGRLVYWLPVYTPEYTEEMVPWHPCLELVSNCEQKLSSHTSRRLITMEKNRDQYSHLLSDHFLPYQGHNSFREKYFSGVTKRIAKEEKSTQE

SEQ ID NO: 8438 - protein, 902 aa, Homo sapiens
MLSPQRALLCNLNHIHLQHVSLGLHLSRRPELQEGPLSTPPPPGDTGGKESRGPCSGTLVDANSNSPAVPCRCCQEHGPGLENRQDPSQEEEGAASPSDPGCSSSLSSCSDLSPDESPVSVYLRDLPGDEDAHPQPSIIPLEQGSPLASAGPGTCSPDSFCCSPDSCSGASSSPDPGLDSNCNALTTCQDVPSPGLEEEDERAEQDLPTSELLEADDGKIDAGKTEPSWKINPIWKIDTEKTKAEWKTTENNNTGWKNNGNVNSSWKSEPEKFDSGWKTNTRITDSGSKTDAGKIDGGWRSDVSEEPVPHRTITSFHELAQKRKRGPGLPLVPQAKKDRSDWLIVFSPDTELPPSGSPGGSSAPPREVTTFKELRSRSRAPAPPVPPRDPPVGWALVPPRPPPPPVPPRRKKNRPGLQPIAEGQSEEGRAVSPAAGEEAPAAKEPGAQAGLEVRSSWSFAGVPGAQRLWMAEAQSGTGQLQEQKKGLLIAVSVSVDKIISHFGAARNLVQKAQLGDSRLSPDVGHLVLTTLCPALHALVADGLKPFRKDLITGQRRSSPWSVVEASVKPGSSTRSLGTLYSQVSRLAPLSSSRSRFHAFILGLLNTKQLELWFSSLQEDAGLLSLLYLPTGFFSLARGGCPSLSTELLLLLQPLSVLTFHLDLLFEHHHHLPLGPPQAPAPPGPPPALQQTMQAMLHFGGRLAQSLRGTSKEAASDPSDSPNLPTPGSWWEQLTQASRVYASGGTEGFPLSRWAPGRHGTAAEEGAQERPLPTDEMAPGRGLWLGRLFGVPGGPAENENGALKSRRPSSWLPPTVSVLALVKRGAPPEMPSPQELEASAPRMVQTHRAVRALCDHTAARPDQLSFRRGEVLRVITTVDEDWLRCGRDGMEGLVPVGYTSLVL

SEQ ID NO: 8439 - protein, 942 aa, Homo sapiens
MDTKEEKKERKQSYFARLKKKKQAKQNAETASAVATRTHTGKEDNNTVVLEPDKCNIAVEEEYMTDEKKKRKSNQLKEIRRTELKRYYSIDDNQNKTHDKKEKKMVVQKPHGTMEYTAGNQDTLNSIALKFNITPNKLVELNKLFTHTIVPGQVLFVPDANSPSSTLRLSSSSPGATVSPSSSDAEYDKLPDADLARKALKPIERVLSSTSEEDEPGVVKFLKMNCRYFTDGKGVVGGVMIVTPNNIMFDPHKSDPLVIENGCEEYGLICPMEEVVSIALYNDISHMKIKDALPSDLPQDLCPLYRPGEWEDLASEKDINPFSKFKSINKEKRQQNGEKIMTSDSRPIVPLEKSTGHTPTKPSGSSVSEKLKKLDSSRETSHGSPTVTKLSKEPSDTSSAFESTAKENFLGEDDDFVDLEELSSQTGGGMHKKDTLKECLSLDPEERKKAESQINNSAVEMQVQSALAFLGTENDVELKGALDLETCEKQDIMPEVDKQSGSPESRVENTLNIHEDLDKVKLIEYYLTKNKEGPQVSENLQKTELSDGKSIEPGGIDITLSSSLSQAGDPITEGNKEPDKTWVKKGEPLPVKLNSSTEANVIKEALDSSLESTLDNSCQGAQMDNKSEVQLWLLKRIQVPIEDILPSKEEKSKTPPMFLCIKVGKPMRKSFATHTAAMVQQYGKRRKQPEYWFAVPRERVDHLYTFFVQWSPDVYGKDAKEQGFVVVEKEELNMIDNFFSEPTTKSWEIITVEEAKRRKSTCSYYEDEDEEVLPVLRPHSALLENMHIEQLARRLPARVQGYPWRLAYSTLEHGTSLKTLYRKSASLDSPVLLVIKDMDNQIFGAYATHPFKFSDHYYGTGETFLYTFSPHFKVFKWSGENSYFINGDISSLELGGGGGRFGLWLDADLYHGRSNSCSTFNNDILSKKEDFIVQDLEVWAFD

SEQ ID NO: 8440 - protein, 774 aa, Homo sapiens
MEAEQRPAAGASEGATPGLEAVPPVAPPPATAASGPIPKSGPEPKRRHLGTLLQPTVNKFSLRVFGSHKAVEIEQERVKSAGAWIIHPYSDFRFYWDLIMLLLMVGNLIVLPVGITFFKEENSPPWIVFNVLSDTFFLLDLVLNFRTGIVVEEGAEILLAPRAIRTRYLRTWFLVDLISSIPVDYIFLVVELEPRLDAEVYKTARALRIVRFTKILSLLRLLRLSRLIRYIHQWEEIFHMTYDLASAVVRIFNLIGMMLLLCHWDGCLQFLVPMLQDFPPDCWVSINHMVNHSWGRQYSHALFKAMSHMLCIGYGQQAPVGMPDVWLTMLSMIVGATCYAMFIGHATALIQSLDSSRRQYQEKYKQVEQYMSFHKLPADTRQRIHEYYEHRYQGKMFDEESILGELSEPLREEIINFTCRGLVAHMPLFAHADPSFVTAVLTKLRFEVFQPGDLVVREGSVGRKMYFIQHGLLSVLARGARDTRLTDGSYFGEICLLTRGRRTASVRADTYCRLYSLSVDHFNAVLEEFPMMRRAFETVAMDRLLRIGKKNSILQRKRSEPSPGSSGGIMEQHLVQHDRDMARGVRGRAPSTGAQLSGKPVLWEPLVHAPLQAAAVTSNVAIALTHQRGPLPLSPDSPATLLARSAWRSAGSPASPLVPVRAGPWASTSRLPAPPARTLHASLSRAGRSQVSLLGPPPGGGGRRLGPRGRPLSASQPSLPQRATGDGSPGRKGSGSERLPPSGLLAKPPRTAQPPRPPVPEPATPRGLQLSANM

SEQ ID NO: 8441 - protein, 499 aa, Homo sapiens
MPHPRRYHSSERGSRGSYREHYRSRKHKRRRSRSWSSSSDRTRRRRREDSYHVRSRSSYDDRSSDRRVYDRRYCGSYRRNDYSRDRGDAYYDTDYRHSYEYQRENSSYRSQRSSRRKHRRRRRRSRTFSRSSSQHSSRRAKSVEDDAEGHLIYHVGDWLQERYEIVSTLGEGTFGRVVQCVDHRRGGARVALKIIKNVEKYKEAARLEINVLEKINEKDPDNKNLCVQMFDWFDYHGHMCISFELLGLSTFDFLKDNNYLPYPIHQVRHMAFQLCQAVKFLHDNKLTHTDLKPENILFVNSDYELTYNLEKKRDERSVKSTAVRVVDFGSATFDHEHHSTIVSTRHYRAPEVILELGWSQPCDVWSIGCIIFEYYVGFTLFQTHDNREHLAMMERILGPIPSRMIRKTRKQKYFYRGRLDWDENTSAGRYVRENCKPLRRYLTSEAEEHHQLFDLIESMLEYEPAKRLTLGEALQHPFFARLRAEPPNKLWDSSRDISR

SEQ ID NO: 8442 - protein, 466 aa, Homo sapiens
MLLGGPPRSPRSGTSPKGPWSSTGHVQFGKSPQTWPRRTRPRSPEPAAPSGVRGSTWTRRRDSPRRAGPTALSRYVGHLWMGRRPPSPEARGPVPRSSAASRARRSLASPGISPGPLTATIGGAVAGGGPRQGRAEAHKEVFPGQRVGKMAAPMELFCWSGGWGLPSVDLDSLAVLTYARFTGAPLKVHKISNPWQSPSGTLPALRTSHGEVISVPHKIITHLRKEKYNADYDLSARQGADTLAFMSLLEEKLLPVLVHTFWIDTKNYVEVTRKWYAEAMPFPLNFFLPGRMQRQYMERLQLLTGEHRPEDEEELEKELYREARECLTLLSQRLGSQKFFFGDAPASLDAFVFSYLALLLQAKLPSGKLQVHLRGLHNLCAYCTHILSLYFPWDGAEVPPQRQTPAGPETEEEPYRRRNQILSVLAGLAAMVGYALLSGIVSIQRATPARAPGTRTLGMAEEDEEE

SEQ ID NO: 8443 - protein, 956 aa, Homo sapiens
METQELRGALALLLLCFFTSASQDLQVIDLLTVGESRQMVAVAEKIRTALLTAGDIYLLSTFRLPPKQGGVLFGLYSRQDNTRWLEASVVGKINKVLVRYQREDGKVHAVNLQQAGLADGRTHTVLLRLRGPSRPSPALHLYVDCKLGDQHAGLPALAPIPPAEVDGLEIRTGQKAYLRMQGFVESMKIILGGSMARVGALSECPFQGDESIHSAVTNALHSILGEQTKALVTQLTLFNQILVELRDDIRDQVKEMSLIRNTIMECQVCGFHEQRSHCSPNPCFRGVDCMEVYEYPGYRCGPCPPGLQGNGTHCSDINECAHADPCFPGSSCINTMPGFHCEACPRGYKGTQVSGVGIDYARASKQVCNDIDECNDGNNGGCDPNSICTNTVGSFKCGPCRLGFLGNQSQGCLPARTCHSPAHSPCHIHAHCLFERNGAVSCQCNVGWAGNGNVCGTDTDIDGYPDQALPCMDNNKHCKQDNCLLTPNSGQEDADNDGVGDQCDDDADGDGIKNVEDNCRLFPNKDQQNSDTDSFGDACDNCPNVPNNDQKDTDGNGEGDACDNDVDGDGIPNGLDNCPKVPNPLQTDRDEDGVGDACDSCPEMSNPTQTDADSDLVGDVCDTNEDSDGDGHQDTKDNCPQLPNSSQLDSDNDGLGDECDGDDDNDGIPDYVPPGPDNCRLVPNPNQKDSDGNGVGDVCEDDFDNDAVVDPLDVCPESAEVTLTDFRAYQTVVLDPEGDAQIDPNWVVLNQGMEIVQTMNSDPGLAVGYTAFNGVDFEGTFHVNTVTDDDYAGFLFSYQDSGRFYVVMWKQTEQTYWQATPFRAVAQPGLQLKAVTSVSGPGEHLRNALWHTGHTPDQVRLLWTDPRNVGWRDKTSYRWQLLHRPQVGYIRVKLYEGPQLVADSGVIIDTSMRGGRLGVFCFSQENIIWSNLQYRCNDTVPEDFEPFRRQLLQGRV

SEQ ID NO: 8444 - protein, 168 aa, Homo sapiens
MTPGTQSPFFLLLLLTVLTVVTGSGHASSTPGGEKETSATQRSSVPSSTEKNALSTGVSFFFLSFHISNLQFNSSLEDPSTDYYQELQRDISEMAVCQCRRKNYGQLDIFPARDTYHPMSEYPTYHTHGRYVPPSSTDRSPYEKVSAGNGGSSLSYTNPAVAATSANL

SEQ ID NO: 8445 - protein, 255 aa, Homo sapiens
MTPGTQSPFFLLLLLTVLTVVTGSGHASSTPGGEKETSATQRSSVPSSTEKNAFNSSLEDPSTDYYQELQRDISEMFLQIYKQGGFLGLSNIKFRPGSVVVQLTLAFREGTINVHDVETQFNQYKTEAASRYNLTISDVSVSDVPFPFSAQSGAGVPGWGIALLVLVCVLVALAIVYLIALAVCQCRRKNYGQLDIFPARDTYHPMSEYPTYHTHGRYVPPSSTDRSPYEKVSAGNGGSSLSYTNPAVAATSANL

SEQ ID NO: 8446 - protein, 264 aa, Homo sapiens
MTPGTQSPFFLLLLLTVLTATTAPKPATVVTGSGHASSTPGGEKETSATQRSSVPSSTEKNAFNSSLEDPSTDYYQELQRDISEMFLQIYKQGGFLGLSNIKFRPGSVVVQLTLAFREGTINVHDVETQFNQYKTEAASRYNLTISDVSVSDVPFPFSAQSGAGVPGWGIALLVLVCVLVALAIVYLIALAVCQCRRKNYGQLDIFPARDTYHPMSEYPTYHTHGRYVPPSSTDRSPYEKVSAGNGGSSLSYTNPAVAATSANL

SEQ ID NO: 8447 - protein, 198 aa, Homo sapiens
MTPGTQSPFFLLLLLTVLTVVTGSGHASSTPGGEKETSATQRSSVPSSTEKNALSTGVSFFFLSFHISNLQFNSSLEDPSTDYYQELQRDISEMFLQIYKQGGFLGLSNIKFRPGSVVVQLTLAFREGTINVHDVETQFNQYKTEAASRYNLTISDVSGCLSVPPKELRAAGHLSSPGYLPSYERVPHLPHPWALCAP

SEQ ID NO: 8448 - protein, 159 aa, Homo sapiens
MTPGTQSPFFLLLLLTVLTATTAPKPATVVTGSGHASSTPGGEKETSATQRSSVPSSTEKNAFNSSLEDPSTDYYQELQRDISEMAVCQCRRKNYGQLDIFPARDTYHPMSEYPTYHTHGRYVPPSSTDRSPYEKVSAGNGGSSLSYTNPAVAATSANL

SEQ ID NO: 8449 - protein, 230 aa, Homo sapiens
MTPGTQSPFFLLLLLTVLTVVTGSGHASSTPGGEKETSATQRSSVPSSTEKNAIPAPTTTKSCRETFLKWPGSVVVQLTLAFREGTINVHDVETQFNQYKTEAASRYNLTISDVSVSDVPFPFSAQSGAGVPGWGIALLVLVCVLVALAIVYLIALAVCQCRRKNYGQLDIFPARDTYHPMSEYPTYHTHGRYVPPSSTDRSPYEKVSAGNGGSSLSYTNPAVAATSANL

SEQ ID NO: 8450 - protein, 221 aa, Homo sapiens
MEAGGFLDSLIYGACVVFTLGMFSAGLSDLRHMRMTRSVDNVQFLPFLTTEVNNLGWLSYGALKGDGILIVVNTVGAALQTLYILAYLHYCPRKRVVLLQTATLLGVLLLGYGYFWLLVPNPEARLQQLGLFCSVFTISMYLSPLADLAKVIQTKSTQCLSYPLTIATLLTSASWCLYGFRLRDPYIMVSNFPGIVTSFIRFWLFWKYPQEQDRNYWLLQT

SEQ ID NO: 8451 - protein, 183 aa, Homo sapiens
MEFLWAPLLGLCCSLAAADRHTVFWNSSNPKFRNEDYTIHVQLNDYVDIICPHYEDHSVADAAMEQYILYLVEHEEYQLCQPQSKDQVRWQCNRPSAKHGPEKLSEKFQRFTPFTLGKEFKEGHSYYYISHSPQAHDNPQEKRLAADDPEVRVLHSIGHSAAPRLFPLAWTVLLLPLLLLQTP

SEQ ID NO: 8452 - protein, 205 aa, Homo sapiens
MEFLWAPLLGLCCSLAAADRHTVFWNSSNPKFRNEDYTIHVQLNDYVDIICPHYEDHSVADAAMEQYILYLVEHEEYQLCQPQSKDQVRWQCNRPSAKHGPEKLSEKFQRFTPFTLGKEFKEGHSYYYISKPIHQHEDRCLRLKVTVSGKITHSPQAHDNPQEKRLAADDPEVRVLHSIGHSAAPRLFPLAWTVLLLPLLLLQTP

SEQ ID NO: 8453 - protein, 238 aa, Homo sapiens
MAAAPLLLLLLLVPVPLLPLLAQGPGGALGNRHAVYWNSSNQHLRREGYTVQVNVNDYLDIYCPHYNSSGVGPGAGPGPGGGAEQYVLYMVSRNGYRTCNASQGFKRWECNRPHAPHSPIKFSEKFQRYSAFSLGYEFHAGHEYYYISTPTHNLHWKCLRMKVFVCCASTSHSGEKPVPTLPQFTMGPNVKINVLEDFEGENPQVPKLEKSISGTSPKREHLPLAVGIAFFLMTFLAS

SEQ ID NO: 8454 - protein, 201 aa, Homo sapiens
MRLLPLLRTVLWAAFLGSPLRGGSSLRHVVYWNSSNPRLLRGDAVVELGLNDYLDIVCPHYEGPGPPEGPETFALYMVDWPGYESCQAEGPRAYKRWVCSLPFGHVQFSEKIQRFTPFSLGFEFLPGETYYYISVPTPESSGQCLRLQVSVCCKERKSESAHPVGSPGESGTSGWRGGDTPSPLCLLLLLLLLILRLLRIL

SEQ ID NO: 8455 - protein, 796 aa, Homo sapiens
MRLALLWALGLLGAGSPLPSWPLPNIGGTEEQQAESEKAPREPLEPQVLQDDLPISLKKVLQTSLPEPLRIKLELDGDSHILELLQNRELVPGRPTLVWYQPDGTRVVSEGHTLENCCYQGRVRGYAGSWVSICTCSGLRGLVVLTPERSYTLEQGPGDLQGPPIISRIQDLHLPGHTCALSWRESVHTQKPPEHPLGQRHIRRRRDVVTETKTVELVIVADHSEAQKYRDFQHLLNRTLEVALLLDTFFRPLNVRVALVGLEAWTQRDLVEISPNPAVTLENFLHWRRAHLLPRLPHDSAQLVTGTSFSGPTVGMAIQNSICSPDFSGGVNMDHSTSILGVASSIAHELGHSLGLDHDLPGNSCPCPGPAPAKTCIMEASTDFLPGLNFSNCSRRALEKALLDGMGSCLFERLPSLPPMAAFCGNMFVEPGEQCDCGFLDDCVDPCCDSLTCQLRPGAQCASDGPCCQNCQLRPSGWQCRPTRGDCDLPEFCPGDSSQCPPDVSLGDGEPCAGGQAVCMHGRCASYAQQCQSLWGPGAQPAAPLCLQTANTRGNAFGSCGRNPSGSYVSCTPRDAICGQLQCQTGRTQPLLGSIRDLLWETIDVNGTELNCSWVHLDLGSDVAQPLLTLPGTACGPGLVCIDHRCQRVDLLGAQECRSKCHGHGVCDSNRHCYCEEGWAPPDCTTQLKATSSLTTGLLLSLLVLLVLVMLGASYWYRARLHQRLCQLKGPTCQYRLVLSASRPPLPGRCRLTLCPRDSSLRGQPSPHPQGSHCLPTPRAGAHRVTCPAQGLESRP

SEQ ID NO: 8456 - protein, 520 aa, Homo sapiens
MRLALLWALGLLGAGSPLPSWPLPNIGGTEEQQAESEKAPREPLEPQVLQDDLPISLKKVLQTSLPEPLRIKLELDGDSHILELLQNRELVPGLNFSNCSRRALEKALLDGMGSCLFERLPSLPPMAAFCGNMFVEPGEQCDCGFLDDCVDPCCDSLTCQLRPGAQCASDGPCCQNCQLRPSGWQCRPTRGDCDLPEFCPGDSSQCPPDVSLGDGEPCAGGQAVCMHGRCASYAQQCQSLWGPGAQPAAPLCLQTANTRGNAFGSCGRNPSGSYVSCTPRDAICGQLQCQTGRTQPLLGSIRDLLWETIDVNGTELNCSWVHLDLGSDVAQPLLTLPGTACGPGLVCIDHRCQRVDLLGAQECRSKCHGHGVCDSNRHCYCEEGWAPPDCTTQLKATSSLTTGLLLSLLVLLVLVMLGASYWYRARLHQRLCQLKGPTCQYRAAQSGPSERPGPPQRALLARGTKSQGPAKPPPPRKPLPADPQGRCPSGDLPGPGAGIPPLVVPSRPAPPPPTVSSLYL

SEQ ID NO: 8457 - protein, 453 aa, Homo sapiens
MALVRALVCCLLTAWHCRSGLGLPVAPAGGRNPPPAIGQFWHVTDLHLDPTYHITDDHTKVCASSKGANASNPGPFGDVLCDSPYQLILSAFDFIKNSGQEASFMIWTGDSPPHVPVPELSTDTVINVITNMTTTIQSLFPNLQVFPALGNHDYWPQDQLPVVTSKVYNAVANLWKPWLDEEAISTLRKGGFYSQKVTTNPNLRIISLNTNLYYGPNIMTLNKTDPANQFEWLESTLNNSQQNKEKVYIIAHVPVGYLPSSQNITAMREYYNEKLIDIFQKYSDVIAGQFYGHTHRDSIMVLSDKKGSPVNSLFVAPAVTPVKSVLEKQTNNPGIRLFQYDPRDYKLLDMLQYYLNLTEANLKGESIWKLEYILTQTYDIEDLQPESLYGLAKQFTILDSKQFIKYYNYFFVSYDSSVTCDKTCKAFQICAIMNLDNISYADCLKQLYIKHNY

SEQ ID NO: 8458 - protein, 583 aa, Homo sapiens
MDLLPPKPKYNPLRNESLSSLEEGASGSTPPEELPSPSASSLGPILPPLPGDDSPTTLCSFFPRMSNLRLANPAGGRPGSKGEPGRAADDGEGIVGAAMPDSGPLPLLQDMNKLSGGGGRRTRVEGGQLGGEEWTRHGSFVNKPTRGWLHPNDKVMGPGVSYLVRYMGCVEVLQSMRALDFNTRTQVTREAISLVCEAVPGAKGATRRRKPCSRPLSSILGRSNLKFAGMPITLTVSTSSLNLMAADCKQIIANHHMQSISFASGGDPDTAEYVAYVAKDPVNQRACHILECPEGLAQDVISTIGQAFELRFKQYLRNPPKLVTPHDRMAGFDGSAWDEEEEEPPDHQYYNDFPGKEPPLGGVVDMRLREGAAPGAARPTAPNAQTPSHLGATLPVGQPVGGDPEVRKQMPPPPPCPGRELFDDPSYVNVQNLDKARQAVGGAGPPNPAINGSAPRDLFDMKPFEDALRVPPPPQSVSMAEQLRGEPWFHGKLSRREAEALLQLNGDFLVRESTTTPGQYVLTGLQSGQPKHLLLVDPEGVVRTKDHRFESVSHLISYHMDNHLPIISAGSELCLQQPVERKL

SEQ ID NO: 8459 - protein, 536 aa, Homo sapiens
MKQSSNVPAFLSKLWTLVEETHTNEFITWSQNGQSFLVLDEQRFAKEILPKYFKHNNMASFVRQLNMYGFRKVVHIDSGIVKQERDGPVEFQHPYFKQGQDDLLENIKRKVSSSKPEENKIRQEDLTKIISSAQKVQIKQETIESRLSELKSENESLWKEVSELRAKHAQQQQVIRKIVQFIVTLVQNNQLVSLKRKRPLLLNTNGAQKKNLFQHIVKEPTDNHHHKVPHSRTEGLKPRERISDDIIIYDVTDDNADEENIPVIPETNEDVISDPSNCSQYPDIVIVEDDNEDEYAPVIQSGEQNEPARESLSSGSDGSSPLMSSAVQLNGSSSLTSEDPVTMMDSILNDNINLLGKVELLDYLDSIDCSLEDFQAMLSGRQFSIDPDLLVDLFTSSVQMNPTDYINNTKSENKGLETTKNNVVQPVSEEGRKSKSKPDKQLIQYTAFPLLAFLDGNPASSVEQASTTASSEVLSSVDKPIEVDELLDSSLDPEPTQSKLVRLEPLTEAEASEATLFYLCELAPAPLDSDMPLLDS

SEQ ID NO: 8460 - protein, 369 aa, Homo sapiens
MKSPEKKRRKSNTQGPAYSHLTEFAPPPTPMVDHLVASNPFEDDFGAPKVGVAAPPFLGSPVPFGGFRVQGGMAGQVPPGYSTGGGGGPQPLRRQPPPFPPNPMGPAFNMPPQGPGYPPPGNMNFPSQPFNQPLGQNFSPPSGQMMPGPVGGFGPMISPTMGQPPRAELGPPSLSQRFAQPGAPFGPSPLQRPGQGLPSLPPNTSPFPGPDPGFPGPGGEDGGKPLNPPASTAFPQEPHSGSPAAAVNGNQPSFPPNSSGRGGGTPDANSLAPPGKAGGGSGPQPPPGLVYPCGACRSEVNDDQDAILCEASCQKWFHRECTGMTESAYGLLTTEASAVWACDLCLKTKEIQSVYIREGMGQLVAANDG

SEQ ID NO: 8461 - protein, 406 aa, Homo sapiens
MAASAPPPPDKLEGGGGPAPPPAPPSTGRKQGKAGLQMKSPEKKRRKSNTQGPAYSHLTEFAPPPTPMVDHLVASNPFEDDFGAPKVGVAAPPFLGSPVPFGGFRVQGGMAGQVPPGYSTGGGGGPQPLRRQPPPFPPNPMGPAFNMPPQGPGYPPPGNMNFPSQPFNQPLGQNFSPPSGQMMPGPVGGFGPMISPTMGQPPRAELGPPSLSQRFAQPGAPFGPSPLQRPGQGLPSLPPNTSPFPGPDPGFPGPGGEDGGKPLNPPASTAFPQEPHSGSPAAAVNGNQPSFPPNSSGRGGGTPDANSLAPPGKAGGGSGPQPPPGLVYPCGACRSEVNDDQDAILCEASCQKWFHRECTGMTESAYGLLTTEASAVWACDLCLKTKEIQSVYIREGMGQLVAANDG

SEQ ID NO: 8462 - protein, 731 aa, Homo sapiens
MASCPDSDNSWVLAGSESLPVETLGPASRMDPESERALQAPHSPSKTDGKELAGTMDGEGTLFQTESPQSGSILTEETEVKGTLEGDVCGVEPPGPGDTVVQGDLQETTVVTGLGPDTQDLEGQSPPQSLPSTPKAAWIREEGRCSSSDDDTDVDMEGLRRRRGREAGPPQPMVPLAVENQAGGEGAGGELGISLNMCLLGALVLLGLGVLLFSGGLSESETGPMEEVERQVLPDPEVLEAVGDRQDGLREQLQAPVPPDSVPSLQNMGLLLDKLAKENQDIRLLQAQLQAQKEELQSLMHQPKGLEEENAQLRGALQQGEAFQRALESELQQLRARLQGLEADCVRGPDGVCLSGGRGPQGDKAIREQGPREQEPELSFLKQKEQLEAEAQALRQELERQRRLLGSVQQDLERSLQDASRGDPAHAGLAELGHRLAQKLQGLENWGQDPGVSANASKAWHQKSHFQNSREWSGKEKWWDGQRDRKAEHWKHKKEESGRERKKNWGGQEDREPAGRWKEGRPRVEESGSKKEGKRQGPKEPPRKSGSFHSSGEKQKQPRWREGTKDSHDPLPSWAELLRPKYRAPQGCSGVDECARQEGLTFFGTELAPVRQQELASLLRTYLARLPWAGQLTKELPLSPAFFGEDGIFRHDRLRFRDFVDALEDSLEEVAVQQTGDDDEVDDFEDFIFSHFFGDKALKKRSGKKDKHSQSPRAAGPREGHSHSHHHHHRG

SEQ ID NO: 8463 - protein, 653 aa, Homo sapiens
MPVGGLLPLFSSPAGGVLGGGLGGGGGRKGSGPAALRLTEKFVLLLVFSAFITLCFGAIFFLPDSSKLLSGVLFHSSPALQPAADHKPGPGARAEDAAEGRARRREEGAPGDPEAALEDNLARIRENHERALREAKETLQKLPEEIQRDILLEKKKVAQDQLRDKAPFRGLPPVDFVPPIGVESREPADAAIREKRAKIKEMMKHAWNNYKGYAWGLNELKPISKGGHSSSLFGNIKGATIVDALDTLFIMEMKHEFEEAKSWVEENLDFNVNAEISVFEVNIRFVGGLLSAYYLSGEEIFRKKAVELGVKLLPAFHTPSGIPWALLNMKSGIGRNWPWASGGSSILAEFGTLHLEFMHLSHLSGNPIFAEKVMNIRTVLNKLEKPQGLYPNYLNPSSGQWGQHHVSVGGLGDSFYEYLLKAWLMSDKTDLEAKKMYFDAVQAIETHLIRKSSSGLTYIAEWKGGLLEHKMGHLTCFAGGMFALGADAAPEGMAQHYLELGAEIARTCHESYNRTFMKLGPEAFRFDGGVEAIATRQNEKYYILRPEVMETYMYMWRLTHDPKYRKWAWEAVEALENHCRVNGGYSGLRDVYLLHESYDDVQQSFFLAETLKYLYLIFSDDDLLPLEHWIFNSEAHLLPILPKDKKEVEIREE

SEQ ID NO: 8464 - protein, 931 aa, Homo sapiens
MAEIKEKICDYLFNVSDSSALNLAKNIGLTKARDINAVLIDMERQGDVYRQGTTPPIWHLTDKKRERMQIKRNTNSVPETAPAAIPETKRNAEFLTCNIPTSNASNNMVTTEKVENGQEPVIKLENRQEARPEPARLKPPVHYNGPSKAGYVDFENGQWATDDIPDDLNSIRAAPGEFRAIMEMPSFYSHGLPRCSPYKKLTECQLKNPISGLLEYAQFASQTCEFNMIEQSGPPHEPRFKFQVVINGREFPPAEAGSKKVAKQDAAMKAMTILLEEAKAKDSGKSEESSHYSTEKESEKTAESQTPTPSATSFFSGKSPVTTLLECMHKLGNSCEFRLLSKEGPAHEPKFQYCVAVGAQTFPSVSAPSKKVAKQMAAEEAMKALHGEATNSMASDNQPEGMISESLDNLESMMPNKVRKIGELVRYLNTNPVGGLLEYARSHGFAAEFKLVDQSGPPHEPKFVYQAKVGGRWFPAVCAHSKKQGKQEAADAALRVLIGENEKAERMGFTEVTPVTGASLRRTMLLLSRSPEAQPKTLPLTGSTFHDQIAMLSHRCFNTLTNSFQPSLLGRKILAAIIMKKDSEDMGVVVSLGTGNRCVKGDSLSLKGETVNDCHAEIISRRGFIRFLYSELMKYNSQTAKDSIFEPAKGGEKLQIKKTVSFHLYISTAPCGDGALFDKSCSDRAMESTESRHYPVFENPKQGKLRTKVENGEGTIPVESSDIVPTWDGIRLGERLRTMSCSDKILRWNVLGLQGALLTHFLQPIYLKSVTLGYLFSQGHLTRAICCRVTRDGSAFEDGLRHPFIVNHPKVGRVSIYDSKRQSGKTKETSVNWCLADGYDLEILDGTRGTVDGPRNELSRVSKKNIFLLFKKLCSFRYRRDLLRLSYGEAKKAARDYETAKNYFKKGLKDMGYGNWISKPQEEKNFYLCPV

SEQ ID NO: 8465 - protein, 502 aa, Homo sapiens
MARRCGPVALLLGFGLLRLCSGVWGTDTEERLVEHLLDPSRYNKLIRPATNGSELVTVQLMVSLAQLISVHEREQIMTTNVWLTQEWEDYRLTWKPEEFDNMKKVRLPSKHIWLPDVVLYNNADGMYEVSFYSNAVVSYDGSIFWLPPAIYKSACKIEVKHFPFDQQNCTMKFRSWTYDRTEIDLVLKSEVASLDDFTPSGEWDIVALPGRRNENPDDSTYVDITYDFIIRRKPLFYTINLIIPCVLITSLAILVFYLPSDCGEKMTLCISVLLALTVFLLLISKIVPPTSLDVPLVGKYLMFTMVLVTFSIVTSVCVLNVHHRSPTTHTMAPWVKVVFLEKLPALLFMQQPRHHCARQRLRLRRRQREREGAGALFFREAPGADSCTCFVNRASVQGLAGAFGAEPAPVAGPGRSGEPCGCGLREAVDGVRFIADHMRSEDDDQSVSEDWKYVAMVIDRLFLWIFVFVCVFGTIGMFLQPLFQNYTTTTFLHSDHSAPSSK

SEQ ID NO: 8466 - protein, 468 aa, Homo sapiens
MLAVGCALLAALLAAPGAALAPRRCPAQEVARGVLTSLPGDSVTLTCPGVEPEDNATVHWVLRKPAAGSHPSRWAGMGRRLLLRSVQLHDSGNYSCYRAGRPAGTVHLLVDVPPEEPQLSCFRKSPLSNVVCEWGPRSTPSLTTKAVLLVRKFQNSPAEDFQEPCQYSQESQKFSCQLAVPEGDSSFYIVSMCVASSVGSKFSKTQTFQGCGILQPDPPANITVTAVARNPRWLSVTWQDPHSWNSSFYRLRFELRYRAERSKTFTTWMVKDLQHHCVIHDAWSGLRHVVQLRAQEEFGQGEWSEWSPEAMGTPWTESRSPPAENEVSTPMQALTTNKDDDNILFRDSANATSLPVQDSSSVPLPTFLVAGGSLAFGTLLCIAIVLRFKKTWKLRALKEGKTSMHPPYSLGQLVPERPRPTPVLVPLISPPVSPSSLGSDNTSSHNRPDARDPRSPYDISNTDYFFPR

SEQ ID NO: 8467 - protein, 462 aa, Homo sapiens
MSAGGPCPAAAGGGPGGASCSVGAPGGVSMFRWLEVLEKEFDKAFVDVDLLLGEIDPDQADITYEGRQKMTSLSSCFAQLCHKAQSVSQINHKLEAQLVDLKSELTETQAEKVVLEKEVHDQLLQLHSIQLQLHAKTGQSADSGTIKAKLSGPSVEELERELEANKKEKMKEAQLEAEVKLLRKENEALRRHIAVLQAEVYGARLAAKYLDKELAGRVQQIQLLGRDMKGPAHDKLWNQLEAEIHLHRHKTVIRACRGRNDLKRPMQAPPGHDQDSLKKSQGVGPIRKVLLLKEDHEGLGISITGGKEHGVPILISEIHPGQPADRCGGLHVGDAILAVNGVNLRDTKHKEAVTILSQQRGEIEFEVVYVAPEVDSDDENVEYEDESGHRYRLYLDELEGGGNPGASCKDTSGEIKVLQGFNKKAVTDTHENGDLGTASETPLDDGASKLDDLHTLYHKKSY

SEQ ID NO: 8468 - protein, 2341 aa, Homo sapiens
MKNIYCLIPKLVNFATLGCLWISVVQCTVLNSCLKSCVTNLGQQLDLGTPHNLSEPCIQGCHFWNSVDQKNCALKCNDTYATVCERESCEVGCSSAEGAYEEEVLENADLPTAPFASSIGSHNMTLRWKSANFSGVKYIIQWKYAQLLGSWTYTKTVSRPSYVVKPLHPFTEYIFRVVWIFTAQLQLYSPPSPSYRTHPHGVPETAPLIRNIESSSPDTVEVSWDPPQFPGGPILGYNLRLISKNQKLDAGTQRTSFQFYSTLPNTIYRFSIAAVNEVGEGPEAESSITTSSSAVQQEEQWLFLSRKTSLRKRSLKHLVDEAHCLRLDAIYHNITGISVDVHQQIVYFSEGTLIWAKKAANMSDVSDLRIFYRGSGLISSISIDWLYQRMYFIMDELVCVCDLENCSNIEEITPPSISAPQKIVADSYNGYVFYLLRDGIYRADLPVPSGRCAEAVRIVESCTLKDFAIKPQAKRIIYFNDTAQVFMSTFLDGSASHLILPRIPFADVKSFACENNDFLVTDGKVIFQQDALSFNEFIVGCDLSHIEEFGFGNLVIFGSSSQLHPLPGRPQELSVLFGSHQALVQWKPPALAIGASPSAWQNWTYEVKVSTQDPPEVTHIFLNISGTMLNVPELQSAMKYKVSVRASSPKRPGPWSEPSVGTTLVPASEPPFIMAVKEDGLWSKPLNSFGPGEFLSSDIGNVSDMDWYNNSLYYSDTKGDVFVWLLNGTDISENYHLPSIAGAGALAFEWLGHFLYWAGKTYVIQRQSVLTGHTDIVTHVKLLVNDMVVDSVGGYLYWTTLYSVESTRLNGESSLVLQTQPWFSGKKVIALTLDLSDGLLYWLVQDSQCIHLYTAVLRGQSTGDTTITEFAAWSTSEISQNALMYYSGRLFWINGFRIITTQEIGQKTSVSVLEPARFNQFTIIQTSLKPLPGNFSFTPKVIPDSVQESSFRIEGNASSFQILWNGPPAVDWGVVFYSVEFSAHSKFLASEQHSLPVFTVEGLEPYALFNLSVTPYTYWGKGPKTSLSLRAPETVPSAPENPRIFILPSGKCCNKNEVVVEFRWNKPKHENGVLTKFEIFYNISNQSITNKTCEDWIAVNVTPSVMSFQLEGMSPRCFIAFQVRAFTSKGPGPYADVVKSTTSEINPFPHLITLLGNKIVFLDMDQNQVVWTFSAERVISAVCYTADNEMGYYAEGDSLFLLHLHNRSSSELFQDSLVFDITVITIDWISRHLYFALKESQNGMQVFDVDLEHKVKYPREVKIHNRNSTIISFSVYPLLSRLYWTEVSNFGYQMFYYSIISHTLHRILQPTATNQQNKRNQCSCNVTEFELSGAMAIDTSNLEKPLIYFAKAQEIWAMDLEGCQCWRVITVPAMLGKTLVSLTVDGDLIYWIITAKDSTQIYQAKKGNGAIVSQVKALRSRHILAYSSVMQPFPDKAFLSLASDTVEPTILNATNTSLTIRLPLAKTNLTWYGITSPTPTYLVYYAEVNDRKNSSDLKYRILEFQDSIALIEDLQPFSTYMIQIAVKNYYSDPLEHLPPGKEIWGKTKNGVPEAVQLINTTVRSDTSLIISWRESHKPNGPKESVRYQLAISHLALIPETPLRQSEFPNGRLTLLVTRLSGGNIYVLKVLACHSEEMWCTESHPVTVEMFNTPEKPYSLVPENTSLQFNWKAPLNVNLIRFWVELQKWKYNEFYHVKTSCSQGPAYVCNITNLQPYTSYNVRVVVVYKTGENSTSLPESFKTKAGVPNKPGIPKLLEGSKNSIQWEKAEDNGCRITYYILEIRKSTSNNLQNQNLRWKMTFNGSCSSVCTWKSKNLKGIFQFRVVAANNLGFGEYSGISENIILVGDDFWIPETSFILTIIVGIFLVVTIPLTFVWHRRLKNQKSAKEGVTVLINEDKELAELRGLAAGVGLANACYAIHTLPTQEEIENLPAFPREKLTLRLLLGSGAFGEVYEGTAVDILGVGSGEIKVAVKTLKKGSTDQEKIEFLKEAHLMSKFNHPNILKQLGVCLLNEPQYIILELMEGGDLLTYLRKARMATFYGPLLTLVDLVDLCVDISKGCVYLERMHFIHRDLAARNCLVSVKDYTSPRIVKIGDFGLARDIYKNDYYRKRGEGLLPVRWMAPESLMDGIFTTQSDVWSFGILIWEILTLGHQPYPAHSNLDVLNYVQTGGRLEPPRNCPDDLWNLMTQCWAQEPDQRPTFHRIQDQLQLFRNFFLNSIYKSRDEANNSGVINESFEGEDGDVICLNSDDIMPVALMETKNREGLNYMVLATECGQGEEKSEGPLGSQESESCGLRKEEKEPHADKDFCQEKQVAYCPSGKPEGLNYACLTHSGYGDGSD

SEQ ID NO: 8469 - protein, 2347 aa, Homo sapiens
MKNIYCLIPKLVNFATLGCLWISVVQCTVLNSCLKSCVTNLGQQLDLGTPHNLSEPCIQGCHFWNSVDQKNCALKCRESCEVGCSSAEGAYEEEVLENADLPTAPFASSIGSHNMTLRWKSANFSGVKYIIQWKYAQLLGSWTYTKTVSRPSYVVKPLHPFTEYIFRVVWIFTAQLQLYSPPSPSYRTHPHGVPETAPLIRNIESSSPDTVEVSWDPPQFPGGPILGYNLRLISKNQKLDAGTQRTSFQFYSTLPNTIYRFSIAAVNEVGEGPEAESSITTSSSAVQQEEQWLFLSRKTSLRKRSLKHLVDEAHCLRLDAIYHNITGISVDVHQQIVYFSEGTLIWAKKAANMSDVSDLRIFYRGSGLISSISIDWLYQRMYFIMDELVCVCDLENCSNIEEITPPSISAPQKIVADSYNGYVFYLLRDGIYRADLPVPSGRCAEAVRIVESCTLKDFAIKPQAKRIIYFNDTAQVFMSTFLDGSASHLILPRIPFADVKSFACENNDFLVTDGKVIFQQDALSFNEFIVGCDLSHIEEFGFGNLVIFGSSSQLHPLPGRPQELSVLFGSHQALVQWKPPALAIGANVILISDIIELFELGPSAWQNWTYEVKVSTQDPPEVTHIFLNISGTMLNVPELQSAMKYKVSVRASSPKRPGPWSEPSVGTTLVPASEPPFIMAVKEDGLWSKPLNSFGPGEFLSSDIGNVSDMDWYNNSLYYSDTKGDVFVWLLNGTDISENYHLPSIAGAGALAFEWLGHFLYWAGKTYVIQRQSVLTGHTDIVTHVKLLVNDMVVDSVGGYLYWTTLYSVESTRLNGESSLVLQTQPWFSGKKVIALTLDLSDGLLYWLVQDSQCIHLYTAVLRGQSTGDTTITEFAAWSTSEISQNALMYYSGRLFWINGFRIITTQEIGQKTSVSVLEPARFNQFTIIQTSLKPLPGNFSFTPKVIPDSVQESSFRIEGNASSFQILWNGPPAVDWGVVFYSVEFSAHSKFLASEQHSLPVFTVEGLEPYALFNLSVTPYTYWGKGPKTSLSLRAPETVPSAPENPRIFILPSGKCCNKNEVVVEFRWNKPKHENGVLTKFEIFYNISNQSITNKTCEDWIAVNVTPSVMSFQLEGMSPRCFIAFQVRAFTSKGPGPYADVVKSTTSEINPFPHLITLLGNKIVFLDMDQNQVVWTFSAERVISAVCYTADNEMGYYAEGDSLFLLHLHNRSSSELFQDSLVFDITVITIDWISRHLYFALKESQNGMQVFDVDLEHKVKYPREVKIHNRNSTIISFSVYPLLSRLYWTEVSNFGYQMFYYSIISHTLHRILQPTATNQQNKRNQCSCNVTEFELSGAMAIDTSNLEKPLIYFAKAQEIWAMDLEGCQCWRVITVPAMLAGKTLVSLTVDGDLIYWIITAKDSTQIYQAKKGNGAIVSQVKALRSRHILAYSSVMQPFPDKAFLSLASDTVEPTILNATNTSLTIRLPLAKTNLTWYGITSPTPTYLVYYAEVNDRKNSSDLKYRILEFQDSIALIEDLQPFSTYMIQIAVKNYYSDPLEHLPPGKEIWGKTKNGVPEAVQLINTTVRSDTSLIISWRESHKPNGPKESVRYQLAISHLALIPETPLRQSEFPNGRLTLLVTRLSGGNIYVLKVLACHSEEMWCTESHPVTVEMFNTPEKPYSLVPENTSLQFNWKAPLNVNLIRFWVELQKWKYNEFYHVKTSCSQGPAYVCNITNLQPYTSYNVRVVVVYKTGENSTSLPESFKTKAGVPNKPGIPKLLEGSKNSIQWEKAEDNGCRITYYILEIRKSTSNNLQNQNLRWKMTFNGSCSSVCTWKSKNLKGIFQFRVVAANNLGFGEYSGISENIILVGDDFWIPETSFILTIIVGIFLVVTIPLTFVWHRRLKNQKSAKEGVTVLINEDKELAELRGLAAGVGLANACYAIHTLPTQEEIENLPAFPREKLTLRLLLGSGAFGEVYEGTAVDILGVGSGEIKVAVKTLKKGSTDQEKIEFLKEAHLMSKFNHPNILKQLGVCLLNEPQYIILELMEGGDLLTYLRKARMATFYGPLLTLVDLVDLCVDISKGCVYLERMHFIHRDLAARNCLVSVKDYTSPRIVKIGDFGLARDIYKNDYYRKRGEGLLPVRWMAPESLMDGIFTTQSDVWSFGILIWEILTLGHQPYPAHSNLDVLNYVQTGGRLEPPRNCPDDLWNLMTQCWAQEPDQRPTFHRIQDQLQLFRNFFLNSIYKSRDEANNSGVINESFEGEDGDVICLNSDDIMPVALMETKNREGLNYMVLATECGQGEEKSEGPLGSQESESCGLRKEEKEPHADKDFCQEKQVAYCPSGKPEGLNYACLTHSGYGDGSD

SEQ ID NO: 8470 - protein, 247 aa, Homo sapiens
MAGITTIEAVKRKIQVLQQQADDAEERAERLQREVEGERRAREQAEAEVASLNRRIQLVEEELDRAQERLATALQKLEEAEKAADESERGMKVIENRALKDEEKMELQEIQLKEAKHIAEEADRKYEEVARKLVIIEGDLERTEERAELAESRCREMDEQIRLMDQNLKCLSAAEEKYSQKEDKYEEEIKILTDKLKEAETRAEFAERSVAKLEKTIDDLEERLYSQLERNRLLSNELKLTLHDLCD

SEQ ID NO: 8471 - protein, 248 aa, Homo sapiens
MAGITTIEAVKRKIQVLQQQADDAEERAERLQREVEGERRAREQAEAEVASLNRRIQLVEEELDRAQERLATALQKLEEAEKAADESERGMKVIENRALKDEEKMELQEIQLKEAKHIAEEADRKYEEVARKLVIIEGDLERTEERAELAESRCREMDEQIRLMDQNLKCLSAAEEKYSQKEDKYEEEIKILTDKLKEAETRAEFAERSVAKLEKTIDDLEDELYAQKLKYKAISEELDHALNDMTSI

SEQ ID NO: 8472 - protein, 248 aa, Homo sapiens
MAGITTIEAVKRKIQVLQQQADDAEERAERLQREVEGERRAREQAEAEVASLNRRIQLVEEELDRAQERLATALQKLEEAEKAADESERGMKVIENRALKDEEKMELQEIQLKEAKHIAEEADRKYEEVARKLVIIEGDLERTEERAELAESRCREMDEQIRLMDQNLKCLSAAEEKYSQKEDKYEEEIKILTDKLKEAETRAEFAERSVAKLEKTIDDLEDKLKCTKEEHLCTQRMLDQTLLDLNEM

SEQ ID NO: 8473 - protein, 290 aa, Homo sapiens
MAALRVLLSCVRGPLRPPVRCPAWRPFASGANFEYIIAEKRGKNNTVGLIQLNRPKALNALCDGLIDELNQALKTFEEDPAVGAIVLTGGDKAFAAGADIKEMQNLSFQDCYSSKFLKHWDHLTQVKKPVIAAVNGYAFGGGCELAMMCDIIYAGEKAQFAQPEILIGTIPGAGGTQRLTRAVGKSLAMEMVLTGDRISAQDAKQAGLVSKICPVETLVEEAIQCAEKIASNSKIVVAMAKESVNAAFEMTLTEGSKLEKKLFYSTFATDDRKEGMTAFVEKRKANFKDQ

SEQ ID NO: 8474 - protein, 855 aa, Homo sapiens
MAFLIILITCFVIILATSQPCQTPDDFVAATSPGHIIIGGLFAIHEKMLSSEDSPRRPQIQECVGFEISVFLQTLAMIHSIEMINNSTLLPGVKLGYEIYDTCTEVTVAMAATLRFLSKFNCSRETVEFKCDYSSYMPRVKAVIGSGYSEITMAVSRMLNLQLMPQVGYESTAEILSDKIRFPSFLRTVPSDFHQIKAMAHLIQKSGWNWIGIITTDDDYGRLALNTFIIQAEANNVCIAFKEVLPAFLSDNTIEVRINRTLKKIILEAQVNVIVVFLRQFHVFDLFNKAIEMNINKMWIASDNWSTATKITTIPNVKKIGKVVGFAFRRGNISSFHSFLQNLHLLPSDSHKLLHEYAMHLSACAYVKDTDLSQCIFNHSQRTLAYKANKAIERNFVMRNDFLWDYAEPGLIHSIQLAVFALGYAIRDLCQARDCQNPNAFQPWEQIQSKCSKECSPGQMKKTTRSQHICCYECQNCPENHYTNQTDMPHCLLCNNKTHWAPVRSTMCFEKEVEYLNWNDSLAILLLILSLLGIIFVLVVGIIFTRNLNTPVVKSSGGLRVCYVILLCHFLNFASTSFFIGEPQDFTCKTRQTMFGVSFTLCISCILTKSLKILLAFSFDPKLQKFLKCLYRPILIIFTCTGIQVVICTLWLIFAAPTVEVNVSLPRVIILECEEGSILAFGTMLGYIAILAFICFIFAFKGKYENYNEAKFITFGMLIYFIAWITFIPIYATTFGKYVPAVEIIVILISNYGILYCTFIPKCYVIICKQEINTKSAFLKMIYSYSSHSVSSIALSPASLDSMSGNVTMTNPSSSGKSATWQKSKDLQAQAFAHICRENATSVSKTLPRKRMSSI

SEQ ID NO: 8475 - protein, 134 aa, Homo sapiens
MVALKGVPALLSPELLYALARMGHGDEIVLADLNFPASSICQCGPMEIRADGLGIPQLLEAVLKLLPLDTYVESPAAVMELVPSDKERGLQTPVWTEYESILRRAGCVRALAKIERFEFYERAKKAFAVVATGC

SEQ ID NO: 8476 - protein, 412 aa, Homo sapiens
MAGKAAAPGTAVLLVTANVGSLFDDPENLQKNWLREFYQVVHTHKPHFMALHCQEFGGKNYEASMSHVDKFVKELLSSDAMKEYNRARVYLDENYKSQEHFTALGSFYFLHESLKNIYQFDFKAKKYRKVAGKEIYSDTLESTPMLEKEKFPQDYFPECKWSRKGFIRTRWCIADCAFDLVNIHLFHDASNLVAWETSPSVYSGIRHKALGYVLDRIIDQRFEKVSYFVFGDFNFRLDSKSVVETLCTKATMQTVRAADTNEVVKLIFRESDNDRKVMLQLEKKLFDYFNQEVFRDNNGTALLEFDKELSVFKDRLYELDISFPPSYPYSEDARQGEQYMNTRCPAWCDRILMSPSAKELVLRSESEEKVVTYDHIGPNVCMGDHKPVFLAFRIMPGAGKPHAHVHKCCVVQ

SEQ ID NO: 8477 - protein, 128 aa, Homo sapiens
MLGWILITLATIAALVSCCVAKCCSPLTSLQHCYWTSHLQNERELFEQAAEQHSRLLMMHRIKKLFGFIPGSEDVKHIRIPSCQDWKDISVPTLLCMGDDLQGHYSFLGNRVDEDNEEDRSRGIELKP

SEQ ID NO: 8478 - protein, 309 aa, Homo sapiens
MDAFQGILKFFLNQKTVIGYSFMALLTVGSERLFSVVAFKCPCSTENMTYGLVFLFAPAWVLLILGFFLNNRSWRLFTGCCVNPRKIFPRGHSCRFFYVLGQITLSSLVAPVMWLSVALLNGTFYECAMSGTRSSGLLELICKGKPKECWEELHKVSCGKTSMLPTVNEELKLSLQAQSQILGWCLICSASFFSLLTTCYARCRSKVSYLQLSFWKTYAQKEKEQLENTFLDYANKLSERNLKCFFENKRPDPFPMPTFAAWEAASELHSFHQSQQHYSTLHRVVDNGLQLSPEDDETTMVLVGTAHNM

SEQ ID NO: 8479 - protein, 437 aa, Homo sapiens
MSGLDGVKRTTPLQTHSIIISDQVPSDQDAHQYLRLRDQSEATQVMAEPGEGGSETVALPPPPPSEEGGVPQDAAGRGGTPQIRVVGGRGHVAIKAGQEEGQPPAEGLAAASVVMAADRSLKKGVQGGEKALEICGAQRSASELTAGAEAEAEEVKTGKCATVSAAVAERESAEVVKEGLAEKEVMEEQMEVEEQPPEGEEIEVAEEDRLEEEAREEEGPWPLHEALRMDPLEAIQLELDTVNAQADRAFQQLEHKFGRMRRHYLERRNYIIQNIPGFWMTAFRNHPQLSAMIRGQDAEMLRYITNLEVKELRHPRTGCKFKFFFRRNPYFRNKLIVKEYEVRSSGRVVSLSTPIIWRRGHEPQSFIRRNQDLICSFFTWFSDHSLPESDKIAEIIKEDLWPNPLQYYLLREGVRRARRRPLREPVEIPRPFGFQSG

SEQ ID NO: 8480 - protein, 530 aa, Homo sapiens
MEGSSSYEVPSVAAADLEEGAGQTRSLPATPSKDVHKGVGGIIFSSSPILDLSESGLCRLEEVFRIPSLQQLHLQRNALCVIPQDFFQLLPNLTWLDLRYNRIKALPSGIGAHQHLKTLLLERNPIKMLPVELGSVTTLKALNLRHCPLEFPPQLVVQKGLVAIQRFLRMWAVEHSLPRNPTSQEAPPVREMTLRDLPSPGLELSGDHASNQGAVNAQDPEGAVMKEKASFLPPVEKPDLSELRKSADSSENWPSEEEIRRFWKLRQEIVEHVKADVLGDQLLTRELPPNLKAALNIEKELPKPRHVFRRKTASSRSILPDLLSPYQMAIRAKRLEESRAAALRELQEKQALMEQQRREKRALQEWRERAQRMRKRKEELSKLLPPRRSMVASKIPSATDLIDNRKVPLNPPGKMKPSKEKSPQASKEMSALQERNLEEKIKQHVLQMREQRRFHGQAPLEEMRKAAEDLEIATELQDEVLKLKLGLTLNKDRRRAALTGNLSLGLPAAQPQNTFFNTKYGESGNVRRYQ

SEQ ID NO: 8481 - protein, 458 aa, Homo sapiens
MKPHRIRMTHNLLLNYGLYRKMEIYRPHKATAEEMTKYHSDEYIKFLRSIRPDNMSEYSKQMQRFNVGEDCPVFDGLFEFCQLSTGGSVAGAVKLNRQQTDMAVNWAGGLHHAKKSEASGFCYVNDIVLAILELLKYHQRVLYIDIDIHHGDGVEEAFYTTDRVMTVSFHKYGEYFPGTGDLRDIGAGKGKYYAVNFPMRDGIDDESYGQIFKPIISKVMEMYQPSAVVLQCGADSLSGDRLGCFNLTVKGHAKCVEVVKTFNLPLLMLGGGGYTIRNVARCWTYETAVALDCEIPNELPYNDYFEYFGPDFKLHISPSNMTNQNTPEYMEKIKQRLFENLRMLPHAPGVQMQAIPEDAVHEDSGDEDGEDPDKRISIRASDKRIACDEEFSDSEDEGEGGRRNVADHKKGAKKARIEEDKKETEDKKTDVKEEDKSKDNSGEKTDTKGTKSEQLSNP

SEQ ID NO: 8482 - protein, 693 aa, Homo sapiens
MATSGANGPGSATASASNPRKFSEKIALQKQRQAEETAAFEEVMMDIGSTRLQAQKLRLAYTRSSHYGGSLPNVNQIGSGLAEFQSPLHSPLDSSRSTRHHGLVERVQRDPRRMVSPLRRYTRHIDSSPYSPAYLSPPPESSWRRTMAWGNFPAEKGQLFRLPSALNRTSSDSALHTSVMNPSPQDTYPGPTPPSILPSRRGGILDGEMDPKVPAIEENLLDDKHLLKPWDAKKLSSSSSRPRSCEVPGINIFPSPDQPANVPVLPPAMNTGGSLPDLTNLHFPPPLPTPLDPEETAYPSLSGGNSTSNLTHTMTHLGISRGMGLGPGYDAPGLHSPLSHPSLQSSLSNPNLQASLSSPQPQLQGSHSHPSLPASSLARHVLPTTSLGHPSLSAPALSSSSSSSSTSSPVLGAPSYPASTPGASPHHRRVPLSPLSLLAGPADARRSQQQLPKQFSPTMSPTLSSITQGVPLDTSKLSTDQRLPPYPYSSPSLVLPTQPHTPKSLQQPGLPSQSCSVQSSGGQPPGRQSHYGTPYPPGPSGHGQQSYHRPMSDFNLGNLEQFSMESPSASLVLDPPGFSEGPGFLGGEGPMGGPQDPHTFNHQNLTHCSRHGSGPNIILTGDSSPGFSKEIAAALAGVPGFEVSAAGLELGLGLEDELRMEPLGLEGLNMLSDPCALLPDPAVEESFRSDRLQ

SEQ ID NO: 8483 - protein, 259 aa, Homo sapiens
MGDAAADPPGPALPCEFLRPGCGAPLSPGAQLGRGAPTSAFPPPAAEAHPAARRGLRSPQLPSGAMSQNGAPGMQEESLQGSWVELHFSNNGNGGSVPASVSIYNGDMEKILLDAQHESGRSSSKSSHCDSPPRSQTPQDTNRASETDTHSIGEKNSSQSEEDDIERRKEVESILKKNSDWIWDWSSRPENIPPKEFLFKHPKRTATLSMRNTSVMKKGGIFSAEFLKVFLPSLLLSHLLAIGLGIYIGRRLTTSTSTF

SEQ ID NO: 8484 - protein, 120 aa, Homo sapiens
MALSSAWRSVLPLWLLWSAACSRAASGDDNAFPFDIEGSSAVGRQDPPETSEPRVALGRLPPAAEVQCPCHCHPAGAPAPPRAVPHSSFSLSPPLSSPQCLESFTWARSVRKLEIKSFPL

SEQ ID NO: 8485 - protein, 551 aa, Homo sapiens
MFGIQENIPRGGTTMKEEPLGSGMNPVRSWMHTAGVVDANTAAQSGVGLARAHFEKQPPSNLRKSNFFHFVLALYDRQGQPVEIERTAFVDFVEKEKEPNNEKTNNGIHYKLQLLYSNGVRTEQDLYVRLIDSMTKQAIVYEGQDKNPEMCRVLLTHEIMCSRCCDKKSCGNRNETPSDPVIIDRFFLKFFLKCNQNCLKNAGNPRDMRRFQVVVSTTVNVDGHVLAVSDNMFVHNNSKHGRRARRLDPSEATPCIKAISPSEGWTTGGATVIIIGDNFFDGLQVVFGTMLVWSELITPHAIRVQTPPRHIPGVVEVTLSYKSKQFCKGAPGRFVYTALNEPTIDYGFQRLQKVIPRHPGDPERLPKEVLLKRAADLVEALYGMPHNNQEIILKRAADIAEALYSVPRNHNQIPTLGNNPAHTGMMGVNSFSSQLAVNVSETSQANDQVGYSRNTSSVSPRGYVPSSTPQQSNYNTVSTSMNGYGSGAMASLGVPGSPGFLNGSSANSPYGMKQKSAFAPVVRPQASPPPSCTSANGNGLQAMSGLVVPPM

SEQ ID NO: 8486 - protein, 3256 aa, Homo sapiens
MWPTRRLVTIKRSGVDGPHFPLSLSTCLFGRGIECDIRIQLPVVSKQHCKIEIHEQEAILHNFSSTNPTQVNGSVIDEPVRLKHGDVITIIDRSFRYENESLQNGRKSTEFPRKIREQEPARRVSRSSFSSDPDEKAQDSKAYSKITEGKVSGNPQVHIKNVKEDSTADDSKDSVAQGTTNVHSSEHAGRNGRNAADPISGDFKEISSVKLVSRYGELKSVPTTQCLDNSKKNESPFWKLYESVKKELDVKSQKENVLQYCRKSGLQTDYATEKESADGLQGETQLLVSRKSRPKSGGSGHAVAEPASPEQELDQNKGKGRDVESVQTPSKAVGASFPLYEPAKMKTPVQYSQQQNSPQKHKNKDLYTTGRRESVNLGKSEGFKAGDKTLTPRKLSTRNRTPAKVEDAADSATKPENLSSKTRGSIPTDVEVLPTETEIHNEPFLTLWLTQVERKIQKDSLSKPEKLGTTAGQMCSGLPGLSSVDINNFGDSINESEGIPLKRRRVSFGGHLRPELFDENLPPNTPLKRGEAPTKRKSLVMHTPPVLKKIIKEQPQPSGKQESGSEIHVEVKAQSLVISPPAPSPRKTPVASDQRRRSCKTAPASSSKSQTEVPKRGGRKSGNLPSKRVSISRSQHDILQMICSKRRSGASEANLIVAKSWADVVKLGAKQTQTKVIKHGPQRSMNKRQRRPATPKKPVGEVHSQFSTGHANSPCTIIIGKAHTEKVHVPARPYRVLNNFISNQKMDFKEDLSGIAEMFKTPVKEQPQLTSTCHIAISNSENLLGKQFQGTDSGEEPLLPTSESFGGNVFFSAQNAAKQPSDKCSASPPLRRQCIRENGNVAKTPRNTYKMTSLETKTSDTETEPSKTVSTANRSGRSTEFRNIQKLPVESKSEETNTEIVECILKRGQKATLLQQRREGEMKEIERPFETYKENIELKENDEKMKAMKRSRTWGQKCAPMSDLTDLKSLPDTELMKDTARGQNLLQTQDHAKAPKSEKGKITKMPCQSLQPEPINTPTHTKQQLKASLGKVGVKEELLAVGKFTRTSGETTHTHREPAGDGKSIRTFKESPKQILDPAARVTGMKKWPRTPKEEAQSLEDLAGFKELFQTPGPSEESMTDEKTTKIACKSPPPESVDTPTSTKQWPKRSLRKADVEEEFLALRKLTPSAGKAMLTPKPAGGDEKDIKAFMGTPVQKLDLAGTLPGSKRQLQTPKEKAQALEDLAGFKELFQTPGHTEELVAAGKTTKIPCDSPQSDPVDTPTSTKQRPKRSIRKADVEGELLACRNLMPSAGKAMHTPKPSVGEEKDIIIFVGTPVQKLDLTENLTGSKRRPQTPKEEAQALEDLTGFKELFQTPGHTEEAVAAGKTTKMPCESSPPESADTPTSTRRQPKTPLEKRDVQKELSALKKLTQTSGETTHTDKVPGGEDKSINAFRETAKQKLDPAASVTGSKRHPKTKEKAQPLEDLAGLKELFQTPVCTDKPTTHEKTTKIACRSQPDPVDTPTSSKPQSKRSLRKVDVEEEFFALRKRTPSAGKAMHTPKPAVSGEKNIYAFMGTPVQKLDLTENLTGSKRRLQTPKEKAQALEDLAGFKELFQTRGHTEESMTNDKTAKVACKSSQPDPDKNPASSKRRLKTSLGKVGVKEELLAVGKLTQTSGETTHTHTEPTGDGKSMKAFMESPKQILDSAASLTGSKRQLRTPKGKSEVPEDLAGFIELFQTPSHTKESMTNEKTTKVSYRASQPDLVDTPTSSKPQPKRSLRKADTEEEFLAFRKQTPSAGKAMHTPKPAVGEEKDINTFLGTPVQKLDQPGNLPGSNRRLQTRKEKAQALEELTGFRELFQTPCTDNPTTDEKTTKKILCKSPQSDPADTPTNTKQRPKRSLKKADVEEEFLAFRKLTPSAGKAMHTPKAAVGEEKDINTFVGTPVEKLDLLGNLPGSKRRPQTPKEKAKALEDLAGFKELFQTPGHTEESMTDDKITEVSCKSPQPDPVKTPTSSKQRLKISLGKVGVKEEVLPVGKLTQTSGKTTQTHRETAGDGKSIKAFKESAKQMLDPANYGTGMERWPRTPKEEAQSLEDLAGFKELFQTPDHTEESTTDDKTTKIACKSPPPESMDTPTSTRRRPKTPLGKRDIVEELSALKQLTQTTHTDKVPGDEDKGINVFRETAKQKLDPAASVTGSKRQPRTPKGKAQPLEDLAGLKELFQTPICTDKPTTHEKTTKIACRSPQPDPVGTPTIFKPQSKRSLRKADVEEESLALRKRTPSVGKAMDTPKPAGGDEKDMKAFMGTPVQKLDLPGNLPGSKRWPQTPKEKAQALEDLAGFKELFQTPGTDKPTTDEKTTKIACKSPQPDPVDTPASTKQRPKRNLRKADVEEEFLALRKRTPSAGKAMDTPKPAVSDEKNINTFVETPVQKLDLLGNLPGSKRQPQTPKEKAEALEDLVGFKELFQTPGHTEESMTDDKITEVSCKSPQPESFKTSRSSKQRLKIPLVKVDMKEEPLAVSKLTRTSGETTQTHTEPTGDSKSIKAFKESPKQILDPAASVTGSRRQLRTRKEKARALEDLVDFKELFSAPGHTEESMTIDKNTKIPCKSPPPELTDTATSTKRCPKTRPRKEVKEELSAVERLTQTSGQSTHTHKEPASGDEGIKVLKQRAKKKPNPVEEEPSRRRPRAPKEKAQPLEDLAGFTELSETSGHTQESLTAGKATKIPCESPPLEVVDTTASTKRHLRTRVQKVQVKEEPSAVKFTQTSGETTDADKEPAGEDKGIKALKESAKQTPAPAASVTGSRRRPRAPRESAQAIEDLAGFKDPAAGHTEESMTDDKTTKIPCKSSPELEDTATSSKRRPRTRAQKVEVKEELLAVGKLTQTSGETTHTDKEPVGEGKGTKAFKQPAKRKLDAEDVIGSRRQPRAPKEKAQPLEDLASFQELSQTPGHTEELANGAADSFTSAPKQTPDSGKPLKISRRVLRAPKVEPVGDVVSTRDPVKSQSKSNTSLPPLPFKRGGGKDGSVTGTKRLRCMPAPEEIVEELPASKKQRVAPRARGKSSEPVVIMKRSLRTSAKRIEPAEELNSNDMKTNKEEHKLQDSVPENKGISLRSRRQNKTEAEQQITEVFVLAERIEINRNEKKPMKTSPEMDIQNPDDGARKPIPRDKVTENKRCLRSARQNESSQPKVAEESGGQKSAKVLMQNQKGKGEAGNSDSMCLRSRKTKSQPAASTLESKSVQRVTRSVKRCAENPKKAEDNVCVKKIRTRSHRDSEDI

SEQ ID NO: 8487 - protein, 593 aa, Homo sapiens
MDRMTEDALRLNLLKRSLDPADERDDVLAKRLKMEGHEAMERLKMLALLKRKDLANLEVPHELPTKQDGSGVKGYEEKLNGNLRPHGDNRTAGRPGKENINDEPVDMSARRSEPERGRLTPSPDIIVLSDNEASSPRSSSRMEERLKAANLEMFKGKGIEERQQLIKQLRDELRLEEARLVLLKKLRQSQLQKENVVQKTPVVQNAASIVQPSPAHVGQQGLSKLPSRPGAQGVEPQNLRTLQGHSVIRSATNTTLPHMLMSQRVIAPNPAQLQGQRGPPKPGLVRTTTPNMNPAINYQPQSSSSVPCQRTTSSAIYMNLASHIQPGTVNRVSSPLPSPSAMTDAANSQAAAKLALRKQLEKTLLEIPPPKPPAPLLHFLPSAANSEFIYMVGLEEVVQSVIDSQGKSCASLLRVEPFVCAQCRTDFTPHWKQEKNGKILCEQCMTSNQKKALKAEHTNRLKNAFVKALQQEQEIEQRLQQQAALSPTTAPAVSSVSKQETIMRHHTLRQAPQPQSSLQRGIPTSARSMLSNFAQAPQLSVPGGLLGMPGVNIAYLNTGIGGHKGPSLADRQREYLLDMIPPRSISQSISGQK

SEQ ID NO: 8488 - protein, 80 aa, Homo sapiens
MPFQFGTQPRRFPVEGGDSSIELEPGLSSSAACNGKEMSPTRQLRRCPGSHCLTITDVPVTVYATTRKPPAQSSKEMHPK

SEQ ID NO: 8489 - protein, 475 aa, Homo sapiens
MTQSVVVQVGQCGNQIGCCFWDLALREHAAVNQKGIYDEAISSFFRNVDTRVVGDGGSISKGKICSLKARAVLIDMEEGVVNEILQGPLRDVFDTKQLITDISGSGNNWAVGHKVFGSLYQDQILEKFRKSAEHCDCLQCFFIIHSMGGGTGSGLGTFLLKVLEDEFPEVYRFVTSIYPSGEDDVITSPYNSILAMKELNEHADCVLPIDNQSLFDIISKIDLMVNSGKLGTTVKPKSLVTSSSGALKKQHKKPFDAMNNIVANLLLNLTSSARFEGSLNMDLNEISMNLVPFPQLHYLVSSLTPLYTLTDVNIPPRRLDQMFSDAFSKDHQLLRADPKHSLYLACALMVRGNVQISDLRRNIERLKPSLQFVSWNQEGWKTSLCSVPPVGHSHSLLALANNTCVKPTFMELKERFMRLYKKKAHLHHYLQVEGMEESCFTEAVSSLSALIQEYDQLDATKNMPVQDLPRLSIAM

SEQ ID NO: 8490 - protein, 237 aa, Homo sapiens
MNKRRLLYPSGWLHGPSDMQGLLFSTLLLAGLAQFCCRVQGTGPLDTTPEGRPGEVSDAPQRKQFCHWPCKCPQQKPRCPPGVSLVRDGCGCCKICAKQPGEICNEADLCDPHKGLYCDYSVDRPRYETGVCAYLVAVGCEFNQVHYHNGQVFQPNPLFSCLCVSGAIGCTPLFIPKLAGSHCSGAKGGKKSDQSNCSLEPLLQQLSTSYKTMPDVCQASNLLPALRSLNCCLPSSL

SEQ ID NO: 8491 - protein, 738 aa, Homo sapiens
MAARPLPVSPARALLLALAGALLAPCEARGVSLWNQGRADEVVSASVGSGDLWIPVKSFDSKNHPEVLNIRLQRESKELIINLERNEGLIASSFTETHYLQDGTDVSLARNYTVILGHCYYHGHVRGYSDSAVSLSTCSGLRGLIVFENESYVLEPMKSATNRYKLFPAKKLKSVRGSCGSHHNTPNLAAKNVFPPPSQTWARRHKRETLKATKYVELVIVADNREFQRQGKDLEKVKQRLIEIANHVDKFYRPLNIRIVLVGVEVWNDMDKCSVSQDPFTSLHEFLDWRKMKLLPRKSHDNAQLVSGVYFQGTTIGMAPIMSMCTADQSGGIVMDHSDNPLGAAVTLAHELGHNFGMNHDTLDRGCSCQMAVEKGGCIMNASTGYPFPMVFSSCSRKDLETSLEKGMGVCLFNLPEVRESFGGQKCGNRFVEEGEECDCGEPEECMNRCCNATTCTLKPDAVCAHGLCCEDCQLKPAGTACRDSSNSCDLPEFCTGASPHCPANVYLHDGHSCQDVDGYCYNGICQTHEQQCVTLWGPGAKPAPGICFERVNSAGDPYGNCGKVSKSSFAKCEMRDAKCGKIQCQGGASRPVIGTNAVSIETNIPLQQGGRILCRGTHVYLGDDMPDPGLVLAGTKCADGKICLNRQCQNISVFGVHECAMQCHGRGVCNNRKNCHCEAHWAPPFCDKFGFGGSTDSGPIRQAEARQEAAESNRERGQGQEPVGSQEHASTASLTLI

SEQ ID NO: 8492 - protein, 534 aa, Homo sapiens
MGCVQCKDKEATKLTEERDGSLNQSSGYRYGTDPTPQHYPSFGVTSIPNYNNFHAAGGQGLTVFGGVNSSSHTGTLRTRGGTGVTLFVALYDYEARTEDDLSFHKGEKFQILNSSEGDWWEARSLTTGETGYIPSNYVAPVDSIQAEEWYFGKLGRKDAERQLLSFGNPRGTFLIRESETTKGAYSLSIRDWDDMKGDHVKHYKIRKLDNGGYYITTRAQFETLQQLVQHYSEKADGLCFNLTVIASSCTPQTSGLAKDAWEVARRSLCLEKKLGQGCFAEVWLGTWNGNTKVAIKTLKPGTMSPESFLEEAQIMKKLKHDKLVQLYAVVSEEPIYIVTEYMNKGSLLDFLKDGEGRALKLPNLVDMAAQVAAGMAYIERMNYIHRDLRSANILVGNGLICKIADFGLARLIEDNEYTARQGAKFPIKWTAPEAALYGRFTIKSDVWSFGILLTELVTKGRVPYPGMNNREVLEQVERGYRMPCPQDCPISLHELMIHCWKKDPEERPTFEYLQSFLEDYFTATEPQYQPGENL

SEQ ID NO: 8493 - protein, 909 aa, Homo sapiens
MAARPLPVSPARALLLALAGALLAPCEARGVSLWNQGRADEVVSASVGSGDLWIPVKSFDSKNHPEVLNIRLQRESKELIINLERNEGLIASSFTETHYLQDGTDVSLARNYTVILGHCYYHGHVRGYSDSAVSLSTCSGLRGLIVFENESYVLEPMKSATNRYKLFPAKKLKSVRGSCGSHHNTPNLAAKNVFPPPSQTWARRHKRETLKATKYVELVIVADNREFQRQGKDLEKVKQRLIEIANHVDKFYRPLNIRIVLVGVEVWNDMDKCSVSQDPFTSLHEFLDWRKMKLLPRKSHDNAQLVSGVYFQGTTIGMAPIMSMCTADQSGGIVMDHSDNPLGAAVTLAHELGHNFGMNHDTLDRGCSCQMAVEKGGCIMNASTGYPFPMVFSSCSRKDLETSLEKGMGVCLFNLPEVRESFGGQKCGNRFVEEGEECDCGEPEECMNRCCNATTCTLKPDAVCAHGLCCEDCQLKPAGTACRDSSNSCDLPEFCTGASPHCPANVYLHDGHSCQDVDGYCYNGICQTHEQQCVTLWGPGAKPAPGICFERVNSAGDPYGNCGKVSKSSFAKCEMRDAKCGKIQCQGGASRPVIGTNAVSIETNIPLQQGGRILCRGTHVYLGDDMPDPGLVLAGTKCADGKICLNRQCQNISVFGVHECAMQCHGRGVCNNRKNCHCEAHWAPPFCDKFGFGGSTDSGPIRQADNQGLTIGILVTILCLLAAGFVVYLKRKTLIRLLFTNKKTTIEKLRCVRPSRPPRGFQPCQAHLGHLGKGLMRKPPDSYPPKDNPRRLLQCQNVDISRPLNGLNVPQPQSTQRVLPPLHRAPRAPSVPARPLPAKPALRQAQGTCKPNPPQKPLPADPLARTTRLTHALARTPGQWETGLRLAPLRPAPQYPHQVPRSTHTAYIK

SEQ ID NO: 8494 - protein, 1061 aa, Homo sapiens
MPGPRRPAGSRLRLLLLLLLPPLLLLLRGSHAGNLTVAVVLPLANTSYPWSWARVGPAVELALAQVKARPDLLPGWTVRTVLGSSENALGVCSDTAAPLAAVDLKWEHNPAVFLGPGCVYAAAPVGRFTAHWRVPLLTAGAPALGFGVKDEYALTTRAGPSYAKLGDFVAALHRRLGWERQALMLYAYRPGDEEHCFFLVEGLFMRVRDRLNITVDHLEFAEDDLSHYTRLLRTMPRKGRVIYICSSPDAFRTLMLLALEAGLCGEDYVFFHLDIFGQSLQGGQGPAPRRPWERGDGQDVSARQAFQAAKIITYKDPDNPEYLEFLKQLKHLAYEQFNFTMEDGLVNTIPASFHDGLLLYIQAVTETLAHGGTVTDGENITQRMWNRSFQGVTGYLKIDSSGDRETDFSLWDMDPENGAFRVVLNYNGTSQELVAVSGRKLNWPLGYPPPDIPKCGFDNEDPACNQDHLSTLEVLALVGSLSLLGILIVSFFIYRKMQLEKELASELWRVRWEDVEPSSLERHLRSAGSRLTLSGRGSNYGSLLTTEGQFQVFAKTAYYKGNLVAVKRVNRKRIELTRKVLFELKHMRDVQNEHLTRFVGACTDPPNICILTEYCPRGSLQDILENESITLDWMFRYSLTNDIVKGMLFLHNGAICSHGNLKSSNCVVDGRFVLKITDYGLESFRDLDPEQGHTVYAKKLWTAPELLRMASPPVRGSQAGDVYSFGIILQEIALRSGVFHVEGLDLSPKEIIERVTRGEQPPFRPSLALQSHLEELGLLMQRCWAEDPQERPPFQQIRLTLRKFNRENSSNILDNLLSRMEQYANNLEELVEERTQAYLEEKRKAEALLYQILPHSVAEQLKRGETVQAEAFDSVTIYFSDIVGFTALSAESTPMQVVTLLNDLYTCFDAVIDNFDVYKVETIGDAYMVVSGLPVRNGRLHACEVARMALALLDAVRSFRIRHRPQEQLRLRIGIHTGPVCAGVVGLKMPRYCLFGDTVNTASRMESNGEALKIHLSSETKAVLEEFGGFELELRGDVEMKGKGKVRTYWLLGERGSSTRG

SEQ ID NO: 8495 - protein, 136 aa, Homo sapiens
MAGAGSAAVSGAGTPVAGPTGRDLFAEGLLEFLRPAVQQLDSHVHAVRESQVELREQIDNLATELCRINEDQKVALDLDPYVKKLLNARRRVVLVNNILQNAQERLRRLNHSVAKETARRRAMLDSGIYPPGSPGK

SEQ ID NO: 8496 - protein, 249 aa, Homo sapiens
MAAQSAPKVVLKSTTKMSLNERFTNMLKNKQPTPVNIRASMQQQQQLASARNRRLAQQMENRPSVQAALKLKQKSLKQRLGKSNIQARLGRPIGALARGAIGGRGLPIIQRGLPRGGLRGGRATRTLLRGGMSLRGQNLLRGGRAVAPRMGLRRGGVRGRGGPGRGGLGRGAMGRGGIGGRGRGMIGRGRGGFGGRGRGRGRGRGALARPVLTKEQLDNQLDAYMSKTKGHLDAELDAYMAQTDPETND

SEQ ID NO: 8497 - protein, 248 aa, Homo sapiens
MAAQSAPKVVLKSTTKMSLNERFTNMLKNKQPTPVNIRASMQQQQQLASARNRRLAQQMENRPSVQAALKLKQSLKQRLGKSNIQARLGRPIGALARGAIGGRGLPIIQRGLPRGGLRGGRATRTLLRGGMSLRGQNLLRGGRAVAPRMGLRRGGVRGRGGPGRGGLGRGAMGRGGIGGRGRGMIGRGRGGFGGRGRGRGRGRGALARPVLTKEQLDNQLDAYMSKTKGHLDAELDAYMAQTDPETND

SEQ ID NO: 8498 - protein, 103 aa, Homo sapiens
MSDCYTELEKAVIVLVENFYKYVSKYSLVKNKISKSSFREMLQKELNHMLSDTGNRKAADKLIQNLDANHDGRISFDEYWTLIGGITGPIAKLIHEQEQQSSS

SEQ ID NO: 8499 - protein, 101 aa, Homo sapiens
MARPLEQAVAAIVCTFQEYAGRCGDKYKLCQAELKELLQKELATWTPTEFRECDYNKFMSVLDTNKDCEVDFVEYVRSLACLCLYCHEYFKDCPSEPPCSQ

SEQ ID NO: 8500 - protein, 90 aa, Homo sapiens
MACPLDQAIGLLVAIFHKYSGREGDKHTLSKKELKELIQKELTIGSKLQDAEIARLMEDLDRNKDQEVNFQEYVTFLGALALIYNEALKG

SEQ ID NO: 8501 - protein, 369 aa, Homo sapiens
MLPWLLVFSALGIQAWGDSSWNKTQAKQVSEGLQYLFENISQLTEKDVSTTVSRKAWGAEAVGCSIQLTTPVNVLVIHHVPGLECHDQTVCSQRLRELQAHHVHNNSGCDVAYNFLVGDDGRVYEGVGWNIQGVHTQGYNNISLGFAFFGTKKGHSPSPAALSAMENLITYAVQKGHLSSSYVQPLLGKGENCLAPRQKTSLKKACPGVVPRSVWGARETHCPRMTLPAKYGIIIHTAGRTCNISDECRLLVRDIQSFYIDRLKSCDIGYNFLVGQDGAIYEGVGWNVQGSSTPGYDDIALGITFMGTFTGIPPNAAALEAAQDLIQCAMVKGYLTPNYLLVGHSDVARTLSPGQALYNIISTWPHFKH

SEQ ID NO: 8502 - protein, 322 aa, Homo sapiens
MASRSKRRAVESGVPQPPDPPVQRDEEEEKEVENEDEDDDDSDKEKDEEDEVIDEEVNIEFEAYSLSDNDYDGIKKLLQQLFLKAPVNTAELTDLLIQQNHIGSVIKQTDVSEDSNDDMDEDEVFGFISLLNLTERKGTQCVEQIQELVLRFCEKNCEKSMVEQLDKFLNDTTKPVGLLLSERFINVPPQIALPMYQQLQKELAGAHRTNKPCGKCYFYLLISKTFVEAGKNNSKKKPSNKKKAALMFANAEEEFFYEEQGKPEVLGGPDTRRGLEPVPIQHNGGSRGQVTALVSLKAGLIQSRSTLSDFQGTFMTVGIALS

SEQ ID NO: 8503 - protein, 565 aa, Homo sapiens
MNRSIPVEVDESEPYPSQLLKPIPEYSPEEESEPPAPNIRNMAPNSLSAPTMLHNSSGDFSQAHSTLKLANHQRPVSRQVTCLRTQVLEDSEDSFCRRHPGLGKAFPSGCSAVSEPASESVVGALPAEHQFSFMEKRNQWLVSQLSAASPDTGHDSDKSDQSLPNASADSLGGSQEMVQRPQPHRNRAGLDLPTIDTGYDSQPQDVLGIRQLERPLPLTSVCYPQDLPRPLRSREFPQFEPQRYPACAQMLPPNLSPHAPWNYHYHCPGSPDHQVPYGHDYPRAAYQQVIQPALPGQPLPGASVRGLHPVQKVILNYPSPWDHEERPAQRDCSFPGLPRHQDQPHHQPPNRAGAPGESLECPAELRPQVPQPPSPAAVPRPPSNPPARGTLKTSNLPEELRKVFITYSMDTAMEVVKFVNFLLVNGFQTAIDIFEDRIRGIDIIKWMERYLRDKTVMIIVAISPKYKQDVEGAESQLDEDEHGLHTKYIHRMMQIEFIKQGSMNFRFIPVLFPNAKKEHVPTWLQNTHVYSWPKNKKNILLRLLREEEYVAPPRGPLPTLQVVPL

SEQ ID NO: 8504 - protein, 133 aa, Homo sapiens
MKVLLLKDAKEDDCGQDPYIRELGLYGLEATLIPVLSFEFLSLPSFSEKLSHPEDYGGLIFTSPRAVEAAELCLEQNNKTEVWERSLKEKWNAKSVYVVGNATASLVSKIGLDTEGETCGNAEKLAEYICSSK

SEQ ID NO: 8505 - protein, 265 aa, Homo sapiens
MKVLLLKDAKEDDCGQDPYIRELGLYGLEATLIPVLSFEFLSLPSFSEKLSHPEDYGGLIFTSPRAVEAAELCLEQNNKTEVWERSLKEKWNAKSVYVVGNATASLVSKIGLDTEGETCGNAEKLAEYICSRESSALPLLFPCGNLKREILPKALKDKGIAMESITVYQTVAHPGIQGNLNSYYSQQGVPASITFFSPSGLTYSLKHIQELSGDNIDQIKFAAIGPTTARALAAQGLPVSCTAESPTPQALATGIRKALQPHGCC

SEQ ID NO: 8506 - protein, 4061 aa, Homo sapiens
MSTLLENIFAIINLFKQYSKKDKNTDTLSKKELKELLEKEFRQILKNPDDPDMVDVFMDHLDIDHNKKIDFTEFLLMVFKLAQAYYESTRKENLPISGHKHRKHSHHDKHEDNKQEENKENRKRPSSLERRNNRKGNKGRSKSPRETGGKRHESSSEKKERKGYSPTHREEEYGKNHHNSSKKEKNKTENTRLGDNRKRLSERLEEKEDNEEGVYDYENTGRMTQKWIQSGHIATYYTIQDEAYDTTDSLLEENKIYERSRSSDGKSSSQVNRSRHENTSQVPLQESRTRKRRGSRVSQDRDSEGHSEDSERHSGSASRNHHGSAWEQSRDGSRHPRSHDEDRASHGHSADSSRQSGTRHAETSSRGQTASSHEQARSSPGERHGSGHQQSADSSRHSATGRGQASSAVSDRGHRGSSGSQASDSEGHSENSDTQSVSGHGKAGLRQQSHQESTRGRSGERSGRSGSSLYQVSTHEQPDSAHGRTGTSTGGRQGSHHEQARDSSRHSASQEGQDTIRGHPGSSRGGRQGSHHEQSVNRSGHSGSHHSHTTSQGRSDASHGQSGSRSASRQTRNEEQSGDGTRHSGSRHHEASSQADSSRHSQVGQGQSSGPRTSRNQGSSVSQDSDSQGHSEDSERWSGSASRNHHGSAQEQSRDGSRHPRSHHEDRAGHGHSADSSRKSGTRHTQNSSSGQAASSHEQARSSAGERHGSRHQLQSADSSRHSGTGHGQASSAVRDSGHRGSSGSQATDSEGHSEDSDTQSVSGHGQAGHHQQSHQESARDRSGERSRRSGSFLYQVSTHKQSESSHGWTGPSTGVRQGSHHEQARDNSRHSASQDGQDTIRGHPGSSRRGRQGSHHEQSVDRSGHSGSHHSHTTSQGRSDASRGQSGSRSASRTTRNEEQSRDGSRHSGSRHHEASSHADISRHSQAGQGQSEGSRTSRRQGSSVSQDSDSEGHSEDSERWSGSASRNHRGSAQEQSRHGSRHPRSHHEDRAGHGHSADSSRQSGTPHAETSSGGQAASSHEQARSSPGERHGSRHQQSADSSRHSGIPRRQASSAVRDSGHWGSSGSQASDSEGHSEESDTQSVSGHGQDGPHQQSHQESARDWSGGRSGRSGSFIYQVSTHEQSESAHGRTRTSTGRRQGSHHEQARDSSRHSASQEGQDTIRAHPGSRRGGRQGSHHEQSVDRSGHSGSHHSHTTSQGRSDASHGQSGSRSASRQTRKDKQSGDGSRHSGSRHHEAASWADSSRHSQVGQEQSSGSRTSRHQGSSVSQDSDSERHSDDSERLSGSASRNHHGSSREQSRDGSRHPGFHQEDRASHGHSADSSRQSGTHHTESSSHGQAVSSHEQARSSPGERHGSRHQQSADSSRHSGIGHRQASSAVRDSGHRGSSGSQVTNSEGHSEDSDTQSVSAHGQAGPHQQSHKESARGQSGESSGRSRSFLYQVSSHEQSESTHGQTAPSTGGRQGSRHEQARNSSRHSASQDGQDTIRGHPGSSRGGRQGSYHEQSVDRSGHSGYHHSHTTPQGRSDASHGQSGPRSASRQTRNEEQSGDGSRHSGSRHHEPSTRAGSSRHSQVGQGESAGSKTSRRQGSSVSQDRDSEGHSEDSERRSESASRNHYGSAREQSRHGSRNPRSHQEDRASHGHSAESSRQSGTRHAETSSGGQAASSQEQARSSPGERHGSRHQQSADSSTDSGTGRRQDSSVVGDSGNRGSSGSQASDSEGHSEESDTQSVSAHGQAGPHQQSHQESTRGQSGERSGRSGSFLYQVSTHEQSESAHGRTGPSTGGRQRSRHEQARDSSRHSASQEGQDTIRGHPGSSRGGRQGSHYEQSVDSSGHSGSHHSHTTSQERSDVSRGQSGSRSVSRQTRNEKQSGDGSRHSGSRHHEASSRADSSRHSQVGQGQSSGPRTSRNQGSSVSQDSDSQGHSEDSERWSGSASRNHLGSAWEQSRDGSRHPGSHHEDRAGHGHSADSSRQSGTRHTESSSRGQAASSHEQARSSAGERHGSHHQLQSADSSRHSGIGHGQASSAVRDSGHRGYSGSQASDSEGHSEDSDTQSVSAQGKAGPHQQSHKESARGQSGESSGRSGSFLYQVSTHEQSESTHGQSAPSTGGRQGSHYDQAQDSSRHSASQEGQDTIRGHPGPSRGGRQGSHQEQSVDRSGHSGSHHSHTTSQGRSDASRGQSGSRSASRKTYDKEQSGDGSRHSGSHHHEASSWADSSRHSLVGQGQSSGPRTSRPRGSSVSQDSDSEGHSEDSERRSGSASRNHHGSAQEQSRDGSRHPRSHHEDRAGHGHSAESSRQSGTHHAENSSGGQAASSHEQARSSAGERHGSHHQQSADSSRHSGIGHGQASSAVRDSGHRGSSGSQASDSEGHSEDSDTQSVSAHGQAGPHQQSHQESTRGRSAGRSGRSGSFLYQVSTHEQSESAHGRTGTSTGGRQGSHHKQARDSSRHSTSQEGQDTIHGHPGSSSGGRQGSHYEQLVDRSGHSGSHHSHTTSQGRSDASHGHSGSRSASRQTRNDEQSGDGSRHSGSRHHEASSRADSSGHSQVGQGQSEGPRTSRNWGSSFSQDSDSQGHSEDSERWSGSASRNHHGSAQEQLRDGSRHPRSHQEDRAGHGHSADSSRQSGTRHTQTSSGGQAASSHEQARSSAGERHGSHHQQSADSSRHSGIGHGQASSAVRDSGHRGYSGSQASDNEGHSEDSDTQSVSAHGQAGSHQQSHQESARGRSGETSGHSGSFLYQVSTHEQSESSHGWTGPSTRGRQGSRHEQAQDSSRHSASQDGQDTIRGHPGSSRGGRQGYHHEHSVDSSGHSGSHHSHTTSQGRSDASRGQSGSRSASRTTRNEEQSGDGSRHSGSRHHEASTHADISRHSQAVQGQSEGSRRSRRQGSSVSQDSDSEGHSEDSERWSGSASRNHHGSAQEQLRDGSRHPRSHQEDRAGHGHSADSSRQSGTRHTQTSSGGQAASSHEQARSSAGERHGSHHQQSADSSRHSGIGHGQASSAVRDSGHRGYSGSQASDNEGHSEDSDTQSVSAHGQAGSHQQSHQESARGRSGETSGHSGSFLYQVSTHEQSESSHGWTGPSTRGRQGSRHEQAQDSSRHSASQYGQDTIRGHPGSSRGGRQGYHHEHSVDSSGHSGSHHSHTTSQGRSDASRGQSGSRSASRTTRNEEQSGDSSRHSVSRHHEASTHADISRHSQAVQGQSEGSRRSRRQGSSVSQDSDSEGHSEDSERWSGSASRNHRGSVQEQSRHGSRHPRSHHEDRAGHGHSADRSRQSGTRHAETSSGGQAASSHEQARSSPGERHGSRHQQSADSSRHSGIPRGQASSAVRDSRHWGSSGSQASDSEGHSEESDTQSVSGHGQAGPHQQSHQESARDRSGGRSGRSGSFLYQVSTHEQSESAHGRTRTSTGRRQGSHHEQARDSSRHSASQEGQDTIRGHPGSSRRGRQGSHYEQSVDRSGHSGSHHSHTTSQGRSDASRGQSGSRSASRQTRNDEQSGDGSRHSWSHHHEASTQADSSRHSQSGQGQSAGPRTSRNQGSSVSQDSDSQGHSEDSERWSGSASRNHRGSAQEQSRDGSRHPTSHHEDRAGHGHSAESSRQSGTHHAENSSGGQAASSHEQARSSAGERHGSHHQQSADSSRHSGIGHGQASSAVRDSGHRGSSGSQASDSEGHSEDSDTQSVSAHGQAGPHQQSHQESTRGRSAGRSGRSGSFLYQVSTHEQSESAHGRAGPSTGGRQGSRHEQARDSSRHSASQEGQDTIRGHPGSRRGGRQGSYHEQSVDRSGHSGSHHSHTTSQGRSDASHGQSGSRSASRETRNEEQSGDGSRHSGSRHHEASTQADSSRHSQSGQGESAGSRRSRRQGSSVSQDSDSEAYPEDSERRSESASRNHHGSSREQSRDGSRHPGSSHRDTASHVQSSPVQSDSSTAKEHGHFSSLSQDSAYHSGIQSRGSPHSSSSYHYQSEGTERQKGQSGLVWRHGSYGSADYDYGESGFRHSQHGSVSYNSNPVVFKERSDICKASAFGKDHPRYYATYINKDPGLCGHSSDISKQLGFSQSQRYYYYE

SEQ ID NO: 8507 - protein, 569 aa, Homo sapiens
MLAASIFRPTLLLCWLAAPWPTQPESLFHSRDRSDLEPSPLRQAKPIADLHAAQRFLSRYGWSGVWAAWGPSPEGPPETPKGAALAEAVRRFQRANALPASGELDAATLAAMNRPRCGVPDMRPPPPSAPPSPPGPPPRARSRRSPRAPLSLSRRGWQPRGYPDGGAAQAFSKRTLSWRLLGEALSSQLSVADQRRIVALAFRMWSEVTPLDFREDLAAPGAAVDIKLGFGRGRHLGCPRAFDGSGQEFAHAWRLGDIHFDDDEHFTPPTSDTGISLLKVAVHEIGHVLGLPHTYRTGSIMQPNYIPQEPAFELDWSDRKAIQKLYGSCEGSFDTAFDWIRKERNQYGEVMVRFSTYFFRNSWYWLYENRNNRTRYGDPIQILTGWPGIPTHNIDAFVHIWTWKRDERYFFQGNQYWRYDSDKDQALTEDEQGKSYPKLISEGFPGIPSPLDTAFYDRRQKLIYFFKESLVFAFDVNRNRVLNSYPKRITEVFPAVIPQNHPFRNIDSAYYSYAYNSIFFFKGNAYWKVVNDKDKQQNSWLPANGLFPKKFISEKWFDVCDVHISTLNM

SEQ ID NO: 8508 - protein, 97 aa, Homo sapiens
MPSQMEHAMETMMFTFHKFAGDKGYLTKEDLRVLMEKEFPGFLENQKDPLAVDKIMKDLDQCRDGKVGFQSFFSLIAGLTIACNDYFVVHMKQKGKK

SEQ ID NO: 8509 - protein, 593 aa, Homo sapiens
MDAATAPKQAWPPWPPLLFLLLLPGGSGGSCPAVCDCTSQPQAVLCGHRQLEAVPGGLPLDTELLDLSGNRLWGLQQGMLSRLSLLQELDLSYNQLSTLEPGAFHGLQSLLTLRLQGNRLRIMGPGVFSGLSALTLLDLRLNQIVLFLDGAFGELGSLQKLEVGDNHLVFVAPGAFAGLAKLSTLTLERCNLSTVPGLALARLPALVALRLRELDIGRLPAGALRGLGQLKELEIHLWPSLEALDPGSLVGLNLSSLAITRCNLSSVPFQALYHLSFLRVLDLSQNPISAIPARRLSPLVRLQELRLSGACLTSIAAHAFHGLTAFHLLDVADNALQTLEETAFPSPDKLVTLRLSGNPLTCDCRLLWLLRLRRHLDFGMSPPACAGPHHVQGKSLKEFSDILPPGHFTCKPALIRKSGPRWVIAEEGGHAVFSCSGDGDPAPTVSWMRPHGAWLGRAGRVRVLEDGTLEIRSVQLRDRGAYVCVVSNVAGNDSLRTWLEVIQVEPPNGTLSDPNITVPGIPGPFFLDSRGVAMVLAVGFLPFLTSVTLCFGLIALWSKGKGRVKHHMTFDFVAPRPSGDKNSGGNRVTAKLF

SEQ ID NO: 8510 - protein, 233 aa, Homo sapiens
MAAPVVTAPGRALLRAGAGRLLRGGVQELLRPRHEGNAPDLACNFSLSQNRGTVIVERWWKVPLAGEGRKPRLHRRHRVYKLVEDTKHRPKENLELILTQSVENVGVRGDLVSVKKSLGRNRLLPQGLAVYASPENKKLFEEEKLLRQEGKLEKIQTKAGEALGVVVAPHTLKLPEEPITRWGEYWCEVTVNGLDTVRVPMSVVNFEKPKTKRYKYWLAQQAAKAMAPTSPQI

SEQ ID NO: 8511 - protein, 267 aa, Homo sapiens [sequence omitted]

SEQ ID NO: 8512 - protein, 270 aa, Homo sapiens
MAPWGKRLAGVRGVLLDISGVLYDSGAGGGTAIAGSVEAVARLKRSRLKVRFCTNESQKSRAELVGQLQRLGFDISEQEVTAPAPAACQILKEQGLRPYLLIHDGVRSEFDQIDTSNPNCVVIADAGESFSYQNMNNAFQVLMELEKPVLISLGKGRYYKETSGLMLDVGPYMKALEYACGIKAEVVGKPSPEFFKSALQAIGVEAHQAVMIGDDIVGDVGGAQRCGMRALQVRTGKFRPSDEHHPEVKADGYVDNLAEAVDLLLQHADK

SEQ ID NO: 8513 - protein, 528 aa, Homo sapiens
MADEDGEGIHPSAPHRNGGGGGGGGSGLHCAGNGGGGGGGPRVVRIVKSESGYGFNVRGQVSEGGQLRSINGELYAPLQHVSAVLPGGAADRAGVRKGDRILEVNHVNVEGATHKQVVDLIRAGEKELILTVLSVPPHEADNLDPSDDSLGQSFYDYTEKQAVPISVPRYKHVEQNGEKFVVYNVYMAGRQLCSKRYREFAILHQNLKREFANFTFPRLPGKWPFSLSEQQLDARRRGLEEYLEKVCSIRVIGESDIMQEFLSESDENYNGVSDVELRVALPDGTTVTVRVKKNSTTDQVYQAIAAKVGMDSTTVNYFALFEVISHSFVRKLAPNEFPHKLYIQNYTSAVPGTCLTIRKWLFTTEEEILLNDNDLAVTYFFHQAVDDVKKGYIKAEEKSYQLQKLYEQRKMVMYLNMLRTCEGYNEIIFPHCACDSRRKGHVITAISITHFKLHACTEEGQLENQVIAFEWDEMQRWDTDEEGMAFCFEYARGEKKPRWVKIFTPYFNYMHECFERVFCELKWRKEEY

SEQ ID NO: 8514 - protein, 439 aa, Homo sapiens
MFSKLAHLQRFAVLSRGVHSSVASATSVATKKTVQGPPTSDDIFEREYKYGAHNYHPLPVALERGKGIYLWDVEGRKYFDFLSSYSAVNQGHCHPKIVNALKSQVDKLTLTSRAFYNNVLGEYEEYITKLFNYHKVLPMNTGVEAGETACKLARKWGYTVKGIQKYKAKIVFAAGNFWGRTLSAISSSTDPTSYDGFGPFMPGFDIIPYNDLPALERALQDPNVAAFMVEPIQGEAGVVVPDPGYLMGVRELCTRHQVLFIADEIQTGLARTGRWLAVDYENVRPDIVLLGKALSGGLYPVSAVLCDDDIMLTIKPGEHGSTYGGNPLGCRVAIAALEVLEEENLAENADKLGIILRNELMKLPSDVVTAVRGKGLLNAIVIKETKDWDAWKVCLRLRDNGLLAKPTHGDIIRFAPPLVIKEDELRESIEIINKTILSF

SEQ ID NO: 8515 - protein, 43 aa, Homo sapiens
MLCASFLGLVVTSLSWLFGGTKEPHICRPYTSLLPWVPFWLHC

SEQ ID NO: 8516 - protein, 390 aa, Homo sapiens
MNGTRNWCTLVDVHPEDQAAGSVDILRLTLQGELTGDELEHIAQKAGRKTYAMVSSHSAGHSLASELVESHDGHEEIIKVYLKGRSGDKMIHEKNINQLKSEVQYIQEARNCLQKLREDISSKLDRNLGDSLHRQEIQVVLEKPNGFSQSPTALYSSPPEVDTCINEDVESLRKTVQDLLAKLQEAKRQHQSDCVAFEVTLSRYQREAEQSNVALQREEDRVEQKEAEVGELQRRLLGMETEHQALLAKVREGEVALEELRSNNADCQAEREKAATLEKEVAGLREKIHHLDDMLKSQQRKVRQMIEQLQNSKAVIQSKDATIQELKEKIAYLEAENLEMHDRMEHLIEKQISHGNFSTQARAKTENPGSIRISKPPSPKPMPVIRVVET

SEQ ID NO: 8517 - protein, 326 aa, Homo sapiens
MTGSNEFKLNQPPEDGISSVKFSPNTSQFLLVSSWDTSVRLYDVPANSMRLKYQHTGAVLDCAFYDPTHAWSGGLDHQLKMHDLNTDQENLVGTHDAPIRCVEYCPEVNVMVTGSWDQTVKLWDPRTPCNAGTFSQPEKVYTLSVSGDRLIVGTAGRRVLVWDLRNMGYVQQRRESSLKYQTRCIRAFPNKQGYVLSSIEGRVAVEYLDPSPEVQKKKYAFKCHRLKENNIEQIYPVNAISFHNIHNTFATGGSDGFVNIWDPFNKKRLCQFHRYPTSIASLAFSNDGTTLAIASSYMYEMDDTEHPEDGIFIRQVTDAETKPKST

SEQ ID NO: 8518 - protein, 328 aa, Homo sapiens
MTGSNEFKLNQPPEDGISSVKFSPNTSQFLLVSSWDTSVRLYDVPANSMRLKYQHTGAVLDCAFYDPTHAWSGGLDHQLKMHDLNTDQENLVGTHDAPIRCVEYCPEVNVMVTGSWDQTVKLWDPRTPCNAGTFSQPEKVYTLSVSGDRLIVGTAGRRVLVWDLRNMGYVQQRRESSLKYQTRCIRAFPNKQGYVLSSIEGRVAVEYLDPSPEVQKKKYAFKCHRLKENNIEQIYPVNAISFHNIHNTFATGGSDGFVNIWDPFNKKRLCQFHRYPTSIASLAFSNDGTTLAIASSYMYEMDDTEHPEDGIFIRQVTDAETKPKSPCT

SEQ ID NO: 8519 - protein, 472 aa, Homo sapiens
MATKCGNCGPGYSTPLEAMKGPREEIVYLPCIYRNTGTEAPDYLATVDVDPKSPQYCQVIHRLPMPNLKDELHHSGWNTCSSCFGDSTKSRTKLVLPSLISSRIYVVDVGSEPRAPKLHKVIEPKDIHAKCELAFLHTSHCLASGEVMISSLGDVKGNGKGGFVLLDGETFEVKGTWERPGGAAPLGYDFWYQPRHNVMISTEWAAPNVLRDGFNPADVEAGLYGSHLYVWDWQRHEIVQTLSLKDGLIPLEIRFLHNPDAAQGFVGCALSSTIQRFYKNEGGTWSVEKVIQVPPKKVKGWLLPEMPGLITDILLSLDDRFLYFSNWLHGDLRQYDISDPQRPRLTGQLFLGGSIVKGGPVQVLEDEELKSQPEPLVVKGKRVAGGPQMIQLSLDGKRLYITTSLYSAWDKQFYPDLIREGSVMLQVDVDTVKGGLKLNPNFLVDFGKEPLGPALAHELRYPGGDCSSDIWI

SEQ ID NO: 8520 - protein, 213 aa, Homo sapiens
MAAAADERSPEDGEDEEEEEQLVLVELSGIIDSDFLSKCENKCKVLGIDTERPILQVDSCVFAGEYEDTLGTCVIFEENVEHADTEGNNKTVLKYKCHTMKKLSMTRTLLTEKKEGEENIGGVEWLQIKDNDFSYRPNMICNFLHENEDEEVVASAPDKSLELEEEEIQMNDSSNLSCEQEKPMHLEIEDSGPLIDIPSETEGSVFMETQMLP

SEQ ID NO: 8521 - protein, 265 aa, Homo sapiens
MFVSKRRFILKTCGTTLLLKALVPLLKLARDYSGFDSIQSFFYSRKNFMKPSHQGYPHRNFQEEIEFLNAIFPNGAAYCMGRMNSDCWYLYTLDFPESRVISQPDQTLEILMSELDPAVMDQFYMKDGVTAKDVTRESGIRDLIPGSVIDATMFNPCGYSMNGMKSDGTYWTIHITPEPEFSYVSFETNLSQTSYDDLIRKVVEVFKPGKFVTTLFVNQSSKCRTVLASPQKIEGFKRLDCQSAMFNDYNFVFTSFAKKQQQQQS

SEQ ID NO: 8522 - protein, 432 aa, Homo sapiens
MEGLAVRLLRGSRLLRRNFLTCLSSWKIPPHVSKSSQSEALLNITNNGIHFAPLQTFTDEEMMIKSSVKKFAQEQIAPLVSTMDENSKMEKSVIQGLFQQGLMGIEVDPEYGGTGASFLSTVLVIEELAKVDASVAVFCEIQNTLINTLIRKHGTEEQKATYLPQLTTEKVGSFCLSEAGAGSDSFALKTRADKEGDYYVLNGSKMWISSAEHAGLFLVMANVDPTIGYKGITSFLVDRDTPGLHIGKPENKLGLRASSTCPLTFENVKVPEANILGQIGHGYKYAIGSLNEGRIGIAAQMLGLAQGCFDYTIPYIKERIQFGKRLFDFQGLQHQVAHVATQLEAARLLTYNAARLLEAGKPFIKEASMAKYYASEIAGQTTSKCIEWMGGVGYTKDYPVEKYFRDAKIGTIYEGASNIQLNTIAKHIDAEY

SEQ ID NO: 8523 - protein, 380 aa, Homo sapiens
MVLESTMVCVDNSEYMRNGDFLPTRLQAQQDAVNIVCHSKTRSNPENNVGLITLANDCEVLTTLTPDTGRILSKLHTVQPKGKITFCTGIRVAHLALKHRQGKNHKMRIIAFVGSPVEDNEKDLVKLAKRLKKEKVNVDIINFGEEEVNTEKLTAFVNTLNGKDGTGSHLVTVPPGPSLADALISSPILAGEGGAMLGLGASDFEFGVDPSADPELALALRVSMEEQRQRQEEEARRAAAASAAEAGIATTGTEGERDSDDALLKMTISQQEFGRTGLPDLSSMTEEEQIAYAMQMSLQGAEFGQAESADIDASSAMDTSEPAKEEDDYDVMQDPEFLQSVLENLPGVDPNNEAIRNAMGSLASQATKDGKKDKKEEDKK

SEQ ID NO: 8524 - protein, 334 aa, Homo sapiens
MEAAHFFEGTEKLLEVWFSRQQPDANQGSGDLRTIPRSEWDILLKDVQCSIISVTKTDKQEAYVLSESSMFVSKRRFILKTCGTTLLLKALVPLLKLARDYSGFDSIQSFFYSRKNFMKPSHQGYPHRNFQEEIEFLNAIFPNGAAYCMGRMNSDCWYLYTLDFPESRVISQPDQTLEILMSELDPAVMDQFYMKDGVTAKDVTRESGIRDLIPGSVIDATMFNPCGYSMNGMKSDGTYWTIHITPEPEFSYVSFETNLSQTSYDDLIRKVVEVFKPGKFVTTLFVNQSSKCRTVLASPQKIEGFKRLDCQSAMFNDYNFVFTSFAKKQQQQQS

SEQ ID NO: 8525 - protein, 377 aa, Homo sapiens
MVLESTMVCVDNSEYMRNGDFLPTRLQAQQDAVNIVCHSKTRSNPENNVGLITLANDCEVLTTLTPDTGRILSKLHTVQPKGKITFCTGIRVAHLALKHRQGKNHKMRIIAFVGSPVEDNEKDLVKLAKRLKKEKVNVDIINFGEEEVNTEKLTAFVNTLNGKDGTGSHLVTVPPGPSLADALISSPILAGEGGAMLGLGASDFEFGVDPSADPELALALRVSMEEQRQRQEEEARRAAAASAAEAGIATTGTEDSDDALLKMTISQQEFGRTGLPDLSSMTEEEQIAYAMQMSLQGAEFGQAESADIDASSAMDTSEPAKEEDDYDVMQDPEFLQSVLENLPGVDPNNEAIRNAMGSLASQATKDGKKDKKEEDKK

SEQ ID NO: 8526 - protein, 500 aa, Homo sapiens
MASASSGPSSSVGFSSFDPAVPSCTLSSASGIKRPMASEVPYASGMPIKKIGHRSVDSSGETTYKKTTSSALKGAIQLGITHTVGSLSTKPERDVLMQDFYVVESIFFPSEGSNLTPAHHYNDFRFKTYAPVAFRYFRELFGIRPDDYLYSLCSEPLIELCSSGASGSLFYVSSDDEFIIKTVQHKEAEFLQKLLPGYYMNLNQNPRTLLPKFYGLYCVQAGGKNIRIVVMNNLLPRSVKMHIKYDLKGSTYKRRASQKEREKPLPTFKDLDFLQDIPDGLFLDADMYNALCKTLQRDCLVLQSFKIMDYSLLMSIHNIDHAQREPLSSETQYSVDTRRPAPQKALYSTAMESIQGEARRGGTMETDDHMGGIPARNSKGERLLLYIGIIDILQSYRFVKKLEHSWKALVHDGDTVSVHRPGFYAERFQRFMCNTVFKKIPCVHLGRPDVLPQTPPLEEISEGSPIPDPSFSPLVGETLQMLTTSTTLEKLEVAESEFTH

SEQ ID NO: 8527 - protein, 364 aa, Homo sapiens
MSLAGGRAPRKTAGNRLSGLLEAEEEDEFYQTTYGGFTEESGDDEYQGDQSDTEDEVDSDFDIDEGDEPSSDGEAEEPRRKRRVVTKAYKEPLKSLRPRKVNTPAGSSQKAREEKALLPLELQDDGSDSRKSMRQSTAEHTRQTFLRVQERQGQSRRRKGPHCERPLTQEELLREAKITEELNLRSLETYERLEADKKKQVHKKRKCPGPIITYHSVTVPLVGEPGPKEENVDIEGLDPAPSVSALTPHAGTGPVNPPARCSRTFITFSDDATFEEWFPQGRPPKVPVREVCPVTHRPALYRDPVTDIPYATARAFKIIREAYKKYITAHGLPPTASALGPGPPPPEPLPGSGPRALRQKIVIK

SEQ ID NO: 8528 - protein, 52 aa, Homo sapiens
MELVRRLMPLTLLILSCLAELTMAEAEGLIQMEAVKVKTLKSLTEPPAMGLC

SEQ ID NO: 8529 - protein, 195 aa, Homo sapiens
MLRDGRFACAICPHRPVLDTLAMLTAHRAGKKHLSSLQLFYGKKQPGKERKQNPKHQNELRREETKAEAPLLTQTRLITQSALHRAPHYNSCCRRKYRPEAPGPSVSLSPMPPSEVKLQSGKISREPEPAAGPQAEESATVSAPAPMSPTRRRALDHYLTLRSSGWIPDGRGRWVKDENVEFDSDEEEPPDLPLD

SEQ ID NO: 8530 - protein, 279 aa, Homo sapiens
MELVRRLMPLTLLILSCLAELTMAEAEGNASCTVSLGGANMAETHKAMILQLNPSENCTWTIERPENKSIRIIFSYVQLDPDGSCESENIKVFDGTSSNGPLLGQVCSKNDYVPVFESSSSTLTFQIVTDSARIQRTVFVFYYFFSPNISIPNCGGYLDTLEGSFTSPNYPKPHPELAYCVWHIQVEKDYKIKLNFKEIFLEIDKQCKFDFLAIYDGPSTNSGLIGQVCGRVTPTFESSSNSLTVVLSTDYANSYRGFSASYTSIYAENINTTSLTCSS

SEQ ID NO: 8531 - protein, 230 aa, Homo sapiens
MSFKREGDDWSQLNVLKKRRVGDLLASYIPEDEALMLRDGRFACAICPHRPVLDTLAMLTAHRAGKKHLSSLQLFYGKKQPGKERKQNPKHQNELRREETKAEAPLLTQTRLITQSALHRAPHYNSCCRRKYRPEAPGPSVSLSPMPPSEVKLQSGKISREPEPAAGPQAEESATVSAPAPMSPTRRRALDHYLTLRSSGWIPDGRGRWVKDENVEFDSDEEEPPDLPLD

SEQ ID NO: 8532 - protein, 2413 aa, Homo sapiens
MGISTVILEMCLLWGQVLSTGGWIPRTTDYASLIPSEVPLDPTVAEGSPFPSESTLESTVAEGSPISLESTLESTVAEGSLIPSESTLESTVAEGSDSGLALRLVNGDGRCQGRVEILYRGSWGTVCDDSWDTNDANVVCRQLGCGWAMSAPGNAWFGQGSGPIALDDVRCSGHESYLWSCPHNGWLSHNCGHGEDAGVICSAAQPQSTLRPESWPVRISPPVPTEGSESSLALRLVNGGDRCRGRVEVLYRGSWGTVCDDYWDTNDANVVCRQLGCGWAMSAPGNAQFGQGSGPIVLDDVRCSGHESYLWSCPHNGWLTHNCGHSEDAGVICSAPQSRPTPSPDTWPTSHASTAGPESSLALRLVNGGDRCQGRVEVLYRGSWGTVCDDSWDTSDANVVCRQLGCGWATSAPGNARFGQGSGPIVLDDVRCSGYESYLWSCPHNGWLSHNCQHSEDAGVICSAAHSWSTPSPDTLPTITLPASTVGSESSLALRLVNGGDRCQGRVEVLYRGSWGTVCDDSWDTNDANVVCRQLGCGWAMLAPGNARFGQGSGPIVLDDVRCSGNESYLWSCPHNGWLSHNCGHSEDAGVICSGPESSLALRLVNGGDRCQGRVEVLYRGSWGTVCDDSWDTNDANVVCRQLGCGWATSAPGNARFGQGSGPIVLDDVRCSGHESYLWSCPNNGWLSHNCGHHEDAGVICSAAQSRSTPRPDTLSTITLPPSTVGSESSLTLRLVNGSDRCQGRVEVLYRGSWGTVCDDSWDTNDANVVCRQLGCGWATSAPGNARFGQGSGPIVLDDVRCSGHESYLWSCPHNGWLSHNCGHHEDAGVICSVSQSRPTPSPDTWPTSHASTAGPESSLALRLVNGGDRCQGRVEVLYRGSWGTVCDDSWDTSDANVVCRQLGCGWATSAPGNARFGQGSGPIVLDDVRCSGYESYLWSCPHNGWLSHNCQHSEDAGVICSAAHSWSTPSPDTLPTITLPASTVGSESSLALRLVNGGDRCQGRVEVLYQGSWGTVCDDSWDTNDANVVCRQLGCGWAMSAPGNARFGQGSGPIVLDDVRCSGHESYLWSCPHNGWLSHNCGHSEDAGVICSASQSRPTPSPDTWPTSHASTAGSESSLALRLVNGGDRCQGRVEVLYRGSWGTVCDDYWDTNDANVVCRQLGCGWAMSAPGNARFGQGSGPIVLDDVRCSGHESYLWSCPHNGWLSHNCGHHEDAGVICSASQSQPTPSPDTWPTSHASTAGSESSLALRLVNGGDRCQGRVEVLYRGSWGTVCDDYWDTNDANVVCRQLGCGWATSAPGNARFGQGSGPIVLDDVRCSGHESYLWSCPHNGWLSHNCGHHEDAGVICSASQSQPTPSPDTWPTSHASTAGSESSLALRLVNGGDRCQGRVEVLYRGSWGTVCDDYWDTNDANVVCRQLGCGWATSAPGNARFGQGSGPIVLDDVRCSGHESYLWSCPHNGWLSHNCGHHEDAGVICSASQSQPTPSPDTWPTSRASTAGSESTLALRLVNGGDRCRGRVEVLYQGSWGTVCDDYWDTNDANVVCRQLGCGWAMSAPGNAQFGQGSGPIVLDDVRCSGHESYLWSCPHNGWLSHNCGHHEDAGVICSAAQSQSTPRPDTWLTTNLPALTVGSESSLALRLVNGGDRCRGRVEVLYRGSWGTVCDDSWDTNDANVVCRQLGCGWAMSAPGNARFGQGSGPIVLDDVRCSGNESYLWSCPHKGWLTHNCGHHEDAGVICSATQINSTTTDWWHPTTTTTARPSSNCGGFLFYASGTFSSPSYPAYYPNNAKCVWEIEVNSGYRINLGFSNLKLEAHHNCSFDYVEIFDGSLNSSLLLGKICNDTRQIFTSSYNRMTIHFRSDISFQNTGFLAWYNSFPSDATLRLVNLNSSYGLCAGRVEIYHGGTWGTVCDDSWTIQEAEVVCRQLGCGRAVSALGNAYFGSGSGPITLDDVECSGTESTLWQCRNRGWFSHNCNHREDAGVICSGNHLSTPAPFLNITRPNTDYSCGGFLSQPSGDFSSPFYPGNYPNNAKCVWDIEVQNNYRVTVIFRDVQLEGGCNYDYIEVFDGPYRSSPLIARVCDGARGSFTSSSNFMSIRFISDHSITRRGFRAEYYSSPSNDSTNLLCLPNHMQASVSRSYLQSLGFSASDLVISTWNGYYECRPQITPNLVIFTIPYSGCGTFKQADNDTIDYSNFLTAAVSGGIIKRRTDLRIHVSCRMLQNTWVDTMYIANDTIHVANNTIQVEEVQYGNFDVNISFYTSSSFLYPVTSRPYYVDLNQDLYVQAEILHSDAVLTLFVDTCVASPYSNDFTSLTYDLIRSGCVRDDTYGPYSSPSLRIARFRFRAFHFLNRFPSVYLRCKMVVCRAYDPSSRCYRGCVLRSKRDVGSYQEKVDVVLGPIQLQTPPRREEEPR

SEQ ID NO: 8533 - protein, 922 aa, Homo sapiens
MPRAPHFMPLLLLLLLLSLPHTQAAFPQDPLPLLISDLQGTSPLSWFRGLEDDAVAAELGLDFQRFLTLNRTLLVAARDHVFSFDLQAEEEGEGLVPNKYLTWRSQDVENCAVRGKLTDECYNYIRVLVPWDSQTLLACGTNSFSPVCRSYGITSLQQEGEELSGQARCPFDATQSNVAIFAEPHFVQALEHGDHVYFFFREVSVEDARLGRVQFSRVARVCKRDMGGSPRALDRHWTSFLKLRLNCSVPGDSTFYFDVLQALTGPVNLHGRSALFGVFTTQTNSIPGSAVCAFYLDEIERGFEGKFKEQRSLDGAWTPVSEDRVPSPRPGSCAGVGGAALFSSSRDLPDDVLTFIKAHPLLDPAVPPVTHQPLLTLTSRALLTQVAVDGMAGPHSNITVMFLGSNDGTVLKVLTPGGRSGGPEPILLEEIDAYSPARCSGKRTAQTARRIIGLELDTEGHRLFVAFSGCIVYLPLSRCARHGACQRSCLASQDPYCGWHSSRGCVDIRGSGGTDVDQAGNQESMEHGDCQDGATGSQSGPGDSAYVLPGPGPSPGTPSPPSDAHPRPQSSTLGVHTRGVRRDLPPASASRSVPIPLLLASVAAAFALGASVSGLLVSCACRRAHRRRGKDIETPGLPRPLSLRSLARLHGGGPEPPPPSKDGDAVQTPQLYTTFLPPPEGVPPPELACLPTPESTPELPVKHLRAAGDPWEWNQNRNNAKEGPGRSRGGHAAGGPAPRVLVRPPPPGCPGQAVEVTTLEELLRYLHGPQPPRKGAEPPAPLTSRALPPEPAPALLGGPSPRPHECASPLRLDVPPEGRCASAPARPALSAPAPRLGVGGGRRLPFSGHRAPPALLTRVPSGGPSRYSGGPGKHLLYLGRPEGYRGRALKRVDVEKPQLSLKPPLVGPSSRQAVPNGGRFNF

SEQ ID NO: 8534 - protein, 962 aa, Homo sapiens
MPRAPHFMPLLLLLLLLSLPHTQAAFPQDPLPLLISDLQGTSPLSWFRGLEDDAVAAELGLDFQRFLTLNRTLLVAARDHVFSFDLQAEEEGEGLVPNKYLTWRSQDVENCAVRGKLTDECYNYIRVLVPWDSQTLLACGTNSFSPVCRSYGITSLQQEGEELSGQARCPFDATQSNVAIFAEGSLYSATAADFQASDAVVYRSLGPQPPLRSAKYDSKWLREPHFVQALEHGDHVYFFFREVSVEDARLGRVQFSRVARVCKRDMGGSPRALDRHWTSFLKLRLNCSVPGDSTFYFDVLQALTGPVNLHGRSALFGVFTTQTNSIPGSAVCAFYLDEIERGFEGKFKEQRSLDGAWTPVSEDRVPSPRPGSCAGVGGAALFSSSRDLPDDVLTFIKAHPLLDPAVPPVTHQPLLTLTSRALLTQVAVDGMAGPHSNITVMFLGSNDGTVLKVLTPGGRSGGPEPILLEEIDAYSPARCSGKRTAQTARRIIGLELDTEGHRLFVAFSGCIVYLPLSRCARHGACQRSCLASQDPYCGWHSSRGCVDIRGSGGTDVDQAGNQESMEHGDCQDGATGSQSGPGDSAYVLPGPGPSPGTPSPPSDAHPRPQSSTLGVHTRGVRRDLPPASASRSVPIPLLLASVAAAFALGASVSGLLVSCACRRAHRRRGKDIETPGLPRPLSLRSLARLHGGGPEPPPPSKDGDAVQTPQLYTTFLPPPEGVPPPELACLPTPESTPELPVKHLRAAGDPWEWNQNRNNAKEGPGRSRGGHAAGGPAPRVLVRPPPPGCPGQAVEVTTLEELLRYLHGPQPPRKGAEPPAPLTSRALPPEPAPALLGGPSPRPHECASPLRLDVPPEGRCASAPARPALSAPAPRLGVGGGRRLPFSGHRAPPALLTRVPSGGPSRYSGGPGKHLLYLGRPEGYRGRALKRVDVEKPQLSLKPPLVGPSSRQAVPNGGRFNF

SEQ ID NO: 8535 - protein, 90 aa, Homo sapiens
MRDPVSSQYSSFLFWRMPIPELDLSELEGLGLSDTATYKVKDSSVGKMIGQATAADQEKNPEGDGLLEYSTFNFWRAPIASIHSFELDLL

SEQ ID NO: 8536 - protein, 341 aa, Homo sapiens
MVPAAGALLWVLLLNLGPRAAGAQGLTQTPTEMQRVSLRFGGPMTRSYRSTARTGLPRKTRIILEDENDAMADADRLAGPAAAELLAATVSTGFSRSSAINEEDGSSEEGVVINAGKDSTSRELPSATPNTAGSSSTRFIANSQEPEIRLTSSLPRSPGRSTEDLPGSQATLSQWSTPGSTPSRWPSPSPTAMPSPEDLRLVLMPWGPWHCHCKSGTMSRSRSGKLHGLSGRLRVGALSQLRTEHKPCTYQQCPCNRLREECPLDTSLCTDTNCASQSTTSTRTTTTPFPTIHLRSSPSLPPASPCPALAFWKRVRIGLEDIWNSLSSVFTEMQPIDRNQR

SEQ ID NO: 8537 - protein, 2403 aa, Homo sapiens; identical to SEQ ID NO: 6789

SEQ ID NO: 8538 - protein, 1785 aa, Homo sapiens; identical to SEQ ID NO: 5738

SEQ ID NO: 8539 - protein, 481 aa, Homo sapiens
MAASWSLLVTLRPLAQSPLRGRCVGCGAWAAALAPLATAPGKPFWKAYTVQTSESMTPTATSETYLKALAVCHGPLDHYDFLIKAHELKDDEHQRRVIQCLQKLHEDLKGYNIEAEGLFSKLFSRSKPPRGLYVYGDVGTGKTMVMDMFYAYVEMKRKKRVHFHGFMLDVHKRIHRLKQSLPKRKPGFMAKSYDPIAPIAEEISEEACLLCFDEFQVTDIADAMILKQLFENLFKNGVVVVATSNRPPEDLYKNGLQRANFVPFIAVLKEYCNTVQLDSGIDYRKRELPAAGKLYYLTSEADVEAVMDKLFDELAQKQNDLTRPRILKVQGRELRLNKACGTVADCTFEELCERPLGASDYLELSKNFDTIFLRNIPQFTLANRTQGRRFITLIDNFYDLKVRIICSASTPISSLFLHQHHDSELEQSRILMDDLGLSQDSAEGLSMFTGEEEIFAFQRTISRLTEMQTEQYWNEGDRTKK

SEQ ID NO: 8540 - protein, 480 aa, Homo sapiens
MQIPRAALLPLLLLLLAAPASAQLSRAGRSAPLAAGCPDRCEPARCPPQPEHCEGGRARDACGCCEVCGAPEGAACGLQEGPCGEGLQCVVPFGVPASATVRRRAQAGLCVCASSEPVCGSDANTYANLCQLRAASRRSERLHRPPVIVLQRGACGQGQEDPNSLRHKYNFIADVVEKIAPAVVHIELFRKLPFSKREVPVASGSGFIVSEDGLIVTNAHVVTNKHRVKVELKNGATYEAKIKDVDEKADIALIKIDHQGKLPVLLLGRSSELRPGEFVVAIGSPFSLQNTVTTGIVSTTQRGGKELGLRNSDMDYIQTDAIINYGNSGGPLVNLDGEVIGINTLKVTAGISFAIPSDKIKKFLTESHDRQAKGKAITKKKYIGIRMMSLTSSKAKELKDRHRDFPDVISGAYIIEVIPDTPAEAGGLKENDVIISINGQSVVSANDVSDVIKRESTLNMVVRRGNEDIMITVIPEEIDP

SEQ ID NO: 8541 - protein, 331 aa, Homo sapiens
MKRLVCVLLVCSSAVAQLHKDPTLDHHWHLWKKTYGKQYKEKNEEAVRRLIWEKNLKFVMLHNLEHSMGMHSYDLGMNHLGDMTSEEVMSLMSSLRVPSQWQRNITYKSNPNRILPDSVDWREKGCVTEVKYQGSCGACWAFSAVGALEAQLKLKTGKLVSLSAQNLVDCSTEKYGNKGCNGGFMTTAFQYIIDNKGIDSDASYPYKAMDQKCQYDSKYRAATCSKYTELPYGREDVLKEAVANKGPVSVGVDARHPSFFLYRSGVYYEPSCTQNVNHGVLVVGYGDLNGKEYWLVKNSWGHNFGEEGYIRMARNKGNHCGIASFPSYPEI

SEQ ID NO: 8542 - protein, 571 aa, Homo sapiens
MPLRRPKMKKTPEKLDNTPASPPRSPAEPNDIPIAKGTYTFDIDKWDDPNFNPFSSTSKMQESPKLPQQSYNFDPDTCDESVDPFKTSSKTPSSPSKSPASFEIPASAMEANGVDGDGLNKPAKKKKTPLKTVKKSPKRSPLSDPPSQDPTPAATPETPPVISAVVHATDEEKLAVTNQKWTCMTVDLEADKQDYPQPSDLSTFVNETKFSSPTEELDYRNSYEIEYMEKIGSSLPQDDDAPKKQALYLMFDTSQESPVKSSPVRMSESPTPCSGSSFEETEALVNTAAKNQHPVPRGLAPNQESHLQVPEKSSQKELEAMGLGTPSEAIEIREAAHPTDVSISKTALYSRIGTAEVEKPAGLLFQQPDLDSALQIARAEIITKEREVSEWKDKYEESRREVMEMRKIVAEYEKTIAQMIEDEQREKSVSHQTVQQLVLEKEQALADLNSVEKSLADLFRRYEKMKEVLEGFRKNEEVLKRCAQEYLSRVKKEEQRYQALKVHAEEKLDRANAEIAQVRGKAQQEQAAHQASLRKEQLRVDALERTLEQKNKEIEELTKICDELIAKMGKS

SEQ ID NO: 8543 - protein, 575 aa, Homo sapiens
MPLRRPKMKKTPEKLDNTPASPPRSPAEPNDIPIAKGTYTFDIDKWDDPNFNPFSSTSKMQESPKLPQQSYNFDPDTCDESVDPFKTSSKTPSSPSKSPASFEIPASAMEANGVDGDGLNKPAKKKKTPLKTDTFRVKKSPKRSPLSDPPSQDPTPAATPETPPVISAVVHATDEEKLAVTNQKWTCMTVDLEADKQDYPQPSDLSTFVNETKFSSPTEELDYRNSYEIEYMEKIGSSLPQDDDAPKKQALYLMFDTSQESPVKSSPVRMSESPTPCSGSSFEETEALVNTAAKNQHPVPRGLAPNQESHLQVPEKSSQKELEAMGLGTPSEAIEIREAAHPTDVSISKTALYSRIGTAEVEKPAGLLFQQPDLDSALQIARAEIITKEREVSEWKDKYEESRREVMEMRKIVAEYEKTIAQMIEDEQREKSVSHQTVQQLVLEKEQALADLNSVEKSLADLFRRYEKMKEVLEGFRKNEEVLKRCAQEYLSRVKKEEQRYQALKVHAEEKLDRANAEIAQVRGKAQQEQAAHQASLRKEQLRVDALERTLEQKNKEIEELTKICDELIAKMGKS

SEQ ID NO: 8544 - protein, 760 aa, Homo sapiens
MAGQQFQYDDSGNTFFYFLTSFVGLIVIPATYYLWPRDQNAEQIRLKNIRKVYGRCMWYRLRLLKPQPNIIPTVKKIVLLAGWALFLFLAYKVSKTDREYQEYNPYEVLNLDPGATVAEIKKQYRLLSLKYHPDKGGDEVMFMRIAKAYAALTDEESRKNWEEFGNPDGPQATSFGIALPAWIVDQKNSILVLLVYGLAFMVILPVVVGSWWYRSIRYSGDQILIRTTQIYTYFVYKTRNMDMKRLIMVLAGASEFDPQYNKDATSRPTDNILIPQLIREIGSINLKKNEPPLTCPYSLKARVLLLSHLARMKIPETLEEDQQFMLKKCPALLQEMVNVICQLIVMARNREEREFRAPTLASLENCMKLSQMAVQGLQQFKSPLLQLPHIEEDNLRRVSNHKKYKIKTIQDLVSLKESDRHTLLHFLEDEKYEEVMAVLGSFPYVTMDIKSQVLDDEDSNNITVGSLVTVLVKLTRQTMAEVFEKEQSICAAEEQPAEDGQGETNKNRTKGGWQQKSKGPKKTAKSKKKKPLKKKPTPVLLPQSKQQKQKQANGVVGNEAAVKEDEEEVSDKGSDSEEEETNRDSQSEKDDGSDRDSDREQDEKQNKDDEAEWQELQQSIQRKERALLETKSKITHPVYSLYFPEEKQEWWWLYIADRKEQTLISMPYHVCTLKDTEEVELKFPAPGKPGNYQYTVFLRSDSYMGLDQIKPLKLEVHEAKPVPENHPQWDTAIEGDEDQEDSEGFEDSFEEEEEEEEDDD

SEQ ID NO: 8545 - protein, 121 aa, Homo sapiens
MSQKQEEENPAEETGEEKQDTQEKEGILPERAEEAKLKAKYPSLGQKPGGSDFLMKRLQKGQKYFDSGDYNMAKAKMKNKQLPSAGPDKNLVTGDHIPTPQDLPQRKSSLVTSKLAGGQVE

SEQ ID NO: 8546 - protein, 385 aa, Homo sapiens
MSGDSSGRGPEGRGRGRDPHRDRTRSRSRSRSPLSPRSRRGSARERREAPERPSLEDTEPSDSGDEMMDPASLEAEADQGLCRQIRHQYRALINSVQQNREDILNAGDKLTEVLEEANTLFNEVSRAREAVLDAHFLVLASDLGKEKAKQLRSDLSSFDMLRYVETLLTHMGVNPLEAEELIRDEDSPDFEFIVYDSWKITGRTAENTFNKTHTFHFLLGSIYGECPVPKPRVDRPRKVPVIQEERAMPAQLRRMEESHQEATEKEVERILGLLQTYFREDPDTPMSFFDFVVDPHSFPRTVENIFHVSFIIRDGFARIRLDQDRLPVIEPVSINEENEGFEHNTQVRNQGIIALSYRDWEEIVKTFEISEPVITPSQRQQKPSA

SEQ ID NO: 8547 - protein, 350 aa, Homo sapiens
MFGLKRNAVIGLNLYCGGAGLGAGSGGATRPGGRLLATEKEASARREIGGGEAGAVIGGSAGASPPSTLTPDSRRVARPPPIGAEVPDVTATPARLLFFAPTRRAAPLEEMEAPAADAIMSPEEELDGYEPEPLGKRPAVLPLLELVGESGNNTSTDGSLPSTPPPAEEEEDELYRQSLEIISRYLREQATGAKDTKPMGRSGATSRKALETLRRVGDGVQRNHETAFQGMLRKLDIKNEDDVKSLSRVMIHVFSDGVTNWGRIVTLISFGAFVAKHLKTINQESCIEPLAESITDVLVRTKRDWLVKQRGWDGFVEFFHVEDLEGGIRNVLLAFAGVAGVGAGLAYLIR

SEQ ID NO: 8548 - protein, 399 aa, Homo sapiens
MNFRQLLLHLPRYLGASGSPRRLWWSPSLDTISSVGSWRGRSSKSPAHWNQVVSEAEKIVGYPTSFMSLRCLLSDELSNIAMQVRKLVGTQHPLLTTARGLVHDSWNSLQLRGLVVLLISKAAGPSSVNTSCQNYDMVSGIYSCQRSLAEITELIHIALLVHRGIVNLNELQSSDGPLKDMQFGNKIAILSGDFLLANACNGLALLQNTKVVELLASALMDLVQGVYHENSTSKESYITDDIGISTWKEQTFLSHGALLAKSCQAAMELAKHDAEVQNMAFQYGKHMAMSHKINSDVQPFIKEKTSDSMTFNLNSAPVVLHQEFLGRDLWIKQIGEAQEKGRLDYAKLRERIKAGKGVTSAIDLCRYHGNKALEALESFPPSEARSALENIVFAVTRFS

SEQ ID NO: 8549 - protein, 1097 aa, Homo sapiens
MENWTGRPWLYLLLLLSLPQLCLDQEVLSGHSLQTPTEEGQGPEGVWGPWVQWASCSQPCGVGVQRRSRTCQLPTVQLHPSLPLPPRPPRHPEALLPRGQGPRPQTSPETLPLYRTQSRGRGGPLRGPASHLGREETQEIRAARRSRLRDPIKPGMFGYGRVPFALPLHRNRRHPRSPPRSELSLISSRGEEAIPSPTPRAEPFSANGSPQTELPPTELSVHTPSPQAEPLSPETAQTEVAPRTRPAPLRHHPRAQASGTEPPSPTHSLGEGGFFRASPQPRRPSSQGWASPQVAGRRPDPFPSVPRGRGQQGQGPWGTGGTPHGPRLEPDPQHPGAWLPLLSNGPHASSLWSLFAPSSPIPRCSGESEQLRACSQAPCPPEQPDPRALQCAAFNSQEFMGQLYQWEPFTEAPLLPLRHAFFLLPGAGSGDSTGVQGSQRCELNCRPRGFRFYVRHTEKVQDGTLCQPGAPDICVAGRCLSPGCDGILGSGRRPDGCGVCGGDDSTCRLVSGNLTDRGGPLGYQKILWIPAGALRLQIAQLRPSSNYLALRGPGGRSIINGNWAVDPPGSYRAGGTVFRYNRPPREEGKGESLSAEGPTTQPVDVYMIFQEENPGVFYQYVISSPPPILENPTPEPPVPQLQPEILRVEPPLAPAPRPARTPGTLQRQVRIPQMPAPPHPRTPLGSPAAYWKRVGHSACSASCGKGVWRPIFLCISRESGEELDERSCAAGARPPASPEPCHGTPCPPYWEAGEWTSCSRSCGPGTQHRQLQCRQEFGGGGSSVPPERCGHLPRPNITQSCQLRLCGHWEVGSPWSQCSVRCGRGQRSRQVRCVGNNGDEVSEQECASGPPQPPSREACDMGPCTTAWFHSDWSSKCSAECGTGIQRRSVVCLGSGAALGPGQGEAGAGTGQSCPTGSRPPDMRACSLGPCERTWRWYTGPWGECSSECGSGTQRRDIICVSKLGTEFNVTSPSNCSHLPRPPALQPCQGQACQDRWFSTPWSPCSRSCQGGTQTREVQCLSTNQTLSTRCPPQLRPSRKRPCNSQPCSQRPDDQCKDSSPHCPLVVQARLCVYPYYTATCCRSCAHVLERSPQDPS

SEQ ID NO: 8550 - protein, 877 aa, Homo sapiens
MENWTGRPWLYLLLLLSLPQLCLDQEVLSGHSLQTPTEEGQGPEGVWGPWVQWASCSQPCGVGVQRRSRTCQLPTVQLHPSLPLPPRPPRHPEALLPRGQGPRPQTSPETLPLYRTQSRGRGGPLRGPASHLGREETQEIRAARRSRLRDPIKPGMFGYGRVPFALPLHRNRRHPRSPPRSELSLISSRGEEAIPSPTPRAEPFSANGSPQTELPPTELSVHTPSPQAEPLSPETAQTEVAPRTRPAPLRHHPRAQASGTEPPSPTHSLGEGGFFRASPQPRRPSSQGWASPQVAGRRPDPFPSVPRGRGQQGQGPWGTGGTPHGPRLEPDPQHPGAWLPLLSNGPHASSLWSLFAPSSPIPRCSGESEQLRACSQAPCPPEQPDPRALQCAAFNSQEFMGQLYQWEPFTEVQGSQRCELNCRPRGFRFYVRHTEKVQDGTLCQPGAPDICVAGRCLSPGCDGILGSGRRPDGCGVCGGDDSTCRLVSGNLTDRGGPLGYQKILWIPAGALRLQIAQLRPSSNYLALRGPGGRSIINGNWAVDPPGSYRAGGTVFRYNRPPREEGKGESLSAEGPTTQPVDVYMIFQEENPGVFYQYVISSPPPILENPTPEPPVPQLQPEILRVEPPLAPAPRPARTPGTLQRQVRIPQMPAPPHPRTPLGSPAAYWKRVGHSACSASCGKGVWRPIFLCISRESGEELDERSCAAGARPPASPEPCHGTPCPPYWEAGEWTSCSRSCGPGTQHRQLQCRQEFGGGGSSVPPERCGHLPRPNITQSCQLRLCGHWEVGSPWSQCSVRCGRGQRSRQVRCVGNNGDEVSEQECASGPPQPPSREACDMGPCTTAWFHSDWSSKVSPEPPAISCILGNHAQDTSAFPA

SEQ ID NO: 8551 - protein, 518 aa, Homo sapiens
MAFWAGGSPSVVDYFPSEDFYRCGYCKNESGSRSNGMWAHSMTVQDYQDLIDRGWRRSGKYVYKPVMNQTCCPQYTIRCRPLQFQPSKSHKKVLKKMLKFLAKGEVPKGSCEDEPMDSTMDDAVAGDFALINKLDIQCDLKTLSDDIKESLESEGKNSKKEEPQELLQSQDFVGEKLGSGEPSHSVKVHTVPKPGKGADLSKPPCRKAKEIRKERKRLKLMQQNPAGELEGFQAQGHPPSLFPPKAKSNQPKSLEDLIFESLPENASHKLEVRLVPVSFEDPEFKSSFSQSFSLYVKYQVAIHQDPPDECGKTEFTRFLCSSPLEAETPPNGPDCGYGSFHQQYWLDGKIIAVGVIDILPNCVSSVYLYYDPDYSFLSLGVYSALREIAFTRQLHEKTSQLSYYYMGFYIHSCPKMKYKGQYRPSDLLCPETYVWVPIEQCLPSLENSKYCRFNQDPEAVDEDRSTEPDRLQVFHKRAIMPYGVYKKQQKDPSEEAAVLQYASLVGQKCSERMLLFRN

SEQ ID NO: 8552 - protein, 528 aa, Homo sapiens
MLGRSLREVSAALKQGQITPTELCQKCLSLIKKTKFLNAYITVSEEVALKQAEESEKRYKNGQSLGDLDGIPIAVKDNFSTSGIETTCASNMLKGYIPPYNATVVQKLLDQGALLMGKTNLDEFAMGSGSTDGVFGPVKNPWSYSKQYREKRKQNPHSENEDSDWLITGGSSGGSAAAVSAFTCYAALGSDTGGSTRNPAAHCGLVGFKPSYGLVSRHGLIPLVNSMDVPGILTRCVDDAAIVLGALAGPDPRDSTTVHEPINKPFMLPSLADVSKLCIGIPKEYLVPELSSEVQSLWSKAADLFESEGAKVIEVSLPHTSYSIVCYHVLCTSEVASNMARFDGLQYGHRCDIDVSTEAMYAATRREGFNDVVRGRILSGNFFLLKENYENYFVKAQKVRRLIANDFVNAFNSGVDVLLTPTTLSEAVPYLEFIKEDNRTRSAQDDIFTQAVNMAGLPAVSIPVALSNQGLPIGLQFIGRAFCDQQLLTVAKWFEKQVQFPVIQLQELMDDCSAVLENEKLASVSLKQ

SEQ ID NO: 8553 - protein, 540 aa, Homo sapiens
MGTTARAALVLTYLAVASAASEGGFTATGQRQLRPEHFQEVGYAAPPSPPLSRSLPMDHPDSSQHGPPFEGQSQVQPPPSQEATPLQQEKLLPAQLPAEKEVGPPLPQEAVPLQKELPSLQHPNEQKEGTPAPFGDQSHPEPESWNAAQHCQQDRSQGGWGHRLDGFPPGRPSPDNLNQICLPNRQHVVYGPWNLPQSSYSHLTRQGETLNFLEIGYSRCCHCRSHTNRLECAKLVWEEAMSRFCEAEFSVKTRPHWCCTRQGEARFSCFQEEAPQPHYQLRACPSHQPDISSGLELPFPPGVPTLDNIKNICHLRRFRSVPRNLPATDPLQRELLALIQLEREFQRCCRQGNNHTCTWKAWEDTLDKYCDREYAVKTHHHLCCRHPPSPTRDECFARRAPYPNYDRDILTIDIGRVTPNLMGHLCGNQRVLTKHKHIPGLIHNMTARCCDLPFPEQACCAEEEKLTFINDLCGPRRNIWRDPALCCYLSPGDEQVNCFNINYLRNVALVSGDTENAKGQGEQGSTGGTNISSTSEPKEE

SEQ ID NO: 8554 - protein, 567 aa, Homo sapiens
MGTTARAALVLTYLAVASAASEGGFTATGQRQLRPEHFQEVGYAAPPSPPLSRSLPMDHPDSSQHGPPFEGQSGKEGRGPRPHSQPWLGERVGCSHIPPSIVQPPPSQEATPLQQEKLLPAQLPAEKEVGPPLPQEAVPLQKELPSLQHPNEQKEGTPAPFGDQSHPEPESWNAAQHCQQDRSQGGWGHRLDGFPPGRPSPDNLNQICLPNRQHVVYGPWNLPQSSYSHLTRQGETLNFLEIGYSRCCHCRSHTNRLECAKLVWEEAMSRFCEAEFSVKTRPHWCCTRQGEARFSCFQEEAPQPHYQLRACPSHQPDISSGLELPFPPGVPTLDNIKNICHLRRFRSVPRNLPATDPLQRELLALIQLEREFQRCCRQGNNHTCTWKAWEDTLDKYCDREYAVKTHHHLCCRHPPSPTRDECFARRAPYPNYDRDILTIDIGRVTPNLMGHLCGNQRVLTKHKHIPGLIHNMTARCCDLPFPEQACCAEEEKLTFINDLCGPRRNIWRDPALCCYLSPGDEQVNCFNINYLRNVALVSGDTENAKGQGEQGSTGGTNISSTSEPKEE

SEQ ID NO: 8555 - protein, 769 aa, Homo sapiens
MVSWGRFICLVVVTMATLSLARPSFSLVEDTTLEPEEPPTKYQISQPEVYVAAPGESLEVRCLLKDAAVISWTKDGVHLGPNNRTVLIGEYLQIKGATPRDSGLYACTASRTVDSETWYFMVNVTDAISSGDDEDDTDGAEDFVSENSNNKRAPYWTNTEKMEKRLHAVPAANTVKFRCPAGGNPMPTMRWLKNGKEFKQEHRIGGYKVRNQHWSLIMESVVPSDKGNYTCVVENEYGSINHTYHLDVVERSPHRPILQAGLPANASTVVGGDVEFVCKVYSDAQPHIQWIKHVEKNGSKYGPDGLPYLKVLKHSGINSSNAEVLALFNVTEADAGEYICKVSNYIGQANQSAWLTVLPKQQAPGREKEITASPDYLEIAIYCIGVFLIACMVVTVILCRMKNTTKKPDFSSQPAVHKLTKRIPLRRQVTVSAESSSSMNSNTPLVRITTRLSSTADTPMLAGVSEYELPEDPKWEFPRDKLTLGKPLGEGCFGQVVMAEAVGIDKDKPKEAVTVAVKMLKDDATEKDLSDLVSEMEMMKMIGKHKNIINLLGACTQDGPLYVIVEYASKGNLREYLRARRPPGMEYSYDINRVPEEQMTFKDLVSCTYQLARGMEYLASQKCIHRDLAARNVLVTENNVMKIADFGLARDINNIDYYKKTTNGRLPVKWMAPEALFDRVYTHQSDVWSFGVLMWEIFTLGGSPYPGIPVEELFKLLKEGHRMDKPANCTNELYMMMRDCWHAVPSQRPTFKQLVEDLDRILTLTTNEI

SEQ ID NO: 8556 - protein, 768 aa, Homo sapiens
MVSWGRFICLVVVTMATLSLARPSFSLVEDTTLEPEEPPTKYQISQPEVYVAAPGESLEVRCLLKDAAVISWTKDGVHLGPNNRTVLIGEYLQIKGATPRDSGLYACTASRTVDSETWYFMVNVTDAISSGDDEDDTDGAEDFVSENSNNKRAPYWTNTEKMEKRLHAVPAANTVKFRCPAGGNPMPTMRWLKNGKEFKQEHRIGGYKVRNQHWSLIMESVVPSDKGNYTCVVENEYGSINHTYHLDVVERSPHRPILQAGLPANASTVVGGDVEFVCKVYSDAQPHIQWIKHVEKNGSKYGPDGLPYLKVLKHSGINSSNAEVLALFNVTEADAGEYICKVSNYIGQANQSAWLTVLPKQQAPGREKEITASPDYLEIAIYCIGVFLIACMVVTVILCRMKNTTKKPDFSSQPAVHKLTKRIPLRRQVTVSAESSSSMNSNTPLVRITTRLSSTADTPMLAGVSEYELPEDPKWEFPRDKLTLGKPLGEGCFGQVVMAEAVGIDKDKPKEAVTVAVKMLKDDATEKDLSDLVSEMEMMKMIGKHKNIINLLGACTQDGPLYVIVEYASKGNLREYLRARRPPGMEYSYDINRVPEEQMTFKDLVSCTYQLARGMEYLASQKCIHRDLAARNVLVTENNVMKIADFGLARDINNIDYYKKTTNGRLPVKWMAPEALFDRVYTHQSDVWSFGVLMWEIFTLGGSPYPGIPVEELFKLLKEGHRMDKPANCTNELYMMMRDCWHAVPSQRPTFKQLVEDLDRILTLTTNE

SEQ ID NO: 8557 - protein, 707 aa, Homo sapiens
MVSWGRFICLVVVTMATLSLARPSFSLVEDTTLEPEGAPYWTNTEKMEKRLHAVPAANTVKFRCPAGGNPMPTMRWLKNGKEFKQEHRIGGYKVRNQHWSLIMESVVPSDKGNYTCVVENEYGSINHTYHLDVVERSPHRPILQAGLPANASTVVGGDVEFVCKVYSDAQPHIQWIKHVEKNGSKYGPDGLPYLKVLKHSGINSSNAEVLALFNVTEADAGEYICKVSNYIGQANQSAWLTVLPKQQAPGREKEITASPDYLEIAIYCIGVFLIACMVVTVILCRMKNTTKKPDFSSQPAVHKLTKRIPLRRQVTVSAESSSSMNSNTPLVRITTRLSSTADTPMLAGVSEYELPEDPKWEFPRDKLTLGKPLGEGCFGQVVMAEAVGIDKDKPKEAVTVAVKMLKDDATEKDLSDLVSEMEMMKMIGKHKNIINLLGACTQDGPLYVIVEYASKGNLREYLRARRPPGMEYSYDINRVPEEQMTFKDLVSCTYQLARGMEYLASQKCIHRDLAARNVLVTENNVMKIADFGLARDINNIDYYKKTTNGRLPVKWMAPEALFDRVYTHQSDVWSFGVLMWEIFTLGGSPYPGIPVEELFKLLKEGHRMDKPANCTNELYMMMRDCWHAVPSQRPTFKQLVEDLDRILTLTTNEEYLDLSQPLEQYSPSYPDTRSSCSSGDDSVFSPDPMPYEPCLPQYPHINGSVKT

SEQ ID NO: 8558 - protein, 705 aa, Homo sapiens
MVSWGRFICLVVVTMATLSLARPSFSLVEDTTLEPEEPPTKYQISQPEVYVAAPGESLEVRCLLKDAAVISWTKDGVHLGPNNRTVLIGEYLQIKGATPRDSGLYACTASRTVDSETWYFMVNVTDAISSGDDEDDTDGAEDFVSENSNNKRAPYWTNTEKMEKRLHAVPAANTVKFRCPAGGNPMPTMRWLKNGKEFKQEHRIGGYKVRNQHWSLIMESVVPSDKGNYTCVVENEYGSINHTYHLDVVERSPHRPILQAGLPANASTVVGGDVEFVCKVYSDAQPHIQWIKHVEKNGSKYGPDGLPYLKVLKVSAESSSSMNSNTPLVRITTRLSSTADTPMLAGVSEYELPEDPKWEFPRDKLTLGKPLGEGCFGQVVMAEAVGIDKDKPKEAVTVAVKMLKDDATEKDLSDLVSEMEMMKMIGKHKNIINLLGACTQDGPLYVIVEYASKGNLREYLRARRPPGMEYSYDINRVPEEQMTFKDLVSCTYQLARGMEYLASQKCIHRDLAARNVLVTENNVMKIADFGLARDINNIDYYKKTTNGRLPVKWMAPEALFDRVYTHQSDVWSFGVLMWEIFTLGGSPYPGIPVEELFKLLKEGHRMDKPANCTNELYMMMRDCWHAVPSQRPTFKQLVEDLDRILTLTTNEEYLDLSQPLEQYSPSYPDTRSSCSSGDDSVFSPDPMPYEPCLPQYPHINGSVKT

SEQ ID NO: 8559 - protein, 709 aa, Homo sapiens
MVSWGRFICLVVVTMATLSLARPSFSLVEDTTLEPEEPPTKYQISQPEVYVAAPGESLEVRCLLKDAAVISWTKDGVHLGPNNRTVLIGEYLQIKGATPRDSGLYACTASRTVDSETWYFMVNVTDAISSGDDEDDTDGAEDFVSENSNNKRAPYWTNTEKMEKRLHAVPAANTVKFRCPAGGNPMPTMRWLKNGKEFKQEHRIGGYKVRNQHWSLIMESVVPSDKGNYTCVVENEYGSINHTYHLDVVAPGREKEITASPDYLEIAIYCIGVFLIACMVVTVILCRMKNTTKKPDFSSQPAVHKLTKRIPLRRQVTVSAESSSSMNSNTPLVRITTRLSSTADTPMLAGVSEYELPEDPKWEFPRDKLTLGKPLGEGCFGQVVMAEAVGIDKDKPKEAVTVAVKMLKDDATEKDLSDLVSEMEMMKMIGKHKNIINLLGACTQDGPLYVIVEYASKGNLREYLRARRPPGMEYSYDINRVPEEQMTFKDLVSCTYQLARGMEYLASQKCIHRDLAARNVLVTENNVMKIADFGLARDINNIDYYKKTTNGRLPVKWMAPEALFDRVYTHQSDVWSFGVLMWEIFTLGGSPYPGIPVEELFKLLKEGHRMDKPANCTNELYMMMRDCWHAVPSQRPTFKQLVEDLDRILTLTTNEEYLDLSQPLEQYSPSYPDTRSSCSSGDDSVFSPDPMPYEPCLPQYPHINGSVKT

SEQ ID NO: 8560 - protein, 396 aa, Homo sapiens
MEFLKTCVLRRNACTAVCFWRSKVVQKPSVRRISTTSPRSTVMPAWVIDKYGKNEVLRFTQNMMMPIIHYPNEVIVKVHAASVNPIDVNMRSGYGATALNMKRDPLHVKIKGEEFPLTLGRDVSGVVMECGLDVKYFKPGDEVWAAVPPWKQGTLSEFVVVSGNEVSHKPKSLTHTQAASLPYVALTAWSAINKVGGLNDKNCTGKRVLILGASGGVGTFAIQVMKAWDAHVTAVCSQDASELVRKLGADDVIDYKSGSVEEQLKSLKPFDFILDNVGGSTETWAPDFLKKWSGATYVTLVTPFLLNMDRLGIADGMLQTGVTVGSKALKHFWKGVHYRWAFFMASGPCLDDIAELVDAGKIRPVIEQTFPFSKVPEAFLKVERGHARGKTVINVV

SEQ ID NO: 8561 - protein, 1723 aa, Homo sapiens
MEKRSSGRRSGRRRGSQKSTDSPGADAELPESAARDDAVFDDEVAPNAASDNASAEKKVKSPRAALDGGVASAASPESKPSPGTKGQLRGESDRSKQPPPASSPTKRKGRSRALEAVPAPPASGPRAPAKESPPKRVPDPSPVTKGTAAESGEEAARAIPRELPVKSSSLLPEIKPEHKRGPLPNHFNGRAEGGRSRELGRAAGAPGASDADGLKPRNHFGVGRSTVTTKVTLPAKPKHVELNLKTPKNLDSLGNEHNPFSQPVHKGNTATKISLFENKRTNSSPRHTDIRGQRNTPASSKTFVGRAKLNLAKKAKEMEQPEKKVMPNSPQNGVLVKETAIETKVTVSEEEILPATRGMNGDSSENQALGPQPNQDDKADVQTDAGCLSEPVASALIPVKDHKLLEKEDSEAADSKSLVLENVTDTAQDIPTTVDTKDLPPTAMPKPQHTFSDSQSPAESSPGPSLSLSAPAPGDVPKDTCVQSPISSFPCTDLKVSENHKGCVLPVSRQNNEKMPLLELGGETTPPLSTERSPEAVGSECPSRVLVQVRSFVLPVESTQDVSSQVIPESSEVREVQLPTCHSNEPEVVSVASCAPPQEEVLGNEHSHCTAELAAKSGPQVIPPASEKTLPIQAQSQGSRTPLMAESSPTNSPSSGNHLATPQRPDQTVTNGQDSPASLLNISAGSDDSVFDSSSDMEKFTEIIKQMDSAVCMPMKRKKARMPNSPAPHFAMPPIHEDHLEKVFDPKVFTFGLGKKKESQPEMSPALHLMQNLDTKSKLRPKRASAEQSVLFKSLHTNTNGNSEPLVMPEINDKENRDVTNGGIKRSRLEKSALFSSLLSSLPQDKIFSPSVTSVNTMTTAFSTSQNGSLSQSSVSQPTTEGAPPCGLNKEQSNLLPDNSLKVFNFNSSSTSHSSLKSPSHMEKYPQKEKTKEDLDSRSNLHLPETKFSELSKLKNDDMEKANHIESVIKSNLPNCANSDTDFMGLFKSSRYDPSISFSGMSLSDTMTLRGSVQNKLNPRPGKVVIYSEPDVSEKCIEVFSDIQDCSSWSLSPVILIKVVRGCWILYEQPNFEGHSIPLEEGELELSGLWGIEDILERHEEAESDKPVVIGSIRHVVQDYRVSHIDLFTEPEGLGILSSYFDDTEEMQGFGVMQKTCSMKVHWGTWLIYEEPGFQGVPFILEPGEYPDLSFWDTEEAYIGSMRPLKMGGRKVEFPTDPKVVVYEKPFFEGKCVELETGMCSFVMEGGETEEATGDDHLPFTSVGSMKVLRGIWVAYEKPGFTGHQYLLEEGEYRDWKAWGGYNGELQSLRPILGDFSNAHMIMYSEKNFGSKGSSIDVLGIVANLKETGYGVKTQSINVLSGVWVAYENPDFTGEQYILDKGFYTSFEDWGGKNCKISSVQPICLDSFTGPRRRNQIHLFSEPQFQGHSQSFEETTSQIDDSFSTKSCRVSGGSWVVYDGENFTGNQYVLEEGHYPCLSAMGCPPGATFKSLRFIDVEFSEPTIILFEREDFKGKKIELNAETVNLRSLGFNTQIRSVQVIGGIWVTYEYGSYRGRQFLLSPAEVPNWYEFSGCRQIGSLRPFVQKRIYFRLRNKATGLFMSTNGNLEDLKLLRIQVMEDVGADDQIWIYQEGCIKCRIAEDCCLTIVGSLVTSGSKLGLALDQNADSQFWSLKSDGRIYSKLKPNLVLDIKGGTQYDQNHIILNTVSKEKFTQVWEAMVLYT

SEQ ID NO: 8562 - protein, 1461 aa, Homo sapiens
MAAGGGGGSSKASSSSASSAGALESSLDRKFQSVTNTMESIQGLSSWCIENKKHHSTIVYHWMKWLRRSAYPHRLNLFYLANDVIQNCKRKNAIIFRESFADVLPEAAALVKDPSVSKSVERIFKIWEDRNVYPEEMIVALREALSTTFKTQKQLKENLNKQPNKQWKKSQTSTNPKAALKSKIVAEFRSQALIEELLLYKRSEDQIELKEKQLSTMRVDVCSTETLKCLKDKTGGKKFSKEFEEASSKLEEFVNGLDKQVKNGPSLTEALENAGIFYEAQYKEVKVVANAYKTFANRVNNLKKKLDQLKSTLPDPEESPVPSPSMDAPSPTGSESPFQGMGGEESQSPTMESEKSATPEPVTDNRDVEDMELSDVEDDGSKIIVEDRKEKPAEKSAVSTSVPTKPTENISKASSCTPVPVTMTATPPLPKPVNTSLSPSPALALPNLANVDLAKISSILSSLTSVMKNTGVSPASRPSPGTPTSPSNLTSGLKTPAPATTTSHNPLANILSKVEITPESILSALSKTQTQSAPALQGLSSLLQSVTGNPVPASEAASQSTSASPANTTVSTIKGRNLPSSAQPFIPKSFNYSPNSSTSEVSSTSASKASIGQSPGLPSTTFKLPSNSLGFTATHNTSPAAPPTEVTICQSSEVSKPKLESESTSPSLEMKIHNFLKGNPGFSGLNLNIPILSSLGSSAPSESHPSDFQRGPTSTSIDNIDGTPVRDERSGTPTQDEMMDKPTSSSVDTMSLLSKIISPGSSTPSSTRSPPPGRDESYPRELSNSVSTYRPFGLGSESPYKQPSDGMERPSSLMDSSQEKFYPDTSFQEDEDYRDFEYSGPPPSAMMNLEKKPAKSILKSSKLSDTTEYQPILSSYSHRAQEFGVKSAFPPSVRALLDSSENCDRLSSSPGLFGAFSVRGNEPGSDRSPSPSKNDSFFTPDSNHNSLSQSTTGHLSLPQKQYPDSPHPVPHRSLFSPQNTLAAPTGHPPTSGVEKVLASTISTTSTIEFKNMLKNASRKPSDDKHFGQAPSKGTPSDGVSLSNLTQPSLTATDQQQQEEHYRIETRVSSSCLDLPDSTEEKGAPIETLGYHSASNRRMSGEPIQTVESIRVPGKGNRGHGREASRVGWFDLSTSGSSFDNGPSSASELASLGGGGSGGLTGFKTAPYKERAPQFQESVGSFRSNSFNSTFEHHLPPSPLEHGTPFQREPVGPSSAPPVPPKDHGGIFSRDAPTHLPSVDLSNPFTKEAALAHAAPPPPPGEHSGIPFPTPPPPPPPGEHSSSGGSGVPFSTPPPPPPPVDHSGVVPFPAPPLAEHGVAGAVAVFPKDHSSLLQGTLAEHFGVLPGPRDHGGPTQRDLNGPGLSRVRESLTLPSHSLEHLGPPHGGGGGGGSNSSSGPPLGPSHRDTISRSGIILRSPRPDFRPREPFLSRDPFHSLKRPRPPFARGPPFFAPKRPFFPPRY

SEQ ID NO: 8563 - protein, 1000 aa, Homo sapiens
MAERKPNGGSGGASTSSSGTNLLFSSSATEFSFNVPFIPVTQASASPASLLLPGEDSTDVGEEDSFLGQTSIHTSAPQTFSYFSQVSSSSDPFGNIGQSPLTTAATSVGQSGFPKPLTALPFTTGSQDVSNAFSPSISKAQPGAPPSSLMGINSYLPSQPSSLPPSYFGNQPQGIPQPGYNPYRHTPGSSRANPYIAPPQLQQCQTPGPPAHPPPSGPPVQMYQMPPGSLPPVPSSVQSPAQQQVPARPGAPSVQVPSPFLLQNQYEPVQPHWFYCKEVEYKQLWMPFSVFDSLNLEEIYNSVQPDPESVVLGTDGGRYDVYLYDRIRKAAYWEEEPAEVRRCTWFYKGDTDSRFIPYTEEFSEKLEAEYKKAVTTNQWHRRLEFPSGETIVMHNPKVIVQFQPSSVPDEWGTTQDGQTRPRVVKRGIDDNLDEIPDGEMPQVDHLVFVVHGIGPVCDLRFRSIIECVDDFRVVSLKLLRTHFKKSLDDGKVSRVEFLPVHWHSSLGGDATGVDRNIKKITLPSIGRFRHFTNETLLDILFYNSPTYCQTIVEKVGMEINHLHALFMSRNPDFKGGVSVAGHSLGSLILFDILSNQKDLNLSKCPGPLAVANGVVKQLHFQEKQMPEEPKLTLDESYDLVVENKEVLTLQETLEALSLSEYFSTFEKEKIDMESLLMCTVDDLKEMGIPLGPRKKIANFVEHKAAKLKKAASEKKAVAATSTKGQEQSAQKTKDMASLPSESNEPKRKLPVGACVSSVCVNYESFEVGAGQVSVAYNSLDFEPEIFFALGSPIAMFLTIRGVDRIDENYSLPTCKGFFNIYHPLDPVAYRLEPMIVPDLDLKAVLIPHHKGRKRLHLELKESLSRMGSDLKQGFISSLKSAWQTLNEFARAHTSSTQLQEELEKVANQIKEEEEKQVVEAEKVVESPDFSKDEDYLGKVGMLNGGRRIDYVLQEKPIESFNEYLFALQSHLCYWESEDTALLLLKEIYRTMNISPEQPQH

SEQ ID NO: 8564 - protein, 640 aa, Homo sapiens
MPCGEDWLSHPLGIVQGFFAQNGVNPDWEKKVIEYFKEKLKENNAPKWVPSLNEVPLHYLKPNSFVKFRCMIQDMFDPEFYMGVYETVNQNTKAHVLHFGKYRDVAECGPQQELDLNSPRNTTLERQTFYCVPVPGESTWVKEAYVNANQARVSPSTSYTPSRHKRSYEDDDDMDLQPNKQKDQHAGARQAGSVGGLQWCGEPKRLETEASTGQQLNSLNLSSPFDLNFPLPGEKGPACLVKVYEDWDCFKVNDILELYGILSVDPVLSILNNDERDASALLDPMECTDTAEEQRVHSPPASLVPRIHVILAQKLQHINPLLPACLNKEESKTFVSSFMSELSPVRAELLGFLTHALLGDSLAAEYLILHLISTVYTRRDVLPLGKFTVNLSGCPRNSTFTEHLYRIIQHLVPASFRLQMTIENMNHLKFIPHKDYTANRLVSGLLQLPSNTSLVIDETLLEQGQLDTPGVHNVTALSNLITWQKVDYDFSYHQMEFPCNINVFITSEGRSLLPADCQIHLQPQLIPPNMEEYMNSLLSAVLPSVLNKFRIYLTLLRFLEYSISDEITKAVEDDFVEMRKNDPQSITADDLHQLLVVARCLSLSAGQTTLSRERWLRAKQLESLRRTRLQQQKCVNGNEL

SEQ ID NO: 8565 - protein, 575 aa, Homo sapiens
MSAATHSPMMQVASGNGDRDPLPPGWEIKIDPQTGWPFFVDHNSRTTTWNDPRVPSEGPKETPSSANGPSREGSRLPPAREGHPVYPQLRPGYIPIPVLHEGAENRQVHPFHVYPQPGMQRFRTEAAAAAPQRSQSPLRGMPETTQPDKQCGQVAAAAAAQPPASHGPERSQSPAASDCSSSSSSASLPSSGRSSLGSHQLPRGYISIPVIHEQNVTRPAAQPSFHQAQKTHYPAQQGEYQTHQPVYHKIQGDDWEPRPLRAASPFRSSVQGASSREGSPARSSTPLHSPSPIRVHTVVDRPQQPMTHRETAPVSQPENKPESKPGPVGPELPPGHIPIQVIRKEVDSKPVSQKPPPPSEKVEVKVPPAPVPCPPPSPGPSAVPSSPKSVATEERAAPSTAPAEATPPKPGEAEAPPKHPGVLKVEAILEKVQGLEQAVDNFEGKKTDKKYLMIEEYLTKELLALDSVDPEGRADVRQARRDGVRKVQTILEKLEQKAIDVPGQVQVYELQPSNLEADQPLQAIMEMGAVAADKGKKNAGNAEDPHTETQQPEATAAATSNPSSMTDTPGNPAAP

SEQ ID NO: 8566 - protein, 691 aa, Homo sapiens
MEKIYSRGELHHFIDGFNEEKSNWMRYVNPAHSPREQNLAACQNGMNIYFYTIKPIPANQELLVWYCRDFAERLHYPYPGELTMMNLTQTQSSLKQPSTEKNELCPKNVPKREYSVKEILKLDSNPSKGKDLYRSNISPLTSEKDLDDFRRRGSPEMPFYPRVVYPIRAPLPEDFLKASLAYGIERPTYITRSPIPSSTTPSPSARSSPDQSLKSSSPHSSPGNTVSPVGPGSQEHRDSYAYLNASYGTEGLGSYPGYAPLPHLPPAFIPSYNAHYPKFLLPPYGMNCNGLSAVSSMNGINNFGLFPRLCPVYSNLLGGGSLPHPMLNPTSLPSSLPSDGARRLLQPEHPREVLVPAPHSAFSFTGAAASMKDKACSPTSGSPTAGTAATAEHVVQPKATSAAMAAPSSDEAMNLIKNKRNMTGYKTLPYPLKKQNGKIKYECNVCAKTFGQLSNLKVHLRVHSGERPFKCQTCNKGFTQLAHLQKHYLVHTGEKPHECQVCHKRFSSTSNLKTHLRLHSGEKPYQCKVCPAKFTQFVHLKLHKRLHTRERPHKCSQCHKNYIHLCSLKVHLKGNCAAAPAPGLPLEDLTRINEEIEKFDISDNADRLEDVEDDISVISVVEKEILAVVRKEKEETGLKVSLQRNMGNGLLSSGCSLYESSDLPLMKLPPSNPLPLVPVKVKQETVEPMDP

SEQ ID NO: 8567 - protein, 392 aa, Homo sapiens
MMEDDGQPRTLYVGNLSRDVTEVLILQLFSQIGPCKSCKMITEQPDSRRVNSSVGFSVLQHTSNDPYCFVEFYEHRDAAAALAAMNGRKILGKEVKVNWATTPSSQKKDTSNHFHVFVGDLSPEITTEDIKSAFAPFGKISDARVVKDMATGKSKGYGFVSFYNKLDAENAIVHMGGQWLGGRQIRTNWATRKPPAPKSTQENNTKQLRFEDVVNQSSPKNCTVYCGGIASGLTDQLMRQTFSPFGQIMEIRVFPEKGYSFVRFSTHESAAHAIVSVNGTTIEGHVVKCYWGKESPDMTKNFQQVDYSQWGQWSQVYGNPQQYGQYMANGWQVPPYGVYGQPWNQQGFGVDQSPSAAWMGGFGAQPPQGQAPPPVIPPPNQAGYGMASYQTQ

SEQ ID NO: 8568 - protein, 825 aa, Homo sapiens
MLDICLEKRVGTTLAAPKCNSSTVRFQGLAEGTKGTMKMDMEDADMTLWTEAEFEEKCTYIVNDHPWDSGADGGTSVQAEASLPRNLLFKYATNSEEVIGVMSKEYIPKGTRFGPLIGEIYTNDTVPKNANRKYFWRIYSRGELHHFIDGFNEEKSNWMRYVNPAHSPREQNLAACQNGMNIYFYTIKPIPANQELLVWYCRDFAERLHYPYPGELTMMNLTQTQSSLKQPSTEKNELCPKNVPKREYSVKEILKLDSNPSKGKDLYRSNISPLTSEKDLDDFRRRGSPEMPFYPRVVYPIRAPLPEDFLKASLAYGIERPTYITRSPIPSSTTPSPSARSSPDQSLKSSSPHSSPGNTVSPVGPGSQEHRDSYAYLNASYGTEGLGSYPGYAPLPHLPPAFIPSYNAHYPKFLLPPYGMNCNGLSAVSSMNGINNFGLFPRLCPVYSNLLGGGSLPHPMLNPTSLPSSLPSDGARRLLQPEHPREVLVPAPHSAFSFTGAAASMKDKACSPTSGSPTAGTAATAEHVVQPKATSAAMAAPSSDEAMNLIKNKRNMTGYKTLPYPLKKQNGKIKYECNVCAKTFGQLSNLKVHLRVHSGERPFKCQTCNKGFTQLAHLQKHYLVHTGEKPHECQVCHKRFSSTSNLKTHLRLHSGEKPYQCKVCPAKFTQFVHLKLHKRLHTRERPHKCSQCHKNYIHLCSLKVHLKGNCAAAPAPGLPLEDLTRINEEIEKFDISDNADRLEDVEDDISVISVVEKEILAVVRKEKEETGLKVSLQRNMGNGLLSSGCSLYESSDLPLMKLPPSNPLPLVPVKVKQETVEPMDP

SEQ ID NO: 8569 - protein, 121 aa, Homo sapiens
MDVLFVAIFAVPLILGQEYEDEERLGEDEYYQVVYYYTVTPSYDDFSADFTIDYSIFESEDRLNRLDKDITEAIETTISLETARADHPKPVTVKPVTTEPVEEGCYDSLDGSLARGNWKIK

SEQ ID NO: 8570 - protein, 131 aa, Homo sapiens
MDVLFVAIFAVPLILGQEYEDEERLGEDEYYQVVYYYTVTPSYDDFSADFTIDYSIFESEDRLNRLDKDITEAIETTISLETARADHPKPVTVKPVTTEPSPDLNDAVSSLRSPIPLLLSCAFVQVGMYFM

SEQ ID NO: 8571 - protein, 181 aa, Homo sapiens
MFNRAVSRLSRKRPPSDIHDSDGSSSSSHQSLKSTAKWAASLENLLEDPEGVKRFREFLKKEFSEENVLFWLACEDFKKMQDKTQMQEKAKEIYMTFLSSKASSQVNVEGQSRLNEKILEEPHPLMFQKLQDQIFNLMKYDSYSRFLKSDLFLKHKRTEEEEEDLPDAQTAAKRASRIYNT

SEQ ID NO: 8572 - protein, 265 aa, Homo sapiens
MGAAVFFGCTFVAFGPAFALFLITVAGDPLRVIILVAGAFFWLVSLLLASVVWFILVHVTDRSDARLQYGLLIFGAAVSVLLQEVFRFAYYKLLKKADEGLASLSEDGRSPISIRQMAYVSGLSFGIISGVFSVINILADALGPGVVGIHGDSPYYFLTSAFLTAAIILLHTFWGVVFFDACERRRYWALGLVVGSHLLTSGLTFLNPWYEASLLPIYAVTVSMGLWAFITAGGSLRSIQRSLLCRRQEDSRVMVYSALRIPPED

SEQ ID NO: 8573 - protein, 337 aa, Homo sapiens
MLFSALLLEVIWILAADGGQHWTYEGPHGQDHWPASYPECGNNAQSPIDIQTDSVTFDPDLPALQPHGYDQPGTEPLDLHNNGHTVQLSLPSTLYLGGLPRKYVAAQLHLHWGQKGSPGGSEHQINSEATFAELHIVHYDSDSYDSLSEAAERPQGLAVLGILIEVGETKNIAYEHILSHLHEVRHKDQKTSVPPFNLRELLPKQLGQYFRYNGSLTTPPCYQSVLWTVFYRRSQISMEQLEKLQGTLFSTEEEPSKLLVQNYRALQPLNQRMVFASFIQAGSSYTTGEMLSLGVGILVGCLCLLLAVYFIARKIRKKRLENRKSVVFTSAQATTEA

SEQ ID NO: 8574 - protein, 149 aa, Homo sapiens
MEMKKKINLELRNRSPEEVTELVLDNCLCVNGEIEGLNDTFKELEFLSMANVELSSLARLPSLNKLRKLELSDNIISGGLEVLAEKCPNLTYLNLSGNKIKDLSTVEALDEEDDDDYVEEGEEEEEEEGGLRGEKRKRDAEDDGEEEDD

SEQ ID NO: 8575 - protein, 226 aa, Homo sapiens
MLTLDLIQEEDPSPEEPTSCAESFRVDLDKSVAQLAGSRRRADSDRIQPSADRASSLSRPWEKTDKGATYTPQAPKKLTPTEKGRCASLEEILSQRDAASARTLQLRAEEPPTPALPNPGQLSRIQDLVARKLEETQELLAEVQGLGDGKRKAKDPPRSPPDSESEQLLLETERLLGEASSNWSQAKRVLQEVRELRDLYRQMDLQTPDSHLRQTTPHSQYRKSLM

SEQ ID NO: 8576 - protein, 892 aa, Homo sapiens
MKIIFPILSNPVFRRTVKLLLCLLWIGYSQGTTHVLRFGGIFEYVESGPMGAEELAFRFAVNTINRNRTLLPNTTLTYDTQKINLYDSFEASKKACDQLSLGVAAIFGPSHSSSANAVQSICNALGVPHIQTRWKHQVSDNKDSFYVSLYPDFSSLSRAILDLVQFFKWKTVTVVYDDSTGLIRLQELIKAPSRYNLRLKIRQLPADTKDAKPLLKEMKRGKEFHVIFDCSHEMAAGILKQALAMGMMTEYYHYIFTTLDLFALDVEPYRYSGVNMTGFRILNTENTQVSSIIEKWSMERLQAPPKPDSGLLDGFMTTDAALMYDAVHVVSVAVQQFPQMTVSSLQCNRHKPWRFGTRFMSLIKEAHWEGLTGRITFNKTNGLRTDFDLDVISLKEEGLEKIGTWDPASGLNMTESQKGKPANITDSLSNRSLIVTTILEEPYVLFKKSDKPLYGNDRFEGYCIDLLRELSTILGFTYEIRLVEDGKYGAQDDANGQWNGMVRELIDHKADLAVAPLAITYVREKVIDFSKPFMTLGISILYRKPNGTNPGVFSFLNPLSPDIWMYILLAYLGVSCVLFVIARFSPYEWYNPHPCNPDSDVVENNFTLLNSFWFGVGALMQQGSELMPKALSTRIVGGIWWFFTLIIISSYTANLAAFLTVERMESPIDSADDLAKQTKIEYGAVEDGATMTFFKKSKISTYDKMWAFMSSRRQSVLVKSNEEGIQRVLTSDYAFLMESTTIEFVTQRNCNLTQIGGLIDSKGYGVGTPMGSPYRDKITIAILQLQEEGKLHMMKEKWWRGNGCPEEESKEASALGVQNIGGIFIVLAAGLVLSVFVAVGEFLYKSKKNAQLEKRAKTKLPQDYVFLPILESVSISTVLSSSPSSSSLSSCS

SEQ ID NO: 8577 - protein, 111 aa, Homo sapiens
MALPRLTGALRSFSNVTKQDNYNEEVADLKIKRSKLHEQVLDLGLTWKKIIKFLNEKLEKSKMQSINEDLKDILHAAKQIEVNCPFQKRRLDGKEEDEKMSRASDRFRGLR

SEQ ID NO: 8578 - protein, 1382 aa, Homo sapiens
MPAYFQRPENALKRANEFLEVGKKQPALDVLYDVMKSKKHRTWQKIHEPIMLKYLELCVDLRKSHLAKEGLYQYKNICQQVNIKSLEDVVRAYLKMAEEKTEAAKEESQQMVLDIEDLDNIQTPESVLLSAVSGEDTQDRTDRLLLTPWVKFLWESYRQCLDLLRNNSRVERLYHDIAQQAFKFCLQYTRKAEFRKLCDNLRMHLSQIQRHHNQSTAINLNNPESQSMHLETRLVQLDSAISMELWQEAFKAVEDIHGLFSLSKKPPKPQLMANYYNKVSTVFWKSGNALFHASTLHRLYHLSREMRKNLTQDEMQRMSTRVLLATLSIPITPERTDIARLLDMDGIIVEKQRRLATLLGLQAPPTRIGLINDMVRFNVLQYVVPEVKDLYNWLEVEFNPLKLCERVTKVLNWVREQPEKEPELQQYVPQLQNNTILRLLQQVSQIYQSIEFSRLTSLVPFVDAFQLERAIVDAARHCDLQVRIDHTSRTLSFGSDLNYATREDAPIGPHLQSMPSEQIRNQLTAMSSVLAKALEVIKPAHILQEKEEQHQLAVTAYLKNSRKEHQRILARRQTIEERKERLESLNIQREKEELEQREAELQKVRKAEEERLRQEAKEREKERILQEHEQIKKKTVRERLEQIKKTELGAKAFKDIDIEDLEELDPDFIMAKQVEQLEKEKKELQERLKNQEKKIDYFERAKRLEEIPLIKSAYEEQRIKDMDLWEQQEEERITTMQLEREKALEHKNRMSRMLEDRDLFVMRLKAARQSVYEEKLKQFEERLAEERHNRLEERKRQRKEERRITYYREKEEEEQRRAEEQMLKEREERERAERAKREEELREYQERVKKLEEVERKKRQRELEIEERERRREEERRLGDSSLSRKDSRWGDRDSEGTWRKGPEADSEWRRGPPEKEWRRGEGRDEDRSHRRDEERPRRLGDDEDREPSLRPDDDRVPRRGMDDDRGPRRGPEEDRFSRRGADDDRPSWRNTDDDRPPRRIADEDRGNWRHADDDRPPRRGLDEDRGSWRTADEDRGPRRGMDDDRGPRRGGADDERSSWRNADDDRGPRRGLDDDRGPRRGMDDDRGPRRGMDDDRGPRRGMDDDRGPRRGLDDDRGPWRNADDDRIPRRGAEDDRGPWRNMDDDRLSRRADDDRFPRRGDDSRPGPWRPLVKPGGWREKEKAREESWGPPRESRPSEEREWDREKERDRDNQDREENDKDPERERDRERDVDREDRFRRPRDEGGWRRGPAEESSSWRDSSRRDDRDRDDRRRERDDRRDLRERRDLRDDRDRRGPPLRSEREEVSSWRRADDRKDDRVEERDPPRRVPPPALSRDRERDRDREREGEKEKASWRAEKDRESLRRTKNETDEDGWTTVRR

SEQ ID NO: 8579 - protein, 742 aa, Homo sapiens
MEEGFRDRAAFIRGAKDIAKEVKKHAAKKVVKGLDRVQDEYSRRSYSRFEEEDDDDDFPAPSDGYYRGEGTQDEEEGGASSDATEGHDEDDEIYEGEYQGIPRAESGGKGERMADGAPLAGVRGGLSDGEGPPGGRGEAQRRKEREELAQQYEAILRECGHGRFQWTLYFVLGLALMADGVEVFVVGFVLPSAEKDMCLSDSNKGMLGLIVYLGMMVGAFLWGGLADRLGRRQCLLISLSVNSVFAFFSSFVQGYGTFLFCRLLSGVGIGGSIPIVFSYFSEFLAQEKRGEHLSWLCMFWMIGGVYAAAMAWAIIPHYGWSFQMGSAYQFHSWRVFVLVCAFPSVFAIGALTTQPESPRFFLENGKHDEAWMVLKQVHDTNMRAKGHPERVFSVTHIKTIHQEDELIEIQSDTGTWYQRWGVRALSLGGQVWGNFLSCFGPEYRRITLMMMGVWFTMSFSYYGLTVWFPDMIRHLQAVDYASRTKVFPGERVEHVTFNFTLENQIHRGGQYFNDKFIGLRLKSVSFEDSLFEECYFEDVTSSNTFFRNCTFINTVFYNTDLFEYKFVNSRLINSTFLHNKEGCPLDVTGTGEGAYMVYFVSFLGTLAVLPGNIVSALLMDKIGRLRMLAGSSVMSCVSCFFLSFGNSESAMIALLCLFGGVSIASWNALDVLTVELYPSDKRTTAFGFLNALCKLAAVLGISIFTSFVGITKAAPILFASAALALGSSLALKLPETRGQVLQ

SEQ ID NO: 8580 - protein, 137 aa, Homo sapiens
MLSGRLVLGLVSMAGRVCLCQGSAGSGAIGPVEAAIRTKLEEALSPEVLELRNESGGHAVPPGSETHFRVAVVSSRFEGLSPLQRHRLVHAALAEELGGPVHALAIQARTPAQWRENSQLDTSPPCLGGNKKTLGTP

SEQ ID NO: 8581 - protein, 126 aa, Homo sapiens
MPEPAKSAPAPKKGSKKAVTKAQKKDGKKRKRSRKESYSIYVYKVLKQVHPDTGISSKAMGIMNSFVNDIFERIAGEASRLAHYNKRSTITSREIQTAVRLLLPGELAKHAVSEGTKAVTKYTSSK

SEQ ID NO: 8582 - protein, 136 aa, Homo sapiens [sequence omitted]

SEQ ID NO: 8583 - protein, 130 aa, Homo sapiens
MSGRGKQGGKARAKAKSRSSRAGLQFPVGRVHRLLRKGNYAERVGAGAPVYMAAVLEYLTAEILELAGNAARDNKKTRIIPRHLQLAIRNDEELNKLLGKVTIAQGGVLPNIQAVLLPKKTESHHKAKGK

SEQ ID NO: 8584 - protein, 2202 aa, Homo sapiens
MALPRLTGALRSFSNVTKQDNYNEEVADLKIKRSKLHEQVLDLGLTWKKIIKFLNEKLEKSKMQSINEDLKDILHAAKQIVGTDNGREAIESGAAFLFMTFHLKDSVGHKETKAIKQMFGPFPSSSATAACNATNRIISHFSQDDLTALVQMTEKEHGDRVFFGKNLAFSFDMHDLDHFDELPINGETQKTISLDYKKFLNEHLQEACTPELKPVEKTNGSFLWCEVEKYLNSTLKEMTEVPRVEDLCCTLYDMLASIKSGDELQDELFELLGPEGLELIEKLLQNRITIVDRFLNSSNDHRFQALQDNCKKILGENAKPNYGCQVTIQSEQEKQLMKQYRREEKRIARREKKAGEDLEVSEGLMCFDPKELRIQREQALLNARSVPILSRQRDADVEKIHYPHVYDSQAEAMKTSAFIAGAKMILPEGIQRENNKLYEEVRIPYSEPMPLSFEEKPVYIQDLDEIGQLAFKGMKRLNRIQSIVFETAYNTNENMLICAPTGAGKTNIAMLTVLHEIRQHFQQGVIKKNEFKIVYVAPMKALAAEMTDYFSRRLEPLGIIVKELTGDMQLSKSEILRTQMLVTTPEKWDVVTRKSVGDVALSQIVRLLILDEVHLLHEDRGPVLESIVARTLRQVESTQSMIRILGLSATLPNYLDVATFLHVNPYIGLFFFDGRFRPVPLGQTFLGIKCANKMQQLNNMDEVCYENVLKQVKAGHQVMVFVHARNATVRTAMSLIERAKNCGHIPFFFPTQGHDYVLAEKQVQRSRNKQVRELFPDGFSIHHAGMLRQDRNLVENLFSNGHIKVLVCTATLAWGVNLPAHAVIIKGTQIYAAKRGSFVDLGILDVMQIFGRAGRPQFDKFGEGIIITTHDKLSHYLTLLTQRNPIESQFLESLADNLNAEIALGTVTNVEEAVKWISYTYLYVRMRANPLAYGISHKAYQIDPTLRKHREQLVIEVGRKLDKAQMIRFEERTGYFSSTDLGRTASHYYIKYNTIETFNELFDAHKTEGDIFAIVSKAEEFDQIKVREEEIEELDTLLSNFCELSTPGGVENSYGKINILLQTYISRGEMDSFSLISDSAYVAQNAARIVRALFEIALRKRWPTMTYRLLNLSKVIDKRLWGWASPLRQFSILPPHILTRLEEKKLTVDKLKDMRKDEIGHILHHVNIGLKVKQCVHQIPSVMMEASIQPITRTVLRVTLSIYADFTWNDQVHGTVGEPWWIWVEDPTNDHIYHSEYFLALKKQVISKEAQLLVFTIPIFEPLPSQYYIRAVSDRWLGAEAVCIINFQHLILPERHPPHTELLDLQPLPITALGCKAYEALYNFSHFNPVQTQIFHTLYHTDCNVLLGAPTGSGKTVAAELAIFRVFNKYPTSKAVYIAPLKALVRERMDDWKVRIEEKLGKKVIELTGDVTPDMKSIAKADLIVTTPEKWDGVSRSWQNRNYVQQVTILIIDEIHLLGEERGPVLEVIVSRTNFISSHTEKPVRIVGLSTALANARDLADWLNIKQMGLFNFRPSVRPVPLEVHIQGFPGQHYCPRMASMNKPAFQAIRSHSPAKPVLIFVSSRRQTRLTALELIAFLATEEDPKQWLNMDEREMENIIATVRDSNLKLTLAFGIGMHHAGLHERDRKTVEELFVNCKVQVLIATSTLAWGVNFPAHLVIIKGTEYYDGKTRRYVDFPITDVLQMMGRAGRPQFDDQGKAVILVHDIKKDFYKKFLYEPFPVESSLLGVLSDHLNAEIAGGTITSKQDALDYITWTYFFRRLIMNPSYYNLGDVSHDSVNKFLSHLIEKSLIELELSYCIEIGEDNRSIEPLTYGRIASYYYLKHQTVKMFKDRLKPECSTEELLSILSDAEEYTDLPVRHNEDHMNSELAKCLPIESNPHSFDSPHTKAHLLLQAHLSRAMLPCPDYDTDTKTVLDQALRVCQAMLDVAANQGWLVTVLNITNLIQMVIQGRWLKDSSLLTLPNIENHHLHLFKKWKPIMKGPHARGRTSIESLPELIHACGGKDHVFSSMVESELHAAKTKQAWNFLSHLPVINVGISVKGSWDDLVEGHNELSVSTLTADKRDDNKWIKLHADQEYVLQVSLQRVHFGFHKGKPESCAVTPRFPKSKDEGWFLILGEVDKRELIALKRVGYIRNHHVASLSFYTPEIPGRYIYTLYFMSDCYLGLDQQYDIYLNVTQASLSAQVNTKVSDSLTDLALK

SEQ ID NO: 8585 - protein, 136 aa, Homo sapiens; identical to SEQ ID NO: 7651

SEQ ID NO: 8586 - protein, 126 aa, Homo sapiens
MPDPAKSAPAPKKGSKKAVTKVQKKDGKKRKRSRKESYSVYVYKVLKQVHPDTGISSKAMGIMNSFVNDIFERIAGEASRLAHYNKRSTITSREIQTAVRLLLPGELAKHAVSEGTKAVTKYTSSK

SEQ ID NO: 8587 - protein, 374 aa, Homo sapiens
MWFLTTLLLWVPVDGQVDTTKAVITLQPPWVSVFQEETVTLHCEVLHLPGSSSTQWFLNGTATQTSTPSYRITSASVNDSGEYRCQRGLSGRSDPIQLEIHRGWLLLQVSSRVFTEGEPLALRCHAWKDKLVYNVLYYRNGKAFKFFHWNSNLTILKTNISHNGTYHCSGMGKHRYTSAGISVTVKELFPAPVLNASVTSPLLEGNLVTLSCETKLLLQRPGLQLYFSFYMGSKTLRGRNTSSEYQILTARREDSGLYWCEAATEDGNVLKRSPELELQVLGLQLPTPVWFHVLFYLAVGIMFLVNTVLWVTIRKELKRKKKWDLEISLDSGHEKKVISSLQEDRHLEEELKCQEQKEEQLQEGVHRKEPQGAT

SEQ ID NO: 8588 - protein, 233 aa, Homo sapiens
MWSGLLPPGLNESDAESNSEDEATLENSGLNLQEDKEDESIRKTEIIDFSTDEPKTETESNVNAYEECPSGIPIDMWNKFQELHKKHSEQKSTTSRFRGKRRKRSRKDKLKNEKELHSEPSSNETQWKELTQYFGVNDRFDPPVKRKKVEKSGLEKRIDQAVEEWNIEKAEELSNQLATRELGVKIAKAVACHNFVKAKKEVENSQAARKKKKLAWGFEAKKRWETKSNMGYM

SEQ ID NO: 8589 - protein, 532 aa, Homo sapiens
MMLSEQAQKWFPTHVQVTVLQAKDLKPKGKSGTNDTYTIIQLGKEKYSTSVAEKTLEPVWKEEASFELPGLLIQGSPEKYILFLIVMHRSLVGLDKFLGQVAINLNDIFEDKQRRKTEWFRLESKQGKRIKNRGEIKVNIQFMRNNMTASMFDLSMKDKTRSPFAKLKDKMKGRKNDGTFSDTSSAIIPSTHMPDANSEFSSGEIQMKSKPKKPFLLGPQRLSSAHSMSDLSGSHMSSEKLKAGTIGQTHLLGHQLDSFGTVPESGSLKSPHRRTLSFDTSKMNQPDSIVDEGELCFGRQNDPFTNVTASLPQKFATLPRKKNPFEESSETWDSSMNLFSKPIEIRKENKREKREKVSLFERVTGKKDSRRSDKLNNGGSDSPCDLKSPNAFSENRQDYFDYESTNPFTAKFRASNIMPSSRNTLLTPAVAEWRGSLRWAELFHMSPTSNEDLRKIPDSNPFDATAGYRSLTYEEVLQELVKHKELLRRKDTHIRELEDYIDNLLVRVMEETPSILRVPYEPSRKAGKFSNS

SEQ ID NO: 8590 - protein, 675 aa, Homo sapiens
MADKEAGGSDGPRETAPTSAYSSPARSLGDTGITPLSPSHIVNDTDSNVSEQQSFLVVVAVDFGTTSSGYAYSFTKEPECIHVMRRWEGGDPGVSNQKTPTTILLTPERKFHSFGYAARDFYHDLDPNEAKQWLYLEKFKMKLHTTGDLTMDTDLTAANGKKVKALEIFAYALQYFKEQALKELSDQAGSEFENSDVRWVITVPAIWKQPAKQFMRQAAYQAGLASPENSEQLIIALEPEAASIYCRKLRLHQMIELSSKAAVNGYSGSDTVGAGFTQAKEHIRRNRQSRTFLVENVIGEIWSELEEGDKYVVVDSGGGTVDLTVHQIRLPEGHLKELYKATGGPYGSLGVDYEFEKLLYKIFGEDFIEQFKIKRPAAWVDLMIAFESRKRAAAPDRTNPLNITLPFSFIDYYKKFRGHSVEHALRKSNVDFVKWSSQGMLRMSPDAMNALFKPTIDSIIEHLRDLFQKPEVSTVKFLFLVGGFAEAPLLQQAVQAAFGDQCRIIIPQDVGLTILKGAVLFGLDPAVIKVRRSPLTYGVGVLNRYVEGKHPPEKLLVKDGTRWCTDVFDKFISADQSVALGELVKRSYTPAKPSQLVIVINIYSSEHDNVSFITDPGVKKCGTLRLDLTGTSGTAVPARREIQTLMQFGDTEIKATAIDIATSKSVKVGIDFLNY

SEQ ID NO: 8591 - protein, 465 aa, Homo sapiens
MLPLWTLSLLLGAVAGKEVCYERLGCFSDDSPWSGITERPLHILPWSPKDVNTRFLLYTNENPNNFQEVAADSSSISGSNFKTNRKTRFIIHGFIDKGEENWLANVCKNLFKVESVNCICVDWKGGSRTGYTQASQNIRIVGAEVAYFVEFLQSAFGYSPSNVHVIGHSLGAHAAGEAGRRTNGTIGRITGLDPAEPCFQGTPELVRLDPSDAKFVDVIHTDGAPIVPNLGFGMSQVVGHLDFFPNGGVEMPGCKKNILSQIVDIDGIWEGTRDFAACNHLRSYKYYTDSIVNPDGFAGFPCASYNVFTANKCFPCPSGGCPQMGHYADRYPGKTNDVGQKFYLDTGDASNFARWRYKVSVTLSGKKVTGHILVSLFGNKGNSKQYEIFKGTLKPDSTHSNEFDSDVDVGDLQMVKFIWYNNVINPTLPRVGASKIIVETNVGKQFNFCSPETVREEVLLTLTPC

SEQ ID NO: 8592 - protein, 467 aa, Homo sapiens
MLGIWIVAFLFFGTSRGKEVCYERLGCFKDGLPWTRTFSTELVGLPWSPEKINTRFLLYTIHNPNAYQEISAVNSSTIQASYFGTDKITRINIAGWKTDGKWQRDMCNVLLQLEDINCINLDWINGSREYIHAVNNLRVVGAEVAYFIDVLMKKFEYSPSKVHLIGHSLGAHLAGEAGSRIPGLGRITGLDPAGPFFHNTPKEVRLDPSDANFVDVIHTNAARILFELGVGTIDACGHLDFYPNGGKHMPGCEDLITPLLKFNFNAYKKEMASFFDCNHARSYQFYAESILNPDAFIAYPCRSYTSFKAGNCFFCSKEGCPTMGHFADRFHFKNMKTNGSHYFLNTGSLSPFARWRHKLSVKLSGSEVTQGTVFLRVGGAVRKTGEFAIVSGKLEPGMTYTKLIDADVNVGNITSVQFIWKKHLFEDSQNKLGAEMVINTSGKYGYKSTFCSQDIMGPNILQNLKPC

SEQ ID NO: 8593 - protein, 455 aa, Homo sapiens; identical to SEQ ID NO: 5261

SEQ ID NO: 8594 - protein, 460 aa, Homo sapiens
MFLATLYFALPLLDLLLSAEVSGGDRLDCVKASDQCLKEQSCSTKYRTLRQCVAGKETNFSLASGLEAKDECRSAMEALKQKSLYNCRCKRGMKKEKNCLRIYWSMYQSLQGNDLLEDSPYEPVNSRLSDIFRVVPFISVEHIPKGNNCLDAAKACNLDDICKKYRSAYITPCTTSVSNDVCNRRKCHKALRQFFDKVPAKHSYGMLFCSCRDIACTERRRQTIVPVCSYEEREKPNCLNLQDSCKTNYICRSRLADFFTNCQPESRSVSSCLKENYADCLLAYSGLIGTVMTPNYIDSSSLSVAPWCDCSNSGNDLEECLKFLNFFKDNTCLKNAIQAFGNGSDVTVWQPAFPVQTTTATTTTALRVKNKPLGPAGSENEIPTHVLPPCANLQAQKLKSNVSGNTHLCISNGNYEKEGLGASSHITTKSMAAPPSCGLSPLLVLVVTALSTLLSLTETS

SEQ ID NO: 8595 - protein, 805 aa, Homo sapiens
MWDQGGQPWQQWPLNQQQWMQSFQHQQDPSQIDWAALAQAWIAQREASGQQSMVEQPPGMMPNGQDMSTMESGPNNHGNFQGDSNFNRMWQPEWGMHQQPPHPPPDQPWMPPTPGPMDIVPPSEDSNSQDSGEFAPDNRHIFNQNNHNFGGPPDNFAVGPVNQFDYQHGAAFGPPQGGFHPPYWQPGPPGPPAPPQNRRERPSSFRDRQRSPIALPVKQEPPQIDAVKRRTLPAWIREGLEKMEREKQKKLEKERMEQQRSQLSKKEKKATEDAEGGDGPRLPQRSKFDSDEEEEDTENVEAASSGKVTRSPSPVPQEEHSDPEMTEEEKEYQMMLLTKMLLTEILLDVTDEEIYYVAKDAHRKATKAPAKQLAQSSALASLTGLGGLGGYGSGDSEDERSDRGSESSDTDDEELRHRIRQKQEAFWRKEKEQQLLHDKQMEEEKQQTERVTKEMNEFIHKEQNSLSLLEAREADGDVVNEKKRTPNETTSVLEPKKEHKEKEKQGRSRSGSSSSGSSSSNSRTSSTSSTVSSSSYSSSSGSSRTSSRSSSPKRKKRHSRSRSPTIKARRSRSRSYSRRIKIESNRARVKIRDRRRSNRNSIERERRRNRSPSRERRRSRSRSRDRRTNRASRSRSRDRRKIDDQRGNLSGNSHKHKGEAKEQERKKERSRSIDKDRKKKDKEREREQDKRKEKQKREEKDFKFSSQDDRLKRKRESERTFSRSGSISVKIIRHDSRQDSKKSTTKDSKKHSGSDSSGRSSSESPGSSKEKKAKKPKHSRSRSVEKSQRSGKKASRKHKSKSRSR

SEQ ID NO: 8596 - protein, 765 aa, Homo sapiens
MFSKFTSILQHAVEALAPSLPLQEDFVYHWKAITHYYIETSDDKAPVTDTNIPSHLEQMLDILVQEENERESGETGPCMEYLLHHKILETLYTLGKADCPPGMKQQVLVFYTKLLGRIRQPLLPHINVHRPVQKLIRLCGEVLATPTENEEIQFLCIVCAKLKQDPYLVNFFLENKMKSLASKGVPNVISEDTLKGQDSLSTDTGQSRQPEELSGATGMEQTELEDEPPHQMDHLSTSLDNLSVTSLPEASVVCPNQDYNLVNSLLNLTRSPDGRIAVKACEGLMLLVSLPEPAAAKCLTQSTCLCELLTDRLASLYKALPQSVDPLDIETVEAINWGLDSYSHKEDASAFPGKRALISFLSWFDYCDQLIKEAQKTAAVALAKAVHERFFIGVMEPQLMQTSEMGILTSTALLHRIVRQVTSDVLLQEMVFFILGEQREPETLAEISRHPLRHRLIEHCDHISDEISIMTLRMFEHLLQKPNEHILYNLVLRNLEERNYTEYKPLCPEDKDVVENGLIAGAVDLEEDPLFTDISPENTLPNQEWLSSSPPATPDHPKNDGKTEVHKIVNSFLCLVPDDAKSSYHVEGTGYDTYLRDAHRQFRDYCAICLRWEWPGSPKALEKCNLEAAFFEGHFLKVLFDRMGRILDQPYDVNLQVTSVLSRLSLFPHPHIHEYLLDPYVNLAPGCRSLFSVIVRVVGDLMLRIQRIQDFTPKLLLVRKRLLGLEPEGPIIDHITLLEGVIVLEEFCKELAAIAFVKYHASSTP

SEQ ID NO: 8597 - protein, 897 aa, Homo sapiens
MERAGATSRGGQAPGFLLRLHTEGRAEAARVQEQDLRQWGLTGIHLRSYQLEGVNWLAQRFHCQNGCILGDEMGLGKTCQTIALFIYLAGRLNDEGPFLILCPLSVLSNWKEEMQRFAPGLSCVTYAGDKEERACLQQDLKQESRFHVLLTTYEICLKDASFLKSFPWSVLVVDEAHRLKNQSSLLHKTLSEFSVVFSLLLTGTPIQNSLQELYSLLSFVEPDLFSKEEVGDFIQRYQDIEKESESASELHKLLQPFLLRRVKAEVATELPKKTEVVIYHGMSALQKKYYKAILMKDLDAFENETAKKVKLQNILSQLRKCVDHPYLFDGVEPEPFEVGDHLTEASGKLHLLDKLLAFLYSGGHRVLLFSQMTQMLDILQDYMDYRGYSYERVDGSVRGEERHLAIKNFGQQPIFVFLLSTRAGGVGMNLTAADTVIFVDSDFNPQNDLQAAARAHRIGQNKSVKVIRLIGRDTVEEIVYRKAASKLQLTNMIIEGGHFTLGAQKPAADADLQLSEILKFGLDKLLASEGSTMDEIDLESILGETKDGQWVSDALPAAEGGSRDQEEGKNHMYLFEGKDYSKEPSKEDRKSFEQLVNLQKTLLEKASQEGRSLRNKGSVLIPGLVEGSTKRKRVLSPEELEDRQKKRQEAAAKRRRLIEEKKRQKEEAEHKKKMAWWESNNYQSFCLPSEESEPEDLENGEESSAELDYQDPDATSLKYVSGDVTHPQAGAEDALIVHCVDDSGHWGRGGLFTALEKRSAEPRKIYELAGKMKDLSLGGVLLFPVDDKESRNKGQDLLALIVAQHRDRSNVLSGIKMAALEEGLKKIFLAAKKKKASVHLPRIGHATKGFNWYGTERLIRKHLAARGIPTYIYYFPRSKSAVLHSQSSSSSSRQLVP

SEQ ID NO: 8598 - protein, 175 aa, Homo sapiens
MGALVIRGIRNFNLENRAEREISKMKPSVAPRHPSTNSLLREQISLYPEVKGEIARKDEKLLSFLKDVYVDSKDPVSSLQVKAAETCQEPKEFRLPKDHHFDMINIKSIPKGKISIVEALTLLNNHKLFPETWTAEKIMQEYQLEQKDVNSLLKYFVTFEVEIFPPEDKKAIRSK

SEQ ID NO: 8599 - protein, 794 aa, Homo sapiens
MADAWEEIRRLAADFQRAQFAEATQRLSERNCIEIVNKLIAQKQLEVVHTLDGKEYITPAQISKEMRDELHVRGGRVNIVDLQQVINVDLIHIENRIGDIIKSEKHVQLVLGQLIDENYLDRLAEEVNDKLQESGQVTISELCKTYDLPGNFLTQALTQRLGRIISGHIDLDNRGVIFTEAFVARHKARIRGLFSAITRPTAVNSLISKYGFQEQLLYSVLEELVNSGRLRGTVVGGRQDKAVFVPDIYSRTQSTWVDSFFRQNGYLEFDALSRLGIPDAVSYIKKRYKTTQLLFLKAACVGQGLVDQVEASVEEAISSGTWVDIAPLLPTSLSVEDAAILLQQVMRAFSKQASTVVFSDTVVVSEKFINDCTELFRELMHQKAEKEMKNNPVHLITEEDLKQISTLESVSTSKKDKKDERRRKATEGSGSMRGGGGGNAREYKIKKVKKKGRKDDDSDDESQSSHTGKKKPEISFMFQDEIEDFLRKHIQDAPEEFISELAEYLIKPLNKTYLEVVRSVFMSSTTSASGTGRKRTIKDLQEEVSNLYNNIRLFEKGMKFFADDTQAALTKHLLKSVCTDITNLIFNFLASDLMMAVDDPAAITSEIRKKILSKLSEETKVALTKLHNSLNEKSIEDFISCLDSAAEACDIMVKRGDKKRERQILFQHRQALAEQLKVTEDPALILHLTSVLLFQFSTHSMLHAPGRCVPQIIAFLNSKIPEDQHALLVKYQGLVVKQLVSQSKKTGQGDYPLNNELDKEQEDVASTTRKELQELSSSIKDLVLKSRKSSVTEE

SEQ ID NO: 8600 - protein, 898 aa, Homo sapiens
MSETDHIASTSSDKNVGKTPELKEDSCNLFSGNESSKLENESKLLSLNTDKTLCQPNEHNNRIEAQENYIPDHGGGEDSCAKTDTGSENSEQIANFPSGNFAKHISKTNETEQKVTQILVELRSSTFPESANEKTYSESPYDTDCTKKFISKIKSVSASEDLLEEIESELLSTEFAEHRVPNGMNKGEHALVLFEKCVQDKYLQQEHIIKKLIKENKKHQELFVDICSEKDNLREELKKRTETEKQHMNTIKQLESRIEELNKEVKASRDQLIAQDVTAKNAVQQLHKEMAQRMEQANKKCEEARQEKEAMVMKYVRGEKESLDLRKEKETLEKKLRDANKELEKNTNKIKQLSQEKGRLHQLYETKEGETTRLIREIDKLKEDINSHVIKVKWAQNKLKAEMDSHKETKDKLKETTTKLTQAKEEADQIRKNCQDMIKTYQESEEIKSNELDAKLRVTKGELEKQMQEKSDQLEMHHAKIKELEDLKRTFKEGMDELRTLRTKVKCLEDERLRTEDELSKYKEIINRQKAEIQNLLDKVKTADQLQEQLQRGKQEIENLKEEVESLNSLINDLQKDIEGSRKRESELLLFTERLTSKNAQLQSESNSLQSQFDKVSCSESQLQSQCEQMKQTNINLESRLLKEEELRKEEVQTLQAELACRQTEVKALSTQVEELKDELVTQRRKHASSIKDLTKQLQQARRKLDQVESGSYDKEVSSMGSRSSSSGSLNARSSAEDRSPENTGSSVAVDNFPQVDKAMLIERIVRLQKAHARKNEKIEFMEDHIKQLVEEIRKKTKIIQSYILREESGTLSSEASDFNKVHLSRRGGIMASLYTSHPADNGLTLELSLEINRKLQAVLEDTLLKNITLKENLQTLGTEIERLIKHQHELEQRTKKT

SEQ ID NO: 8601 - protein, 198 aa, Homo sapiens
MAKFRRRTCIILALFILFIFSLMMGLKMLRPNTATFGAPFGLDLLPELHQRTIHLGKNFDFQKSDRINSETNTKNLKSVEITMKPSKASELNLDELPPLNNYLHVFYYSWYGNPQFDGKYIHWNHPVLEHWDPRIAKNYPQGRHNPPDDIGSSFYPELGSYSSRDPSVIETHMRQMRSASIGNYCIYIYVCLCLYICI

SEQ ID NO: 8602 - protein, 279 aa, Homo sapiens
MVFQTRYPSWIILCYIWLLRFAHTGEAQAAKEVLLLDSKAQQTELEWISSPPNGWEEISGLDENYTPIRTYQVCQVMEPNQNNWLRTNWISKGNAQRIFVELKFTLRDCNSLPGVLGTCKETFNLYYYETDYDTGRNIRENLYVKIDTIAADESFTQGDLGERKMKLNTEVREIGPLSKKGFYLAFQDVGACIALVSVKVYYKKCWSIIENLAIFPDTVTGSEFSSLVEVRGTCVSSAEEEAENAPRMHCSAEGEWLVPIGKCICKAGYQQKGDTCERK

SEQ ID NO: 8603 - protein, 726 aa, Homo sapiens
MAAPGGRGRSLSGLLPAQTSLEYALLDAVTQQEKDSLVYQYLQKVDGWEQDLSVPEFPEGLEWLNTEEPISVYKDLCGKIVVLDFFTYCCINCIHLLPDLHALEHTYSDKDGLLIIGVHSAKFPNEKVLDNIKSAVLRYNITHPMVNDADASLWQELEVSCWPTLVILGPRGNMLFSLIGEGHKDKLFLYTSIALKYYKDRGQIRDNKIGIKLYKDSLPPSPLLFPGKVTVDQVTDRLVIADTGHHRILVVWKNGQIQYSIGGPNPGRKDGIFSESTFNSPQGVAIMNNIIYVADTENHLIRKIDLEAEKVSTVAGIGIQGTDKEGGAKGEQQPISSPWDVVFGTSGSEVQRGDILWIAMAGTHQIWALLLDSGKLPKKNELTKGTCLRFAGSGNEENRNNAYPHKAGFAQPSGLSLASEDPWSCLFVADSESSTVRTVSLKDGAVKHLVGGERDPMNLFAFGDVDGVGINAKLQHPLGVTWDKKRNLLYVADSYNHKIKVVDPKTKNCTTLAGTGDTNNVTSSSFTESTFNEPGGLCIGENGELLYVADTNNHQIKVMDLETKMVSVLPIFRSENAVVDGPFLVEKQKTLPKLPKSAPSIRLSPVTACAGQTLQFKLRLDLPSGSKLTEGVSSCWFLTAEGNEWLLQGQIAAGDIENISSQPTISLQIPDDCLSLEAIVSVSVFLYYCSADSSACMMKAILFSQPLQITDTQQGCIAPVELRYVF

SEQ ID NO: 8604 - protein, 998 aa, Homo sapiens
MVFQTRYPSWIILCYIWLLRFAHTGEAQAAKEVLLLDSKAQQTELEWISSPPNGWEEISGLDENYTPIRTYQVCQVMEPNQNNWLRTNWISKGNAQRIFVELKFTLRDCNSLPGVLGTCKETFNLYYYETDYDTGRNIRENLYVKIDTIAADESFTQGDLGERKMKLNTEVREIGPLSKKGFYLAFQDVGACIALVSVKVYYKKCWSIIENLAIFPDTVTGSEFSSLVEVRGTCVSSAEEEAENAPRMHCSAEGEWLVPIGKCICKAGYQQKGDTCEPCGRGFYKSSSQDLQCSRCPTHSFSDKEGSSRCECEDGYYRAPSDPPYVACTRPPSAPQNLIFNINQTTVSLEWSPPADNGGRNDVTYRILCKRCSWEQGECVPCGSNIGYMPQQTGLEDNYVTVMDLLAHANYTFEVEAVNGVSDLSRSQRLFAAVSITTGQAAPSQVSGVMKERVLQRSVELSWQEPEHPNGVITEYEIKYYEKDQRERTYSTVKTKSTSASINNLKPGTVYVFQIRAFTAAGYGNYSPRLDVATLEEATGKMFEATAVSSEQNPVIIIAVVAVAGTIILVFMVFGFIIGRRHCGYSKADQEGDEELYFHFKFPGTKTYIDPETYEDPNRAVHQFAKELDASCIKIERVIGAGEFGEVCSGRLKLPGKRDVAVAIKTLKVGYTEKQRRDFLCEASIMGQFDHPNVVHLEGVVTRGKPVMIVIEFMENGALDAFLRKHDGQFTVIQLVGMLRGIAAGMRYLADMGYVHRDLAARNILVNSNLVCKVSDFGLSRVIEDDPEAVYTTTGGKIPVRWTAPEAIQYRKFTSASDVWSYGIVMWEVMSYGERPYWDMSNQDVIKAIEEGYRLPAPMDCPAGLHQLMLDCWQKERAERPKFEQIVGILDKMIRNPNSLKTPLGTCSRPISPLLDQNTPDFTTFCSVGEWLQAIKMERYKDNFTAAGYNSLESVARMTIEDVMSLGITLVGHQKKIMSSIQTMRAQMLHLHGTGIQV

SEQ ID NO: 8605 - protein, 1167 aa, Homo sapiens
MELPFVTHLFLPLVFLTGLCSPFNLDEHHPRLFPGPPEAEFGYSVLQHVGGGQRWMLVGAPWDGPSGDRRGDVYRCPVGGAHNAPCAKGHLGDYQLGNSSHPAVNMHLGMSLLETDGDGGFMACAPLWSRACGSSVFSSGICARVDASFQPQGSLAPTAQRCPTYMDVVIVLDGSNSIYPWSEVQTFLRRLVGKLFIDPEQIQVGLVQYGESPVHEWSLGDFRTKEEVVRAAKNLSRREGRETKTAQAIMVACTEGFSQSHGGRPEAARLLVVVTDGESHDGEELPAALKACEAGRVTRYGIAVLGHYLRRQRDPSSFLREIRTIASDPDERFFFNVTDEAALTDIVDALGDRIFGLEGSHAENESSFGLEMSQIGFSTHRLKDGILFGMVGAYDWGGSVLWLEGGHRLFPPRMALEDEFPPALQNHAAYLGYSVSSMLLRGGRRLFLSGAPRFRHRGKVIAFQLKKDGAVRVAQSLQGEQIGSYFGSELCPLDTDRDGTTDVLLVAAPMFLGPQNKETGRVYVYLVGQQSLLTLQGTLQPEPPQDARFGFAMGALPDLNQDGFADVAVGAPLEDGHQGALYLYHGTQSGVRPHPAQRIAAASMPHALSYFGRSVDGRLDLDGDDLVDVAVGAQGAAILLSSRPIVHLTPSLEVTPQAISVVQRDCRRRGQEAVCLTAALCFQVTSRTPGRWDHQFYMRFTASLDEWTAGARAAFDGSGQRLSPRRLRLSVGNVTCEQLHFHVLDTSDYLRPVALTVTFALDNTTKPGPVLNEGSPTSIQKLVPFSKDCGPDNECVTDLVLQVNMDIRGSRKAPFVVRGGRRKVLVSTTLENRKENAYNTSLSLIFSRNLHLASLTPQRESPIKVECAAPSAHARLCSVGHPVFQTGAKVTFLLEFEFSCSSLLSQVFVKLTASSDSLERNGTLQDNTAQTSAYIQYEPHLLFSSESTLHRYEVHPYGTLPVGPGPEFKTTLRVQNLGCYVVSGLIISALLPAVAHGGNYFLSLSQVITNNASCIVQNLTEPPGPPVHPEELQHTNRLNGSNTQCQVVRCHLGQLAKGTEVSVGLLRLVHNEFFRRAKFKSLTVVSTFELGTEEGSVLQLTEASRWSESLLEVVQTRPILISLWILIGSVLGGLLLLALLVFCLWKLGFFAHKKIPEEEKREEKLEQ

SEQ ID NO: 8606 - protein, 259 aa, Homo sapiens
MDAWVRFSAQSQARERLCRAAQYACSLLGHALQRHGASPELQKQIRQLESHLSLGRKLLRLGNSADALESAKRAVHLSDVVLRFCITVSHLNRALYFACDNVLWAGKSGLAPRVDQEKWAQRSFRYYLFSLIMNLSRDAYEIRLLMEQESSACSRRLKGSGGGVPGGSETGGLGGPGTPGGGLPQLALKLRLQVLLLARVLRGHPPLLLDVVRNACDLFIPLDKLGLWRCGPGIVGLCGLVSSILSILTLIYPWLRLKP

SEQ ID NO: 8607 - protein, 218 aa, Homo sapiens
MASRGGGRGRGRGQLTFNVEAVGIGKGDALPPPTLQPSPLFPPLEFRPVPLPSGEEGEYVLALKQELRGAMRQLPYFIRPAVPKRDVERYSDKYQMSGPIDNAIDWNPDWRRLPRELKIRVRKLQKERITILLPKRPPKTTEDKEETIQKLETLEKKEEEVTSEEDEEKEEEEEKEEEEEEEYDEEEHEEETDYIMSYFDNGEDFGGDSDDNMDEAIY

SEQ ID NO: 8608 - protein, 579 aa, Homo sapiens
MSTASAASSSSSSSAGEMIEAPSQVLNFEEIDYKEIEVEEVVGRGAFGVVCKAKWRAKDVAIKQIESESERKAFIVELRQLSRVNHPNIVKLYGACLNPVCLVMEYAEGGSLYNVLHGAEPLPYYTAAHAMSWCLQCSQGVAYLHSMQPKALIHRDLKPPNLLLVAGGTVLKICDFGTACDIQTHMTNNKGSAAWMAPEVFEGSNYSEKCDVFSWGIILWEVITRRKPFDEIGGPAFRIMWAVHNGTRPPLIKNLPKPIESLMTRCWSKDPSQRPSMEEIVKIMTHLMRYFPGADEPLQYPCQYSDEGQSNSATSTGSFMDIASTNTSNKSDTNMEQVPATNDTIKRLESKLLKNQAKQQSESGRLSLGASRGSSVESLPPTSEGKRMSADMSEIEARIAATTGNGQPRRRSIQDLTVTGTEPGQVSSRSSSPSVRMITTSGPTSEKPTRSHPWTPDDSTDTNGSDNSIPMAYLTLDHQLQPLAPCPNSKESMAVFEQHCKMAQEYMKVQTEIALLLQRKQELVAELDQDEKDQQNTSRLVQEHKKLLDENKSLSTYYQQCKKQLEVIRSQQQKRQGTS

SEQ ID NO: 8609 - protein, 2362 aa, Homo sapiens
MSNGYRTLSQHLNDLKKENFSLKLRIYFLEERMQQKYEASREDIYKRNIELKVEVESLKRELQDKKQHLDKTWADVENLNSQNEAELRRQFEERQQETEHVYELLENKIQLLQEESRLAKNEAARMAALVEAEKECNLELSEKLKGVTKNWEDVPGDQVKPDQYTEALAQRDKRIEELNQSLAAQERLVEQLSREKQQLLHLLEEPTSMEVQPMTEELLKQQKLNSHETTITQQSVSDSHLAELQEKIQQTEATNKILQEKLNEMSYELKCAQESSQKQDGTIQNLKETLKSRERETEELYQVIEGQNDTMAKLREMLHQSQLGQLHSSEGTSPAQQQVALLDLQSALFCSQLEIQKLQRVVRQKERQLADAKQCVQFVEAAAHESEQQKEASWKHNQELRKALQQLQEELQNKSQQLRAWEAEKYNEIRTQEQNIQHLNHSLSHKEQLLQEFRELLQYRDNSDKTLEANEMLLEKLRQRIHDKAVALERAIDEKFSALEEKEKELRQLRLAVRERDHDLERLRDVLSSNEATMQSMESLLRAKGLEVEQLSTTCQNLQWLKEEMETKFSRWQKEQESIIQQLQTSLHDRNKEVEDLSATLLCKLGPGQSEIAEELCQRLQRKERMLQDLLSDRNKQVLEHEMEIQGLLQSVSTREQESQAAAEKLVQALMERNSELQALRQYLGGRDSLMSQAPISNQQAEVTPTGRLGKQTDQGSMQIPSRDDSTSLTAKEDVSIPRSTLGDLDTVAGLEKELSNAKEELELMAKKERESQMELSALQSMMAVQEEELQVQAADMESLTRNIQIKEDLIKDLQMQLVDPEDIPAMERLTQEVLLLREKVASVESQGQEISGNRRQQLLLMLEGLVDERSRLNEALQAERQLYSSLVKFHAHPESSERDRTLQVELEGAQVLRSRLEEVLGRSLERLNRLETLAAIGGAAAGDDTEDTSTEFTDSIEEEAAHHSHQQLVKVALEKSLATVETQNPSFSPPSPMGGDSNRCLQEEMLHLRAEFHQHLEEKRKAEEELKELKAQIEEAGFSSVSHIRNTMLSLCLENAELKEQMGEAMSDGWEIEEDKEKGEVMVETVVTKEGLSESSLQAEFRKLQGKLKNAHNIINLLKEQLVLSSKEGNSKLTPELLVHLTSTIERINTELVGSPGKHQHQEEGNVTVRPFPRPQSLDLGATFTVDAHQLDNQSQPRDPGPQSAFSLPGSTQHLRSQLSQCKQRYQDLQEKLLLSEATVFAQANELEKYRVMLTGESLVKQDSKQIQVDLQDLGYETCGRSENEAEREETTSPECEEHNSLKEMVLMEGLCSEQGRRGSTLASSSERKPLENQLGKQEEFRVYGKSENILVLRKDIKDLKAQLQNANKVIQNLKSRVRSLSVTSDYSSSLERPRKLRAVGTLEGSSPHSVPDEDEGWLSDGTGAFYSPGLQAKKDLESLIQRVSQLEAQLPKNGLEEKLAEELRSASWPGKYDSLIQDQARELSYLRQKIREGRGICYLITRHAKDTVKSFEDLLRSNDIDYYLGQSFREQLAQGSQLTERLTSKLSTKDHKSEKDQAGLEPLALRLSRELQEKEKVIEVLQAKLDARSLTPSSSHALSDSHRSPSSTSFLSDELEACSDMDIVSEYTHYEEKKASPSHSDSIHHSSHSAVLSSKPSSTSASQGAKAESNSNPISLPTPQNTPKEANQAHSGFHFHSIPKLASLPQAPLPSAPSSFLPFSPTGPLLLGCCETPVVSLAEAQQELQMLQKQLGESASTVPPASTATLLSNDLEADSSYYLNSAQPHSPPRGTIELGRILEPGYLGSSGKWDVMRPQKGSVSGDLSSGSSVYQLNSKPTGADLLEEHLGEIRNLRQRLEESICINDRLREQLEHRLTSTARGRGSTSNFYSQGLESIPQLCNENRVLREDNRRLQAQLSHVSREHSQETESLREALLSSRSHLQELEKELEHQKVERQQLLEDLREKQQEVLHFREERLSLQENDSRLQHKLVLLQQQCEEKQQLFESLQSELQIYEALYGNSKKGLKAYSLDACHQIPLSSDLSHLVAEVRALRGQLEQSIQGNNCLRLQLQQQLESGAGKASLSPSSINQNFPASTDPGNKQLLLQDSAVSPPVRDVGMNSPALVFPSSASSTPGSETPIINRANGLGLDTSPVMKTPPKLEGDATDGSFANKHGRHVIGHIDDYSALRQQIAEGKLLVKKIVSLVRSACSFPGLEAQGTEVLGSKGIHELRSSTSALHHALEESASLLTMFWRAALPSTHIPVLPGKVGESTERELLELRTKVSKQERLLQSTTEHLKNANQQKESMEQFIVSQLTRTHDVLKKARTNLEEPCKKRSHQKSLKQQERWACPPFVQLPIC

SEQ ID NO: 8610 - protein, 1463 aa, Homo sapiens
MKKKTVCTLNMGDKKYEDMEGEENGDNTISTGLLYSEADRCPICLNCLLEKEVGFPESCNHVFCMTCILKWAETLASCPIDRKPFQAVFKFSALEGYVKVQVKKQLRETKDKKNENSFEKQVSCHENSKSCIRRKAIVREDLLSAKVCDLKWIHRNSLYSETGGKKNAAIKINKPQRSNWSTNQCFRNFFSNMFSSVSHSGESSFTYRAYCTEFIEASEISALIRQKRHELELSWFPDTLPGIGRIGFIPWNVETEVLPLISSVLPRTIFPTSTISFEHFGTSCKGYALAHTQEGEEKKQTSGTSNTRGSRRKPAMTTPTRRSTRNTRAETASQSQRSPISDNSGCDAPGNSNPSLSVPSSAESEKQTRQAPKRKSVRRGRKPPLLKKKLRSSVAAPEKSSSNDSVDEETAESDTSPVLEKEHQPDVDSSNICTVQTHVENQSANCLKSCNEQIEESEKHTANYDTEERVGSSSSESCAQDLPVLVGEEGEVKKLENTGIEANVLCLESEISENILEKGGDPLEKQDQISGLSQSEVKTDVCTVHLPNDFPTCLTSESKVYQPVSCPLSDLSENVESVVNEEKITESSLVEITEHKDFTLKTEELIESPKLESSEGEIIQTVDRQSVKSPEVQLLGHVETEDVEIIATCDTFGNEDFNNIQDSENNLLKNNLLNTKLEKSLEEKNESLTEHPRSTELPKTHIEQIQKHFSEDNNEMIPMECDSFCSDQNESEVEPSVNADLKQMNENSVTHCSENNMPSSDLADEKVETVSQPSESPKDTIDKTKKPRTRRSRFHSPSTTWSPNKDTPQEKKRPQSPSPRRETGKESRKSQSPSPKNESARGRKKSRSQSPKKDIARERRQSQSRSPKRDTTRESRRSESLSPRRETSRENKRSQPRVKDSSPGEKSRSQSRERESDRDGQRRERERRTRKWSRSRSHSRSPSRCRTKSKSSSFGRIDRDSYSPRWKGRWANDGWRCPRGNDRYRKNDPEKQNENTRKEKNDIHLDADDPNSADKHRNDCPNWITEKINSGPDPRTRNPEKLKESHWEENRNENSGNSWNKNFGSGWVSNRGRGRGNRGRGTYRSSFAYKDQNENRWQNRKPLSGNSNSSGSESFKFVEQQSYKRKSEQEFSFDTPADRSGWTSASSWAVRKTLPADVQNYYSRRGRNSSGPQSGWMKQEEETSGQDSSLKDQTNQQVDGSQLPINMMQPQMNVMQQQMNAQHQPMNIFPYPVGVHAPLMNIQRNPFNIHPQLPLHLHTGVPLMQVATPTSVSQGLPPPPPPPPPSQQVNYIASQPDGKQLQGIPSSSHVSNNMSTPVLPAPTAAPGNTGMVQGPSSGNTSSSSHSKASNAAVKLAESKVSVAVEASADSSKTDKKLQIQEKAAQEVKLAIKPFYQNKDITKEEYKEIVRKAVDKVCHSKSGEVNSTKVANLVKAYVDKYKYSRKGSQKKTLEEPVSTEKNIG

SEQ ID NO: 8611 - protein, 188 aa, Homo sapiens
MWFLTTLLLWGWLLLQVSSRVFMEGEPLALRCHAWKDKLVYNVLYYRNGKAFKFFHWNSNLTILKTNISHNGTYHCSGMGKHRYTSAGISQYTVKGLQLPTPVWFHVLFYLAVGIMFLVNTVLWVTIRKELKRKKKWNLEISLDSGHEKKVISSLQEDRHLEEELKCQEQKEEQLQEGVHRKEPQGAT

SEQ ID NO: 8612 - protein, 280 aa, Homo sapiens
MWFLTTLLLWVPVDGQVDTTKAVITLQPPWVSVFQEETITLHCEVLHLPGSSSTQWFLNGTATQTSTPSYRITSASVNDSGEYRCQRGLSGRSDPIQLEIHRGWLLLQVSSRVFMEGEPLALRCHAWKDKLVYNVLYYRNGKAFKFFHWNSNLTILKTNISHNGTYHCSGMGKHRYTSAGISQYTVKGLQLPTPVWFHVLFYLAVGIMFLVNTVLWVTIRKELKRKKKWNLEISLDSGHEKKVISSLQEDRHLEEELKCQEQKEEQLQEGVHRKEPQGAT

SEQ ID NO: 8613 - protein, 5596 aa, Homo sapiens
MEHFLLEVAAAPLRLIAAKNEKSRSELGRFLAKQVWTPQDRQCVLSTLAQLLLDKDCTVLVGRQLRPLLLDLLERNAEAIKAGGQINHDLHERLCVSMSKLIGNHPDVLPFALRYFKDTSPVFQRLFLESSDANPVRYGRRRMKLRDLMEAAFKFLQQEQSVFRELWDWSVCVPLLRSHDTLVRWYTANCLALVTCMNEEHKLSFLKKIFNSDELIHFRLRLLEEAQLQDLEKALVLANPEVSLWRKQKELQYLQGHLVSSDLSPRVTAVCGVVLPGQLPAPGELGGNRSSSREQELALRSYVLVESVCKSLQTLAMAVASQNAVLLEGPIGCGKTSLVEYLAAVTGRTKPPQLLKVQLGDQTDSKMLLGMYRCTDVPGEFVWQPGTLTQAATMGHWILLEDIDYAPLDVVSVLIPLLENGELLIPGRGDCLKVAPGFQFFATRRLLSCGGNWYRPLNSHATLLDKYWTKIHLDNLDKRELNEVLQSRYPSLLAVVDHLLDIYIQLTGEKHHSWSDSSVGCEQAPEEVSEARRENKRPTLEGRELSLRDLLNWCNRIAHSFDSSSLSASLNIFQEALDCFTAMLSEHTSKLKMAEVIGSKLNISRKKAEFFCQLYKPEIVINELDLQVGRVRLLRKQSEAVHLQREKFTFAATRPSSVLIEQLAVCVSKGEPVLLVGETGTGKTSTIQYLAHITGHRLRVVNMNQQSDTADLLGGYKPVDHKLIWLPLREAFEELFAQTFSKKQNFTFLGHIQTCYRQKRWHDLLRLMQHVHKSAVNKDGKDSETGLLIKEKWEAFGLRLNHAQQQMKMTENTLLFAFVEGTLAQAVKKGEWILLDEINLAAPEILECLSGLLEGSSGSLVLLDRGDTEPLVRHPDFRLFACMNPATDVGKRNLPPGIRNRFTELYVEELESKEDLQVLIVDYLKGLSVNKNTVQGIINFYTALRKESGTKLVDGTGHRPHYSLRTLCRALRFAASNPCGNIQRSLYEGFCLGFLTQLDRASHPIVQKLICQHIVPGNVKSLLKQPIPEPKGGRLIQVEGYWIAVGDKEPTIDETYILTSSVKLNLRDIVRVVSAGTYPVLIQGETSVGKTSLIQWLAAATGNHCVRINNHEHTDIQEYIGCYTSDSSGKLVFKEGVLIDAMRKGYWIILDELNLAPTDVLEALNRLLDDNRELLVTETQEVVKAHPRFMLFATQNPPGLYGGRKVLSRAFRNRFVELHFDELPSSELETILHKRCSLPPSYCSKLVKVMLDLQSYRRSSSVFAGKQGFITLRDLFRWAERYRLAEPTEKEYDWLQHLANDGYMLLAGRVRKQEEIDVIQEVLEKHFKKKLCPQSLFSKENVLKLLGKLSTQISTLECNFGHIVWTEGMRRLAMLVGRALEFGEPVLLVGDTGCGKTTICQVFAALANQKLYSVSCHLHMETSDFLGGLRPVRQKPNDKEEIDTSRLFEWHDGPLVQAMKEDGFFLLDEISLADDSVLERLNSVLEVEKSLVLAEKGSPEDKDSEIELLTAGKKFRILATMNPGGDFGKKELSPALRNRFTEIWCPQSTSREDLIQIISHNLRPGLCLGRIDPKGSDIPEVMLDFIDWLTHQEFGRKCVVSIRDILSWVNFMNKMGEEAALKRPEIISTVTSFVHAACLVYIDGIGSGVTSSGFGTALLARKECLKFLIKRLAKIVRLTEYQKNELKIYDRMKAKEFTGIDNLWGIHPFFIPRGPVLHRNNIADYALSAGTTAMNAQRLLRATKLKKPILLEGSPGVGKTSLVGALAKASGNTLVRINLSEQTDITDLFGADLPVEGGKGGEFAWRDGPLLAALKAGHWVVLDELNLASQSVLEGLNACFDHRGEIYVPELGMSFQVQHEKTKIFGCQNPFRQGGGRKGLPRSFLNRFTQVFVDPLTVIDMEFIASTLFPAIEKNIVKKMVAFNNQIDHEVTVEKKWGQKGGPWEFNLRDLFRWCQLMLVDQSPGCYDPGQHVFLVYGERMRTEEDKKKVIAVFKDVFGSNSNPYMGTRLFRITPYDVQLGYSVLSRGSCVPHPSRHPLLLLHQSFQPLESIMKCVQMSWMVILVGPASVGKTSLVQLLAHLTGHTLKIMAMNSAMDTTELLGGFEQVDLIRPWRRLLEKVEGTVRALLRDSLLISADDAEVVLRAWSHFLLTYKPKCLGEGGKAITMEIVNKLEAVLLLMQRLNNKINSYCKAEFAKLVEEFRSFGVKLTQLASGHSHGTFEWVDSMLVQALKSGDWLLMDNVNFCNPSVLDRLNALLEPGGVLTISERGMIDGSTPTITPNPNFRLFLSMDPVHGDISRAMRNRGLEIYISGEGDASTPDNLDLKVLLHSLGLVGNSVCDILLALHTETRSTVVGSPTSSVSTLIQTAILIVQYLQRGLSLDRAFSEACWEVYVCSQHSPANRKLVQALLEKHVSSLRAHETWGDSILGMGLWPDSVPSALFATEDSHLSTVRRDGQILVYCLNRMSMKTSSWTRSQPFTLQDLEKIMQSPSPENLKFNAVEVNTYWIDEPDVLVMAVKLLIERATNQDWMLRVKWLYHLAKNIPQGLESIQIHLEASAASLRNFYSHSLSGAVSNVFKILQPNTTDEFVIPLDPRWNMQALDMIRNLMDFDPQTDQPDQLFALLESAANKTIIYLDREKRVFTEANLVSVGSKKLRESVLRMSFEFHQDPESYHTLPHEIVVNLAAFFELCDALVLLWVQSSQGMVSDASANEILGSLRWRDRFWTVADTVKVDAPGLALLALHWHWVLKHLVHQIPRLLMNYEDKYYKEVQTVSEHIQNCLGSQTGGFAGIKKLQKFLGRPFPFKDKLVVECFSQLKVLNKVLAIREQMSALGESGWQEDINRLQVVASQWTLKKSLLQAWGLILRANILEDVSLDELKNFVHAQCLELKAKGLSLGFLEKKHDEASSLSHPDLTSVIHLTRSVQLWPAMEYLAMLWRYKVTADFMAQACLRRCSKNQQPQINEEISHLISFCLYHTPVTPQELRDLWSLLHHQKVSPEEITSLWSELFNSMFMSFWSSTVTTNPEYWLMWNPLPGMQQREAPKSVLDSTLKGPGNLNRPIFSKCCFEVLTSSWRASPWDVSGLPILSSSHVTLGEWVERTQQLQDISSMLWTNMAISSVAEFRRTDSQLQGQVLFRHLAGLAELLPESRRQEYMQNCEQLLLGSSQAFQHVGQTLGDMAGQEVLPKELLCQLLTSLHHFVGEGESKRSLPEPAQRGSLWVSLGLLQIQTWLPQARFDPAVKREYKLNYVKEELHQLQCEWKTRNLSSQLQTGRDLEDEVVVSYSHPHVRLLRQRMDRLDNLTCHLLKKQAFRPQLPAYESLVQEIHHYVTSIAKAPAVQDLLTRLLQALHIDGPRSAQVAQSLLKEEASWQQSHHQFRKRLSEEYTFYPDAVSPLQASILQLQHGMRLVASELHTSLHSSMVGADRLGTLATALLAFPSVGPTFPTYYAHADTLCSVKSEEVLRGLGKLILKRSGGKELEGKGQKACPTREQLLMNALLYLRSHVLCKGELDQRALQLFRHVCQEIISEWDEQERIAQEKAEQESGLYRYRSRNSRTALSEEEEEEREFRKQFPLHEKDFADILVQPTLEENKGTSDGQEEEAGTNPALLSQNSMQAVMLIHQQLCLNFARSLWYQQTLPPHEAKHYLSLFLSCYQTGASLVTHFYPLMGVELNDRLLGSQLLACTLSHNTLFGEAPSDLMVKPDGPYDFYQHPNVPEARQCQPVLQGFSEAVSHLLQDWPEHPALEQLLVVMDRIRSFPLSSPISKFLNGLEILLAKAQDWEENASRALSLRKHLDLISQMIIRWRKLELNCWSMSLDNTMKRHTEKSTKHWFSIYQMLEKHMQEQTEEQEDDKQMTLMLLVSTLQAFIEGSSLGEFHVRLQMLLVFHCHVLLMPQVEGKDSLCSVLWNLYHYYKQFFDRVQAKIVELRSPLEKELKEFVKISKWNDVSFWSIKQSVEKTHRTLFKFMKKFEAVLSEPCRSSLVESDKEEQPDFLPRPTDGAASELSSIQNLNRALRETLLAQPAAGQATIPEWCQGAAPSGLEGELLRRLPKLRKRMRKMCLTFMKESPLPRLVEGLDQFTGEVISSVSELQSLKVEPSAEKEKQRSEAKHILMQKQRALSDLFKHLAKIGLSYRKGLAWARSKNPQEMLHLHPLDLQSALSIVSSTQEADSRLLTEISSSWDGCQKYFYRSLARHARLNAALATPAKEMGMGNVERCRGFSAHLMKMLVRQRRSLTTLSEQWIILRNLLSCVQEIHSRLMGPQAYPVAFPPQDGVQQWTERLQHLAMQCQILLEQLSWLLQCCPSVGPAPGHGNVQVLGQPPGPCLEGPELSKGQLCGVVLDLIPSNLSYPSPIPGSQLPSGCRMRKQDHLWQQSTTRLTEMLKTIKTVKADVDKIRQQSCETLFHSWKDFEVCSSALSCLSQVSVHLQGLESLFILPGMEVEQRDSQMALVESLEYVRGEISKAMADFTTWKTHLLTSDSQGGNQMLDEGFVEDFSEQMEIAIRAILCAIQNLEERKNEKAEENTDQASPQEDYAGFERLQSGHLTKLLEDDFWADVSTLHVQKIISAISELLERLKSYGEDGTAAKHLFFSQSCSLLVRLVPVLSSYSDLVLFFLTMSLATHRSTAKLLSVLAQVFTELAQKGFCLPKEFMEDSAGEGATEFHDYEGGGIGEGEGMKDVSDQIGNEEQVEDTFQKGQEKDKEDPDSKSDIKGEDNAIEMSEDFDGKMHDGELEEQEEDDEKSDSEGGDLDKHMGDLNGEEADKLDERLWGDDDEEEDEEEEDNKTEETGPGMDEEDSELVAKDDNLDSGNSNKDKSQQDKKEEKEEAEADDGGQGEDKINEQIDERDYDENEVDPYHGNQEKVPEPEALDLPDDLNLDSEDKNGGEDTDNEEGEEENPLEIKEKPEEAGHEAEERGETETDQNESQSPQEPEEGPSEDDKAEGEEEMDTGADDQDGDAAQHPEEHSEEQQQSVEEKDKEADEEGGENGPADQGFQPQEEEEREDSDTEEQVPEALERKEHASCGQTGVENMQNTQAMELAGAAPEKEQGKEEHGSGAADANQAEGHESNFIAQLASQKHTRKNTQSFKRKPGQADNERSMGDHNERVHKRLRTVDTDSHAEQGPAQQPQAQVEDADAFEHIKQGSDAYDAQTYDVASKEQQQSAKDSGKDQEEEEIEDTLMDTEEQEEFKAADVEQLKPEEIKSGTTAPLGFDEMEVEIQTVKTEEDQDPRTDKAHKETENEKPERSRESTIHTAHQFLMDTIFQPFLKDVNELRQELERQLEMWQPRESGNPEEEKVAAEMWQSYLILTAPLSQRLCEELRLILEPTQAAKLKGDYRTGKRLNIRKVIPYIASQFRKDKIWLRRTKPSKRQYQICLAIDDSSSMVDNHTKQLAFESLAVIGNALTLLEVGQIAVCSFGESVKLLHPFHEQFSDYSGSQILRLCKFQQKKTKIAQFLESVANMFAAAQQLSQNISSETAQLLLVVSDGRGLFLEGKERVLAAVQAARNANIFVIFVVLDNPSSRDSILDIKVPIFKGPGEMPEIRSYMEEFPFPYYIILRDVNALPETLSDALRQWFELVTASDHP

SEQ ID NO: 8614 - protein, 596 aa, Homo sapiens
MPQLNGGGGDDLGANDELISFKDEGEQEEKSSENSSAERDLADVKSSLVNESETNQNSSSDSEAERRPPPRSESFRDKSRESLEEAAKRQDGGLFKGPPYPGYPFIMIPDLTSPYLPNGSLSPTARTYLQMKWPLLDVQAGSLQSRQALKDARSPSPAHIVSNKVPVVQHPHHVHPLTPLITYSNEHFTPGNPPPHLPADVDPKTGIPRPPHPPDISPYYPLSPGTVGQIPHPLGWLVPQQGQPVYPITTGGFRHPYPTALTVNASMSRFPPHMVPPHHTLHTTGIPHPAIVTPTVKQESSQSDVGSLHSSKHQDSKKEEEKKKPHIKKPLNAFMLYMKEMRAKVVAECTLKESAAINQILGRRWHALSREEQAKYYELARKERQLHMQLYPGWSARDNYGKKKKRKRDKQPGETNEHSECFLNPCLSLPPITDLSAPKKCRARFGLDQQNNWCGPCRRKKKCVRYIQGEGSCLSPPSSDGSLLDSPPPSPNLLGSPPRDAKSQTEQTQPLSLSLKPDPLAHLSMMPPPPALLLAEATHKASALCPNGALDLPPAALQPAAPSSSIAQPSTSSLHSHSSLAGTQPQPLSLVTKSLE

SEQ ID NO: 8615 - protein, 790 aa, Homo sapiens
MRSVQIFLSQCRLLLLLVPTMLLKSLGEDVIFHPEGEFDSYEVTIPEKLSFRGEVQGVVSPVSYLLQLKGKKHVLHLWPKRLLLPRHLRVFSFTEHGELLEDHPYIPKDCNYMGSVKESLDSKATISTCMGGLRGVFNIDAKHYQIEPLKASPSFEHVVYLLKKEQFGNQVCGLSDDEIEWQMAPYENKARLRDFPGSYKHPKYLELILLFDQSRYRFVNNNLSQVIHDAILLTGIMDTYFQDVRMRIHLKALEVWTDFNKIRVGYPELAEVLGRFVIYKKSVLNARLSSDWAHLYLQRKYNDALAWSFGKVCSLEYAGSVSTLLDTNILAPATWSAHELGHAVGMSHDEQYCQCRGRLNCIMGSGRTGFSNCSYISFFKHISSGATCLNNIPGLGYVLKRCGNKIVEDNEECDCGSTEECQKDRCCQSNCKLQPGANCSIGLCCHDCRFRPSGYVCRQEGNECDLAEYCDGNSSSCPNDVYKQDGTPCKYEGRCFRKGCRSRYMQCQSIFGPDAMEAPSECYDAVNLIGDQFGNCEITGIRNFKKCESANSICGRLQCINVETIPDLPEHTTIISTHLQAENLMCWGTGYHLSMKPMGIPDLGMINDGTSCGEGRVCFKKNCVNSSVLQFDCLPEKCNTRGVCNNRKNCHCMYGWAPPFCEEVGYGGSIDSGPPGLLRGAIPSSIWVVSIIMFRLILLILSVVFVFFRQVIGNHLKPKQEKMPLSKAKTEQEESKTKTVQEESKTKTGQEESEAKTGQEESKAKTGQEESKANIESKRPKAKSVKKQKK

SEQ ID NO: 8616 - protein, 134 aa, Homo sapiens
MASRSMRLLLLLSCLAKTGVLGDIIMRPSCAPGWFYHKSNCYGYFRKLRNWSDAEVRNLLPAWPGLSRAKDQPEPQISFDSGSSVLPGHYEEKPLWLVKWREEGCVFNSFNSVSIAEAGAVCQTLDGLQAHTDT

SEQ ID NO: 8617 - protein, 413 aa, Homo sapiens
MGTFCSVIKFENLQELKRLCHWGPIIALGVIAICSTMAMIDSVLWYWPLHTTGGSVNFIMLINWTVMILYNYFNAMFVGPGFVPLGWKPEISQDTMYLQYCKVCQAYKAPRSHHCRKCNRCVMKMDHHCPWINNCCGYQNHASFTLFLLLAPLGCIHAAFIFVMTMYTQLYHRLSFGWNTVKIDMSAARRDPLPIVPFGLAAFATTLFALGLALGTTIAVGMLFFIQMKIILRNKTSIESWIEEKAKDRIQYYQLDEVFVFPYDMGSRWRNFKQVFTWSGVPEGDGLEWPVREGCHQYSLTIEQLKQKADKRVRSVRYKVIEDYSGACCPLNKGIKTFFTSPCTEEPRIQLQKGEFILATRGLRYWLYGDKILDDSFIEGVSRIRGWFPRKCVEKCPCDAETDQAPEGEKKNR

SEQ ID NO: 8618 - protein, 508 aa, Homo sapiens
MQRLLTPVKRILQLTRAVQETSLTPARLLPVAHQRFSTASAVPLAKTDTWPKDVGILALEVYFPAQYVDQTDLEKYNNVEAGKYTVGLGQTRMGFCSVQEDINSLCLTVVQRLMERIQLPWDSVGRLEVGTETIIDKSKAVKTVLMELFQDSGNTDIEGIDTTNACYGGTASLFNAANWMESSSWDGRYAMVVCGDIAVYPSGNARPTGGAGAVAMLIGPKAPLALERGLRGTHMENVYDFYKPNLASEYPIVDGKLSIQCYLRALDRCYTSYRKKIQNQWKQAGSDRPFTLDDLQYMIFHTPFCKMVQKSLARLMFNDFLSASSDTQTSLYKGLEAFGGLKLEDTYTNKDLDKALLKASQDMFDKKTKASLYLSTHNGNMYTSSLYGCLASLLSHHSAQELAGSRIGAFSYGSGLAASFFSFRVSQDAAPGSPLDKLVSSTSDLPKRLASRKCVSPEEFTEIMNQREQFYHKVNFSPPGDTNSLFPGTWYLERVDEQHRRKYARRPV

SEQ ID NO: 8619 - protein, 329 aa, Homo sapiens
MVTKAFVLLAIFAEASAKSCAPNKADVILVFCYPKTIITKIPECPYGWEVHQLALGGLCYNGVHEGGYYQFVIPDLSPKNKSYCGTQSEYKPPIYHFYSHIVSNDTTVIVKNQPVNYSFSCTYHSTYLVNQAAFDQRVATVHVKNGSMGTFESQLSLNFYTNAKFSIKKEAPFVLEASEIGSDLFAGVEAKGLSIRFKVVLNSCWATPSADFMYPLQWQLINKGCPTDETVLVHENGRDHRATFQFNAFRFQNIPKLSKVWLHCETFICDSEKLSCPVTCDKRKRLLRDQTGGVLVVELSLRSRGFSSLYSFSDVLHHLIMMLGICAVL

SEQ ID NO: 8620 - protein, 220 aa, Homo sapiens
MALHSMRKARERWSFIRALHKGSAAAPALQKDSKKRVFSGIQPTGILHLGNYLGAIESWVRLQDEYDSVLYSIVDLHSITVPQDPAVLRQSILDMTAVLLACGINPEKSILFQQSQVSEHTQLSWILSCMVRLPRLQHLHQWKAKTTKQKHDGTVGLLTYPVLQAADILLYKSTHVPVGEDQVQHMELVQDLAQGFNKKYGEFFPVPESILSMCVLVFLT

SEQ ID NO: 8621 - protein, 602 aa, Homo sapiens
MSERRRSAVALSSRAHAFSVEALIGSNKKRKLRDWEEKGLDLSMEALSPAGPLGDTEDAAAHGLEPHPDSEQSTGSDSEVLTERTSCSFSTHTDLASGAAGPVPAAMSSMEEIQVELQCADLWKRFHDIGTEMIITKAGRRMFPAMRVKITGLDPHQQYYIAMDIVPVDNKRYRYVYHSSKWMVAGNADSPVPPRVYIHPDSLASGDTWMRQVVSFDKLKLTNNELDDQGHIILHSMHKYQPRVHVIRKDFSSDLSPTKPVPVGDGVKTFNFPETVFTTVTAYQNQQITRLKIDRNPFAKGFRDSGRNRTGLEAIMETYAFWRPPVRTLTFEDFTTMQKQQGGSTGTSPTTSSTGTPSPSASSHLLSPSCSPPTFHLAPNTFNVGCRESQLCNLNLSDYPPCARSNMAALQSYPGLSDSGYNRLQSGTTSATQPSETFMPQRTPSLISGIPTPPSLPGNSKMEAYGGQLGSFPTSQFQYVMQAGNAASSSSSPHMFGGSHMQQSSYNAFSLHNPYNLYGYNFPTSPRLAASPEKLSASQSTLLCSSPSNGAFGERQYLPSGMEHSMHMISPSPNNQQATNTCDGRQYGAVPGSSSQMSVHMV

SEQ ID NO: 8622 - protein, 376 aa, Homo sapiens
MWYHRLSHLHSRLQDLLKGGVIYPALPQPNFKSLLPLAVHWHHTASKSLTCAWQQHEDHFELKYANTVMRFDYVWLRDHCRSASCYNSKTHQRSLDTASVDLCIKPKTIRLDETTLFFTWPDGHVTKYDLNWLVKNSYEGQKQKVIQPRILWNAEIYQQAQVPSVDCQSFLETNEGLKKFLQNFLLYGIAFVENVPPTQEHTEKLAERISLIRETIYGRMWYFTSDFSRGDTAYTKLALDRHTDTTYFQEPCGIQVFHCLKHEGTGGRTLLVDGFYAAEQVLQKAPEEFELLSKVPLKHEYIEDVGECHNHMIGIGPVLNIYPWNKELYLIRLFKEKQNTVNRQWNSSLQCDIPERILTYRHFVSGTSIEHRGSLI

SEQ ID NO: 8623 - protein, 497 aa, Homo sapiens
MDPLGAPSQFVDVDTLPSWGDSCQDELNSSDTTAEIFQEDTVRSPFLYNKDVNGKVVLWKGDVALLNCTAIVNTSNESLTDKNPVSESIFMLAGPDLKEDLQKLKGCRTGEAKLTKGFNLAARFIIHTVGPKYKSRYRTAAESSLYSCYRNVLQLAKEQSMSSVGFCVINSAKRGYPLEDATHIALRTVRRFLEIHGETIEKVVFAVSDLEEGTYQKLLPLYFPRSLKEENRSLPYLPADIGNAEGEPVVPERQIRISEKPGAPEDNQEEEDEGLGVDLSFIGSHAFARMEGDIDKQRKLILQGQLSEAALQKQHQRNYNRWLCQARSEDLSDIASLKALYQTGVDNCGRTVMVVVGRNIPVTLIDMDKALLYFIHVMDHIAVKEYVLVYFHTLTSEYNHLDSDFLKKLYDVVDVKYKRNLKAVYFVHPTFRSKVSTWFFTTFSVSGLKDKIHHVDSLHQLFSAISPEQIDFPPFVLEYDARENGPYYTSYPPSPDL

SEQ ID NO: 8624 - protein, 582 aa, Homo sapiens
MSSSLGKEKDSKEKDPKVPSAKEREKEAKASGGFGKESKEKEPKTKGKDAKDGKKDSSAAQPGVAFSVDNTIKRPNPAPGTRKKSSNAEVIKELNKCREENSMRLDLSKRSIHILPSSIKELTQLTELYLYSNKLQSLPAEVGCLVNLMTLALSENSLTSLPDSLDNLKKLRMLDLRHNKLREIPSVVYRLDSLTTLYLRFNRITTVEKDIKNLSKLSMLSIRENKIKQLPAEIGELCNLITLDVAHNQLEHLPKEIGNCTQITNLDLQHNELLDLPDTIGNLSSLSRLGLRYNRLSAIPRSLAKCSALEELNLENNNISTLPESLLSSLVKLNSLTLARNCFQLYPVGGPSQFSTIYSLNMEHNRINKIPFGIFSRAKVLSKLNMKDNQLTSLPLDFGTWTSMVELNLATNQLTKIPEDVSGLVSLEVLILSNNLLKKLPHGLGNLRKLRELDLEENKLESLPNEIAYLKDLQKLVLTNNQLTTLPRGIGHLTNLTHLGLGENLLTHLPEEIGTLENLEELYLNDNPNLHSLPFELALCSKLSIMSIENCPLSHLPPQIVAGGPSFIIQFLKMQGPYRAMV

SEQ ID NO: 8625 - protein, 1162 aa, Homo sapiens
MEEVRCPEHGTFCFLKTGVRDGPNKGKSFYVCRADTCSFVRATDIPVSHCLLHEDFVVELQGLLLPQDKKEYRLFFRCIRSKAEGKRWCGSIPWQDPDSKEHSVSNKSQHASETFHHSSNWLRNPFKVLDKNQEPALWKQLIKGEGEEKKADKKQREKGDQLFDQKKEQKPEMMEKDLSSGLVPKKKQSVVQEKKQEEGAEIQCEAETGGTHKRDFSEIKSQQCQGNELTRPSASSQEKSSGKSQDVQRESEPLREKVTQLLPQNVHSHNSISKPQKGGPLNKEYTNWEAKETKAKDGPSIQATQKSLPQGHFQERPETHSVPAPGGPAAQAAPAAPGLSLGEGREAATSSDDEEEDDVVFVSSKPGSPLLFDSTLDLETKENLQFPDRSVQRKVSPASGVSKKVEPSDPVARRVYLTTQLKQKKSTLASVNIQALPDKGQKLIKQIQELEEVLSGLTLSPEQGTNEKSNSQVPQQSHFTKTTTGPPHLVPPQPLPRRGTQPVGSLELKSACQVTAGGSSQCYRGHTNQDHVHAVWKITSEAIGQLHRSLESCPGETVVAEDPAGLKVPLLLHQKQALAWLLWRESQKPQGGILADDMGLGKTLTMIALILTQKNQEKKEEKEKSTALTWLSKDDSCDFTSHGTLIICPASLIHHWKNEVEKRVNSNKLRVYLYHGPNRDSRARVLSTYDIVITTYSLVAKEIPTNKQEAEIPGANLNVEGTSTPLLRIAWARIILDEAHNVKNPRVQTSIAVCKLQACARWAVTGTPIQNNLLDMYSLLKFLRCSPFDEFNLWRSQVDNGSKKGGERLSILTKSLLLRRTKDQLDSTGRPLVILPQRKFQLHHLKLSEDEETVYNVFFARSRSALQSYLKRHESRGNQSGRSPNNPFSRVALEFGSEEPRHSEAADSPRSSTVHILSQLLRLRQCCCHLSLLKSALDPMELKGEGLVLSLEEQLSALTLSELRDSEPSSTVSLNGTFFKMELFEGMRESTKISSLLAELEAIQRNSASQKSVIVSQWTNMLKVVALHLKKHGLTYATIDGSVNPKQRMDLVEAFNHSRGPQVMLISLLAGGVGLNLTGGNHLFLLDMHWNPSLEDQACDRIYRVGQQKDVVIHRFVCEGTVEEKILQLQEKKKDLAKQVLSGSGESVTKLTLADLRVLFGI

SEQ ID NO: 8626 - protein, 133 aa, Homo sapiens
MSFPCKFVASFLLIFNVSSKGAVSKEITNALETWGALGQDINLDIPSFQMSDDIDDIKWEKTSDKKKIAQFRKEKETFKEKDTYKLFKNGTLKIKHLKTDDQDIYKVSIYDTKGKNVLEKIFDLKIQGKCSFP

SEQ ID NO: 8627 - protein, 351 aa, Homo sapiens
MSFPCKFVASFLLIFNVSSKGAVSKEITNALETWGALGQDINLDIPSFQMSDDIDDIKWEKTSDKKKIAQFRKEKETFKEKDTYKLFKNGTLKIKHLKTDDQDIYKVSIYDTKGKNVLEKIFDLKIQERVSKPKISWTCINTTLTCEVMNGTDPELNLYQDGKHLKLSQRVITHKWTTSLSAKFKCTAGNKVSKESSVEPVSCPEKGLDIYLIIGICGGGSLLMVFVALLVFYITKRKKQRSRRNDEELETRAHRVATEERGRKPHQIPASTPQNPATSQHPPPPPGHRSQAPSHRPPPPGHRVQHQPQKRPPAPSGTQVHQQKGPPLPRPRVQPKPPHGAAENSLSPSSN

SEQ ID NO: 8628 - protein, 597 aa, Homo sapiens
MAHNKIPPRWLNCPRRGQPVAGRFLPLKTMLGPRYDSQVAEENRFHPSMLSNYLKSLKVKMGLLVDLTNTSRFYDRNDIEKEGIKYIKLQCKGHGECPTTENTETFIRLCERFNERNPPELIGVHCTHGFNRTGFLICAFLVEKMDWSIEAAVATFAQARPPGIYKGDYLKELFRRYGDIEEAPPPPLLPDWCFEDDEDEDEDEDGKKESEPGSSASFGKRRKERLKLGAIFLEGVTVKGVTQVTTQPKLGEVQQKCHQFCGWEGSGFPGAQPVSMDKQNIKLLDLKPYKVSWKADGTRYMMLIDGTNEVFMIDRDNSVFHVSNLEFPFRKDLRMHLSNTLLDGEMIIDRVNGQAVPRYLIYDIIKFNSQPVGDCDFNVRLQCIEREIISPRHEKMKTGLIDKTQEPFSVRNKPFFDICTSRKLLEGNFAKEVSHEMDGLIFQPTGKYKPGRCDDILKWKPPSLNSVDFRLKITRMGGEGLLPQNVGLLYVGGYERPFAQIKVTKELKQYDNKIIECKFENNSWVFMRQRTDKSFPNAYNTAMAVCNSISNPVTKEMLFEFIDRCTAASQGQKRKHHLDPDTELMPPPPPKRPRPLT

SEQ ID NO: 8629 - protein, 1194 aa, Homo sapiens
MKCFFPVLSCLAVLGVVSAQRQVTVQEGPLYRTEGSHITIWCNVSGYQGPSEQNFQWSIYLPSSPEREVQIVSTMDSSFPYAIYTQRVRGGKIFIERVQGNSTLLHITDLQARDAGEYECHTPSTDKQYFGSYSAKMNLVVIPDSLQTTAMPQTLHRVEQDPLELTCEVASETIQHSHLSVAWLRQKVGEKPVEVISLSRDFMLHSSSEYAQRQSLGEVRLDKLGRTTFRLTIFHLQPSDQGEFYCEAAEWIQDPDGSWYAMTRKRSEGAVVNVQPTDKEFTVRLETEKRLHTVGEPVEFRCILEAQNVPDRYFAVSWAFNSSLIATMGPNAVPVLNSEFAHREARGQLKVAKESDSVFVLKIYHLRQEDSGKYNCRVTEREKTVTGEFIDKESKRPKNIPIIVLPLKSSISVEVASNASVILEGEDLRFSCSVRTAGRPQGRFSVIWQLVDRQNRRSNIMWLDRDGTVQPGSSYWERSSFGGVQMEQVQPNSFSLGIFNSRKEDEGQYECHVTEWVRAVDGEWQIVGERRASTPISITALEMGFAVTAISRTPGVTYSDSFDLQCIIKPHYPAWVPVSVTWRFQPVGTVEFHDLVTFTRDGGVQWGDRSSSFRTRTAIEKAESSNNVRLSISRASDTEAGKYQCVAELWRKNYNNTWTRLAERTSNLLEIRVLQPVTKLQVSKSKRTLTLVENKPIQLNCSVKSQTSQNSHFAVLWYVHKPSDADGKLILKTTHNSAFEYGTYAEEEGLRARLQFERHVSGGLFSLTVQRAEVSDSGSYYCHVEEWLLSPNYAWYKLAEEVSGRTEVTVKQPDSRLRLSQAQGNLSVLETRQVQLECVVLNRTSITSQLMVEWFVWKPNHPERETVARLSRDATFHYGEQAAKNNLKGRLHLESPSPGVYRLFIQNVAVQDSGTYSCHVEEWLPSPSGMWYKRAEDTAGQTALTVMRPDASLQVDTVVPNATVSEKAAFQLDCSIVSRSSQDSRFAVAWYSLRTKAGGKRSSPGLEEQEEEREEEEEEDDDDDDDPTERTALLSVGPDAVFGPEGSPWEGRLRFQRLSPVLYRLTVLQASPQDTGNYSCHVEEWLPSPQKEWYRLTEEESAPIGIRVLDTSPTLQSIICSNDALFYFVFFYPFPIFGILIITILLVRFKSRNSSKNSDGKNGVPLLWIKEPHLNYSPTCLEPPVLSIHPGAID

SEQ ID NO: 8630 - protein, 240 aa, Homo sapiens
MVAGSDAGRALGVLSVVCLLHCFGFISCFSQQIYGVVYGNVTFHVPSNVPLKEVLWKKQKDKVAELENSEFRAFSSFKNRVYLDTVSGSLTIYNLTSSDEDEYEMESPNITDTMKFFLYVLESLPSPTLTCALTNGSIEVQCMIPEHYNSHRGLIMYSWDCPMEQCKRNSTSIYFKMENDLPQKIQCTLSNPLFNTTSSIILTTCIPSSGHSRHRYALIPIPLAVITTCIVLYMNGMYAF

SEQ ID NO: 8631 - protein, 250 aa, Homo sapiens
MVAGSDAGRALGVLSVVCLLHCFGFISCFSQQIYGVVYGNVTFHVPSNVPLKEVLWKKQKDKVAELENSEFRAFSSFKNRVYLDTVSGSLTIYNLTSSDEDEYEMESPNITDTMKFFLYVLESLPSPTLTCALTNGSIEVQCMIPEHYNSHRGLIMYSWDCPMEQCKRNSTSIYFKMENDLPQKIQCTLSNPLFNTTSSIILTTCIPSSGHSRHRYALIPIPLAVITTCIVLYMNGILKCDRKPDRTNSN

SEQ ID NO: 8632 - protein, 472 aa, Homo sapiens
MKSILDGLADTTFRTITTDLLYVGSNDIQYEDIKGDMASKLGYFPQKFPLTSFRGSPFQEKMTAGDNPQLVPADQVNITEFYNKSLSSFKENEENIQCGENFMDIECFMVLNPSQQLAIAVLSLTLGTFTVLENLLVLCVILHSRSLRCRPSYHFIGSLAVADLLGSVIFVYSFIDFHVFHRKDSRNVFLFKLGGVTASFTASVGSLFLTAIDRYISIHRPLAYKRIVTRPKAVVAFCLMWTIAIVIAVLPLLGWNCEKLQSVCSDIFPHIDETYLMFWIGVTSVLLLFIVYAYMYILWKAHSHAVRMIQRGTQKSIIIHTSEDGKVQVTRPDQARMDIRLAKTLVLILVVLIICWGPLLAIMVYDVFGKMNKLIKTVFAFCSMLCLLNSTVNPIIYALRSKDLRHAFRSMFPSCEGTAQPLDNSMGDSDCLHKHANNAASVHRAAESCIKSTVKIAKVTMSVSTDTSAEAL

SEQ ID NO: 8633 - protein, 547 aa, Homo sapiens
MEVEEAFQAVGEMGIYQMYLCFLLAVLLQLYVATEAILIALVGATPSYHWDLAELLPNQSHGNQSAGEDQAFGDWLLTANGSEIHKHVHFSSSFTSIASEWFLIANRSYKVSAASSFFFSGVFVGVISFGQLSDRFGRKKVYLTGFALDILFAIANGFSPSYEFFAVTRFLVGMMNGGMSLVAFVLLNECVGTAYWALAGSIGGLFFAVGIAQYALLGYFIRSWRTLAILVNLQGTVVFLLSLFIPESPRWLYSQGRLSEAEEALYLIAKRNRKLKCTFSLTHPANRSCRETGSFLDLFRYRVLLGHTLILMFIWFVCSLVYYGLTLSAGDLGGSIYANLALSGLIEIPSYPLCIYLINQKWFGRKRTLSAFLCLGGLACLIVMFLPEKKDTGVFAVVNSHSLSLLGKLTISAAFNIVYIYTSELYPTVIRNVGLGTCSMFSRVGGIIAPFIPSLKYVQWSLPFIVFGATGLTSGLLSLLLPETLNSPLLETFSDLQVYSYRRLGEEALSLQALDPQQCVDKESSLGSESEEEEEFYDADEETQMIK

SEQ ID NO: 8634 - protein, 241 aa, Homo sapiens
MSMLFYTLITAFLIGIQAEPHSESNVPAGHTIPQAHWTKLQHSLDTALRRARSAPAAAIAARVAGQTRNITVDPRLFKKRRLRSPRVLFSTQPPREAADTQDLDFEVGGAAPFNRTHRSKRSSSHPIFHRGEFSVCDSVSVWVGDKTTATDIKGKEVMVLGEVNINNSVFKQYFFETKCRDPNPVDSGCRGIDSKHWNSYCTTTHTFVKALTMDGKQAAWRFIRIDTACVCVLSRKAVRRA

SEQ ID NO: 8635 - protein, 211 aa, Homo sapiens
MSCTIEKILTDAKTLLERLREHDAAAESLVDQSAALHRRVAAMREAGTALPDQVRQRYQEDASDMKDMSKYKPHILLSQENTQIRDLQQENRELWISLEEHQDALELIMSKYRKQMLQLMVAKKAVDAEPVLKAHQSHSAEIESQIDRICEMGEVMRKAVQVDDDQFCKIQEKLAQLELENKELRELLSISSESLQARKENSMDTASQAIK

SEQ ID NO: 8636 - protein, 466 aa, Homo sapiens
MTLKASEGESGGSMHTALSDLYLEHLLQKRSRPEAVSHPLNTVTEDMYTNGSPAPGSPAQVKGQEVRKVRLIQFEKVTEEPMGITLKLNEKQSCTVARILHGGMIHRQGSLHVGDEILEINGTNVTNHSVDQLQKAMKETKGMISLKVIPNQQSRLPALQMFMRAQFDYDPKKDNLIPCKEAGLKFATGDIIQIINKDDSNWWQGRVEGSSKESAGLIPSPELQEWRVASMAQSAPSEAPSCSPFGKKKKYKDKYLAKHSSIFDQLDVVSYEEVVRLPAFKRKTLVLIGASGVGRSHIKNALLSQNPEKFVYPVPYTTRPPRKSEEDGKEYHFISTEEMTRNISANEFLEFGSYQGNMFGTKFETVHQIHKQNKIAILDIEPQTLKIVRTAELSPFIVFIAPTDQGTQTEALQQLQKDSEAIRSQYAHYFDLSLVNNGVDETLKKLQEAFDQACSSPQWVPVSWVY

SEQ ID NO: 8637 - protein, 189 aa, Homo sapiens
MTEYKLVVVGAGGVGKSALTIQLIQNHFVDEYDPTIEDSYRKQVVIDGETCLLDILDTAGQEEYSAMRDQYMRTGEGFLCVFAINNSKSFADINLYREQIKRVKDSDDVPMVLVGNKCDLPTRTVDTKQAHELAKSYGIPFIETSAKTRQGVEDAFYTLVREIRQYRMKKLNSSDDGTQGCMGLPCVVM

SEQ ID NO: 8638 - protein, 578 aa, Homo sapiens
MACGFRRAIACQLSRVLNLPPENLITSISAVPISQKEEVADFQLSVDSLLEKDNDHSRPDIQVQAKRLAEKLRCDTVVSEISTGQRTVNFKINRELLTKTVLQQVIEDGSKYGLKSELFSGLPQKKIVVEFSSPNVAKKFHVGHLRSTIIGNFIANLKEALGHQVIRINYLGDWGMQFGLLGTGFQLFGYEEKLQSNPLQHLFEVYVQVNKEAADDKSVAKAAQEFFQRLELGDVQALSLWQKFRDLSIEEYIRVYKRLGVYFDEYSGESFYREKSQEVLKLLESKGLLLKTIKGTAVVDLSGNGDPSSICTVMRSDGTSLYATRDLAAAIDRMDKYNFDTMIYVTDKGQKKHFQQVFQMLKIMGYDWAERCQHVPFGVVQGMKTRRGDVTFLEDVLNEIQLRMLQNMASIKTTKELKNPQETAERVGLAALIIQDFKGLLLSDYKFSWDRVFQSRGDTGVFLQYTHARLHSLEETFGCGYLNDFNTACLQEPQSVSILQHLLRFDEVLYKSSQDFQPRHIVSYLLTLSHLAAVAHKTLQIKDSPPEVAGARLHLFKAVRSVLANGMKLLGITPVCRM

SEQ ID NO: 8639 - protein, 225 aa, Homo sapiens
MAGTGLVAGEVVVDALPYFDQGYEAPGVREAAAALVEEETRRYRPTKNYLSYLTAPDYSAFETDIMRNEFERLAARQPIELLSMKRYELPAPSSGQKNDITAWQECVNNSMAQLEHQAVRIENLELMSQHGCNAWKVYNENLVHMIEHAQKELQKLRKHIQDLNWQRKNMQLTAGSKLREMESNWVSLVSKNYEIERTIVQLENEIYQIKQQHGEANKENIRQDF

SEQ ID NO: 8640 - protein, 1110 aa, Homo sapiens
MAENKGGGEAESGGGGSGSAPVTAGAAGPAAQEAEPPLTAVLVEEEEEEGGRAGAEGGAAGPDDGGVAAASSGSAQAASSPAASVGTGVAGGAVSTPAPAPASAPAPGPSAGPPPGPPASLLDTCAVCQQSLQSRREAEPKLLPCLHSFCLRCLPEPERQLSVPIPGGSNGDIQQVGVIRCPVCRQECRQIDLVDNYFVKDTSEAPSSSDEKSEQVCTSCEDNASAVGFCVECGEWLCKTCIEAHQRVKFTKDHLIRKKEDVSESVGASGQRPVFCPVHKQEQLKLFCETCDRLTCRDCQLLEHKEHRYQFLEEAFQNQKGAIENLLAKLLEKKNYVHFAATQVQNRIKEVNETNKRVEQEIKVAIFTLINEINKKGKSLLQQLENVTKERQMKLLQQQNDITGLSRQVKHVMNFTNWAIASGSSTALLYSKRLITFQLRHILKARCDPVPAANGAIRFHCDPTFWAKNVVNLGNLVIESKPAPGYTPNVVVGQVPPGTNHISKTPGQINLAQLRLQHMQQQVYAQKHQQLQQMRMQQPPAPVPTTTTTTQQHPRQAAPQMLQQQPPRLISVQTMQRGNMNCGAFQAHQMRLAQNAARIPGIPRHSGPQYSMMQPHLQRQHSNPGHAGPFPVVSVHNTTINPTSPTTATMANANRGPTSPSVTAIELIPSVTNPENLPSLPDIPPIQLEDAGSSSLDNLLSRYISGSHLPPQPTSTMNPSPGPSALSPGSSGLSNSHTPVRPPSTSSTGSRGSCGSSGRTAEKTSLSFKSDQVKVKQEPGTEDEICSFSGGVKQEKTEDGRRSACMLSSPESSLTPPLSTNLHLESELDALASLENHVKIEPADMNESCKQSGLSSLVNGKSPIRSLMHRSARIGGDGNNKDDDPNEDWCAVCQNGGDLLCCEKCPKVFHLTCHVPTLLSFPSGDWICTFCRDIGKPEVEYDCDNLQHSKKGKTAQGLSPVDQRKCERLLLYLYCHELSIEFQEPVPASIPNYYKIIKKPMDLSTVKKKLQKKHSQHYQIPDDFVADVRLIFKNCERFNEADSEVAQAGKAVALYFEDKLTEIYSDRTFAPLPEFEQEEDDGEVTEDSDEDFIQPRRKRLKSDERPVHIK

SEQ ID NO: 8641 - protein, 514 aa, Homo sapiens
MADAEVIILPKKHKKKKERKSLPEEDVAEIQHAEEFLIKPESKVAKLDTSQWPLLLKNFDKLNVRTTHYTPLACGSNPLKREIGDYIRTGFINLDKPSNPSSHEVVAWIRRILRVEKTGHSGTLDPKVTGCLIVCIERATRLVKSQQSAGKEYVGIVRLHNAIEGGTQLSRALETLTGALFQRPPLIAAVKRQLRVRTIYESKMIEYDPERRLGIFWVSCEAGTYIRTLCVHLGLLLGVGGQMQELRRVRSGVMSEKDHMVTMHDVLDAQWLYDNHKDESYLRRVVYPLEKLLTSHKRLVMKDSAVNAICYGAKIMLPGVLRYEDGIEVNQEIVVITTKGEAICMAIALMTTAVISTCDHGIVAKIKRVIMERDTYPRKWGLGPKASQKKLMIKQGLLDKHGKPTDSTPATWKQEYVDYSESAKKEVVAEVVKAPQVVAEAAKTAKRKRESESESDETPPAAPQLIKKEKKKSKKDKKAKAGLESGAEPGDGDSDTTKKKKKKKKAKEVELVSE

SEQ ID NO: 8642 - protein, 337 aa, Homo sapiens
MAAPRDNVTLLFKLYCLAVMTLMAAVYTIALRYTRTSDKELYFSTTAVCITEVIKLLLSVGILAKETGSLGRFKASLRENVLGSPKELLKLSVPSLVYAVQNNMAFLALSNLDAAVYQVTYQLKIPCTALCTVLMLNRTLSKLQWVSVFMLCAGVTLVQWKPAQATKVVVEQNPLLGFGAIAIAVLCSGFAGVYFEKVLKSSDTSLWVRNIQMYLSGIIVTLAGVYLSDGAEIKEKGFFYGYTYYVWFVIFLASVGGLYTSVVVKYTDNIMKGFSAAAAIVLSTIASVMLFGLQITLTFALGTLLVCVSIYLYGLPRQDTTSIQQGETASKERVIGV

SEQ ID NO: 8643 - protein, 1210 aa, Homo sapiens
MASQLQVFSPPSVSSSAFCSAKKLKIEPSGWDVSGQSSNDKYYTHSKTLPATQGQANSSHQVANFNIPAYDQGLLLPAPAVEHIVVTAADSSGSAATSTFQSSQTLTHRSNVSLLEPYQKCGLKRKSEEVDSNGSVQIIEEHPPLMLQNRTVVGAAATTTTVTTKSSSSSGEGDYQLVQHEILCSMTNSYEVLEFLGRGTFGQVAKCWKRSTKEIVAIKILKNHPSYARQGQIEVSILSRLSSENADEYNFVRSYECFQHKNHTCLVFEMLEQNLYDFLKQNKFSPLPLKYIRPILQQVATALMKLKSLGLIHADLKPENIMLVDPVRQPYRVKVIDFGSASHVSKAVCSTYLQSRYYRAPEIILGLPFCEAIDMWSLGCVIAELFLGWPLYPGASEYDQIRYISQTQGLPAEYLLSAGTKTTRFFNRDPNLGYPLWRLKTPEEHELETGIKSKEARKYIFNCLDDMAQVNMSTDLEGTDMLAEKADRREYIDLLKKMLTIDADKRITPLKTLNHQFVTMTHLLDFPHSNHVKSCFQNMEICKRRVHMYDTVSQIKSPFTTHVAPNTSTNLTMSFSNQLNTVHNQASVLASSSTAAAATLSLANSDVSLLNYQSALYPSSAAPVPGVAQQGVSLQPGTTQICTQTDPFQQTFIVCPPAFQTGLQATTKHSGFPVRMDNAVPIVPQAPAAQPLQIQSGVLTQGSCTPLMVATLHPQVATITPQYAVPFTLSCAAGRPALVEQTAAVLQAWPGGTQQILLPSTWQQLPGVALHNSVQPTAMIPEAMGSGQQLADWRNAHSHGNQYSTIMQQPSLLTNHVTLATAQPLNVGVAHVVRQQQSSSLPSKKNKQSAPVSSKSSLDVLPSQVYSLVGSSPLRTTSSYNSLVPVQDQHQPIIIPDTPSPPVSVITIRSDTDEEEDNKYKPSSSGLKPRSNVISYVTVNDSPDSDSSLSSPYSTDTLSALRGNSGSVLEGPGRVVADGTGTRTIIVPPLKTQLGDCTVATQASGLLSNKTKPVASVSGQSSGCCITPTGYRAQRGGTSAAQPLNLSQNQQSSAAPTSQERSSNPAPRRQQAFVAPLSQAPYTFQHGSPLHSTGHPHLAPAPAHLPSQAHLYTYAAPTSAAALGSTSSIAHLFSPQGSSRHAAAYTTHPSTLVHQVPVSVGPSLLTSASVAPAQYQHQFATQSYIGSSRGSTIYTGYPLSPTKISQYSYL

SEQ ID NO: 8644 - protein, 1075 aa, Homo sapiens
MASQLQVFSPPSVSSSAFCSAKKLKIEPSGWDVSGQSSNDKYYTHSKTLPATQGQANSSHQVANFNIPAYDQGLLLPAPAVEHIVVTAADSSGSAATSTFQSSQTLTHRSNVSLLEPYQKCGLKRKSEEVDSNGSVQIIEEHPPLMLQNRTVVGAAATTTTVTTKSSSSSGEGDYQLVQHEILCSMTNSYEVLEFLGRGTFGQVAKCWKRSTKEIVAIKILKNHPSYARQGQIEVSILSRLSSENADEYNFVRSYECFQHKNHTCLVFEMLEQNLYDFLKQNKFSPLPLKYIRPILQQVATALMKLKSLGLIHADLKPENIMLVDPVRQPYRVKVIDFGSASHVSKAVCSTYLQSRYYRAPEIILGLPFCEAIDMWSLGCVIAELFLGWPLYPGASEYDQIRYISQTQGLPAEYLLSAGTKTTRFFNRDPNLGYPLWRLKTPEEHELETGIKSKEARKYIFNCLDDMAQVNMSTDLEGTDMLAEKADRREYIDLLKKMLTIDADKRITPLKTLNHQFVTMTHLLDFPHSNHVKSCFQNMEICKRRVHMYDTVSQIKSPFTTHVAPNTSTNLTMSFSNQLNTVHNQASVLASSSTAAAATLSLANSDVSLLNYQSALYPSSAAPVPGVAQQGVSLQPGTTQICTQTDPFQQTFIVCPPAFQTGLQATTKHSGFPVRMDNAVPIVPQAPAAQPLQIQSGVLTQGSCTPLMVATLHPQVATITPQYAVPFTLSCAAGRPALVEQTAAVLQAWPGGTQQILLPSTWQQLPGVALHNSVQPTAMIPEAMGSGQQLADWRNAHSHGNQYSTIMQQPSLLTNHVTLATAQPLNVGVAHVVRQQQSSSLPSKKNKQSAPVSSKSSLDVLPSQVYSLVGSSPLRTTSSYNSLVPVQDQHQPIIIPDTPSPPVSVITIRSDTDEEEDNKYKPSSSGLKPRSNVISYVTVNDSPDSDSSLSSPYSTDTLSALRGNSGSVLEGPGRVVADGTGTRTIIVPPLKTQLGDCTVATQASGLLSNKTKPVASVSGQSSGCCITPTGYRAQRGGTSAAQPLNLSQVSAMGYCLLFGPCTVVTFWRTLLLAGC

SEQ ID NO: 8645 - protein, 2723 aa, Homo sapiens
MADEEAEQERLSCGEGGCVAELQRLGERLQELELQLRESRVPAVEAATDYCQQLCQTLLEYAEKWKTSEDPLPLLEVYTVAIQSYVKARPYLTSECENVALVLERLALSCVELLLCLPVELSDKQWEQFQTLVQVAHEKLMENGSCELHFLATLAQETGVWKNPVLCTILSQEPLDKDKVNEFLAFEGPILLDMRIKHLIKTNQLSQATALAKLCSDHPEIGIKGSFKQTYLVCLCTSSPNGKLIEEISEVDCKDALEMICNLESEGDEKSALVLCTAFLSRQLQQGDMYCAWELTLFWSKLQQRVEPSIQVYLERCRQLSLLTKTVYHIFFLIKVINSETEGAGLATCIELCVKALRLESTENTEVKISICKTISCLLPDDLEVKRACQLSEFLIEPTVDAYYAVEMLYNQPDQKYDEENLPIPNSLRCELLLVLKTQWPFDPEFWDWKTLKRQCLALMGEEASIVSSIDELNDSEVYEKVVDYQEESKETSMNGLSGGVGANSGLLKDIGDEKQKKREIKQLRERGFISARFRNWQAYMQYCVLCDKEFLGHRIVRHAQKHYKDGIYSCPICAKNFNSKETFVPHVTLHVKQSSKERLAAMKPLRRLGRPPKITTTNENQKTNTVAKQEQRPIKKNSLYSTDFIVFNDNDGSDDENDDKDKSYEPEVIPVQKPVPVNEFNCPVTFCKKGFKYFKNLIAHVKGHKDNEDAKRFLEMQSKKVICQYCRRHFVSVTHLNDHLQMHCGSKPYICIQMKCKAGFNSYAELLTHRKEHQVFRAKCMFPKCGRIFSEAYLLYDHEAQHYNTYTCKFTGCGKVYRSQGELEKHLDDHSTPPEKVLPPEAQLNSSGDSIQPSEVNQNTAENIEKERSMLPSENNIENSLLADRSDAWDKSKAESAVTKQDQISASELRQANGPLSNGLENPATTPLLQSSEVAVSIKVSLNQGIEDNFGKQENSTVEGSGEALVTDLHTPVEDTCNDLCHPGFQERKEQDCFNDAHVTQNSLVNSETLKIGDLTPQNLERQVNNLMTFSVQNQAAFQNNLPTSKFECGDNVKTSSNLYNLPLKTLESIAFVPPQSDLSNSLGTPSVPPKAPVQKFSCQVEGCTRTYNSSQSIGKHMKTAHPDQYAAFKMQRKSKKGQKANNLNTPNNGKFVYFLPSPVNSSNPFFTSQTKANGNPACSAQLQHVSPPIFPAHLASVSTPLLSSMESVINPNITSQDKNEQGGMLCSQMENLPSTALPAQMEDLTKTVLPLNIDSGSDPFLPLPAESSSMSLFPSPADSGTNSVFSQLENNTNHYSSQIEGNTNSSFLKGGNGENAVFPSQVNVANNFSSTNAQQSAPEKVKKDRGRGPNGKERKPKHNKRAKWPAIIRDGKFICSRCYRAFTNPRSLGGHLSKRSYCKPLDGAEIAQELLQSNGQPSLLASMILSTNAVNLQQPQQSTFNPEACFKDPSFLQLLAENRSPAFLPNTFPRSGVTNFNTSVSQEGSEIIKQALETAGIPSTFEGAEMLSHVSTGCVSDASQVNATVMPNPTVPPLLHTVCHPNTLLTNQNRTSNSKTSSIEECSSLPVFPTNDLLLKTVENGLCSSSFPNSGGPSQNFTSNSSRVSVISGPQNTRSSHLNKKGNSASKRRKKVAPPLIAPNASQNLVTSDLTTMGLIAKSVEIPTTNLHSNVIPTCEPQSLVENLTQKLNNVNNQLFMTDVKENFKTSLESHTVLAPLTLKTENGDSQMMALNSCTTSINSDLQISEDNVIQNFEKTLEIIKTAMNSQILEVKSGSQGAGETSQNAQINYNIQLPSVNTVQNNKLPDSSPFSSFISVMPTKSNIPQSEVSHKEDQIQEILEGLQKLKLENDLSTPASQCVLINTSVTLTPTPVKSTADITVIQPVSEMINIQFNDKVNKPFVCQNQGCNYSAMTKDALFKHYGKIHQYTPEMILEIKKNQLKFAPFKCVVPTCTKTFTRNSNLRAHCQLVHHFTTEEMVKLKIKRPYGRKSQSENVPASRSTQVKKQLAMTEENKKESQPALELRAETQNTHSNVAVIPEKQLVEKKSPDKTESSLQVITVTSEQCNTNALTNTQTKGRKIRRHKKEKEEKKRKKPVSQSLEFPTRYSPYRPYRCVHQGCFAAFTIQQNLILHYQAVHKSDLPAFSAEVEEESEAGKESEETETKQTLKEFRCQVSDCSRIFQAITGLIQHYMKLHEMTPEEIESMTASVDVGKFPCDQLECKSSFTTYLNYVVHLEADHGIGLRASKTEEDGVYKCDCEGCDRIYATRSNLLRHIFNKHNDKHKAHLIRPRRLTPGQENMSSKANQEKSKSKHRGTKHSRCGKEGIKMPKTKRKKKNNLENKNAKIVQIEENKPYSLKRGKHVYSIKARNDALSECTSRFVTQYPCMIKGCTSVVTSESNIIRHYKCHKLSKAFTSQHRNLLIVFKRCCNSQVKETSEQEGAKNDVKDSDTCVSESNDNSRTTATVSQKEVEKNEKDEMDELTELFITKLINEDSTSVETQANTSSNVSNDFQEDNLCQSERQKASNLKRVNKEKNVSQNKKRKVEKAEPASAAELSSVRKEEETAVAIQTIEEHPASFDWSSFKPMGFEVSFLKFLEESAVKQKKNTDKDHPNTGNKKGSHSNSRKNIDKTAVTSGNHVCPCKESETFVQFANPSQLQCSDNVKIVLDKNLKDCTELVLKQLQEMKPTVSLKKLEVHSNDPDMSVMKDISIGKATGRGQY

SEQ ID NO: 8646 - protein, 384 aa, Homo sapiens
MKVTSLDGRQLRKMLRKEAAARCVVLDCRPYLAFAASNVRGSLNVNLNSVVLRRARGGAVSARYVLPDEAARARLLQEGGGGVAAVVVLDQGSRHWQKLREESAARVVLTSLLACLPAGPRVYFLKGGYETFYSEYPECCVDVKPISQEKIESERALISQCGKPVVNVSYRPAYDQGGPVEILPFLYLGSAYHASKCEFLANLHITALLNVSRRTSEACATHLHYKWIPVEDSHTADISSHFQEAIDFIDCVREKGGKVLVHCEAGISRSPTICMAYLMKTKQFRLKEAFDYIKQRRSMVSPNFGFMGQLLQYESEILPSTPNPQPPSCQGEAAGSSLIGHLQTLSPDMQGAYCTFPASVLAPVPTHSTVSELSRSPVATATSC

SEQ ID NO: 8647 - protein, 238 aa, Homo sapiens
MSEDLAKQLASYKAQLQQVEAALSGNGENEDLLKLKKDLQEVIELTKDLLSTQPSETLASSDSFASTQPTHSWKVGDKCMAVWSEDGQCYEAEIEEIDEENGTAAITFAGYGNAEVTPLLNLKPVEEGRKAKEDSGNKPMSKKEMIAQQREYKKKKALKKAQRIKELEQEREDQKVKWQQFNNRAYSKNKKGQVKRSIFASPESVTGKVGVGTCGIADKPMTQYQDTSKYNVRHLMPQ

SEQ ID NO: 8648 - protein, 623 aa, Homo sapiens
MATEHVNGNGTEEPMDTTSAVIHSENFQTLLDAGLPQKVAEKLDEIYVAGLVAHSDLDERAIEALKEFNEDGALAVLQQFKDSDLSHVQNKSAFLCGVMKTYRQREKQGTKVADSSKGPDEAKIKALLERTGYTLDVTTGQRKYGGPPPDSVYSGQQPSVGTEIFVGKIPRDLFEDELVPLFEKAGPIWDLRLMMDPLTGLNRGYAFVTFCTKEAAQEAVKLYNNHEIRSGKHIGVCISVANNRLFVGSIPKSKTKEQILEEFSKVTEGLTDVILYHQPDDKKKNRGFCFLEYEDHKTAAQARRRLMSGKVKVWGNVGTVEWADPIEDPDPEVMAKVKVLFVRNLANTVTEEILEKAFSQFGKLERVKKLKDYAFIHFDERDGAVKAMEEMNGKDLEGENIEIVFAKPPDQKRKERKAQRQAAKNQMYDDYYYYGPPHMPPPTRGRGRGGRGGYGYPPDYYGYEDYYDYYGYDYHNYRGGYEDPYYGYEDFQVGARGRGGRGARGAAPSRGRGAAPPRGRAGYSQRGGPGSARGVRGARGGAQQQRGRGVRGARGGRGGNVGGKRKADGYNQPDSKRRQTNNQNWGSQPIAQQPLQGGDHSGNYGYKSENQEFYQDTFGQQWK

SEQ ID NO: 8649 - protein, 500 aa, Homo sapiens
MPPAVGGPVGYTPPDGGWGWAVVIGAFISIGFSYAFPKSITVFFKEIEGIFHATTSEVSWISSIMLAVMYGGGPISSILVNKYGSRIVMIVGGCLSGCGLIAASFCNTVQQLYVCIGVIGGLGLAFNLNPALTMIGKYFYKRRPLANGLAMAGSPVFLCTLAPLNQVFFGIFGWRGSFLILGGLLLNCCVAGALMRPIGPKPTKAGKDKSKASLEKAGKSGVKKDLHDANTDLIGRHPKQEKRSVFQTINQFLDLTLFTHRGFLLYLSGNVIMFFGLFAPLVFLSSYGKSQHYSSEKSAFLLSILAFVDMVARPSMGLVANTKPIRPRIQYFFAASVVANGVCHMLAPLSTTYVGFCVYAGFFGFAFGWLSSVLFETLMDLVGPQRFSSAVGLVTIVECCPVLLGPPLLGRLNDMYGDYKYTYWACGVVLIISGIYLFIGMGINYRLLAKEQKANEQKKESKEEETSIDVAGKPNEVTKAAESPDQKDTDGGPKEEESPV

SEQ ID NO: 8650 - protein, 237 aa, Homo sapiens
MRLAGPLRIVVLVVSVGVTWIVVSILLGGPGSGFPRIQQLFTSPESSVTAAPRARKYKCGLPQPCPEEHLAFRVVSGAANVIGPKICLEDKMLMSSVKDNVGRGLNIALVNGPLPPDTGVSGELIEARAFDMWAGDVNDLLKFIRPLHEGTLVFVASYDDPATKMNEETRKLFSELGSRNAKELAFRDSWVFVGAKGVQNKSPFEQHVKNSKHSNKYEGWPEALEMEGCIPRRSTAS

SEQ ID NO: 8651 - protein, 264 aa, Homo sapiens
MCPRAARAPATLLLALGAVLWPAAGAWELTILHTNDVHSRLEQTSEDSSKCVNASRCMGGVARLFTKVQQIRRAEPNVLLLDAGDQYQGTIWFTVYKGAEVAHFMNALRYDAMALGNHEFDNGVEGLIEPLLKEAKFPILSANIKAKGPLASQISGLYLPYKVLPVGDEVVGIVGYTSKETPFLSNPGTNLVFEDEITALQPEVDKLKTLNVNKIIALGHSGFEMDKLIAQKVRGVDVVVGGHSNTFLYTGNCFKRIAWARMSR

SEQ ID NO: 8652 - protein, 524 aa, Homo sapiens
MCPRAARAPATLLLALGAVLWPAAGAWELTILHTNDVHSRLEQTSEDSSKCVNASRCMGGVARLFTKVQQIRRAEPNVLLLDAGDQYQGTIWFTVYKGAEVAHFMNALRYDAMALGNHEFDNGVEGLIEPLLKEAKFPILSANIKAKGPLASQISGLYLPYKVLPVGDEVVGIVGYTSKETPFLSNPGTNLVFEDEITALQPEVDKLKTLNVNKIIALGHSGFEMDKLIAQKVRGVDVVVGGHSNTFLYTGNPPSKEVPAGKYPFIVTSDDGRKVPVVQAYAFGKYLGYLKIEFDERGNVISSHGNPILLNSSIPEDPSIKADINKWRIKLDNYSTQELGKTIVYLDGSSQSCRFRECNMGNLICDAMINNNLRHTDEMFWNHVSMCILNGGGIRSPIDERNNGIHVVYDLSRKPGDRVVKLDVLCTKCRVPSYDPLKMDEVYKVILPNFLANGGDGFQMIKDELLRHDSGDQDINVVSTYISKMKVIYPAVEGRIKFSTGSHCHGSFSLIFLSLWAVIFVLYQ

SEQ ID NO: 8653 - protein, 607 aa, Homo sapiens
MAEKRRGSPCSMLSLKAHAFSVEALIGAEKQQQLQKKRRKLGAEEAAGAVDDGGCSRGGGAGEKGSSEGDEGAALPPPAGATSGPARSGADLERGAAGGCEDGFQQGASPLASPGGSPKGSPARSLARPGTPLPSPQAPRVDLQGAELWKRFHEIGTEMIITKAGRRMFPAMRVKISGLDPHQQYYIAMDIVPVDNKRYRYVYHSSKWMVAGNADSPVPPRVYIHPDSPASGETWMRQVISFDKLKLTNNELDDQGHIILHSMHKYQPRVHVIRKDCGDDLSPIKPVPSGEGVKAFSFPETVFTTVTAYQNQQITRLKIDRNPFAKGFRDSGRNRMGLEALVESYAFWRPSLRTLTFEDIPGIPKQGNASSSTLLQGTGNGVPATHPHLLSGSSCSSPAFHLGPNTSQLCSLAPADYSACARSGLTLNRYSTSLAETYNRLTNQAGETFAPPRTPSYVGVSSSTSVNMSMGGTDGDTFSCPQTSLSMQISGMSPQLQYIMPSPSSNAFATNQTHQGSYNTFRLHSPCALYGYNFSTSPKLAASPEKIVSSQGSFLGSSPSGTMTDRQMLPPVEGVHLLSSGGQQSFFDSRTLGSLTLSSSQVSAHMV

SEQ ID NO: 8654 - protein, 521 aa, Homo sapiens
MLNVPSQSFPAPRSQQRVASGGRSKVPLKQGRSLMDWIRLTKSGKDLTGLKGRLIEVTEEELKKHNKKDDCWICIRGFVYNVSPYMEYHPGGEDELMRAAGSDGTELFDQVHRWVNYESMLKECLVGRMAIKPAVLKDYREEEKKVLNGMLPKSQVTDTLAKEGPSYPSYDWFQTDSLVTIAIYTKQKDINLDSIIVDHQNDSFRAETIIKDCLYLIHIGLSHEVQEDFSVRVVESVGKIEIVLQKKENTSWDFLGHPLKNHNSLIPRKDTGLYYRKCQLISKEDVTHDTRLFCLMLPPSTHLQVPIGQHVYLKLPITGTEIVKPYTPVSGSLLSEFKEPVLPNNKYIYFLIKIYPTGLFTPELDRLQIGDFVSVSSPEGNFKISKFQELEDLFLLAAGTGFTPMVKILNYALTDIPSLRKVKLMFFNKTEDDIIWRSQLEKLAFKDKRLDVEFVLSAPISEWNGKQGHISPALLSEFLKRNLDKSKVLVCICGPVPFTEQGVRLLHDLNFSKNEIHSFTA

SEQ ID NO: 8655 - protein, 1871 aa, Homo sapiens
MPSVCLLLLLFLAVGGALGNRPFRAFVVTDTTLTHLAVHRVTGEVFVGAVNRVFKLAPNLTELRAHVTGPVEDNARCYPPPSMRVCAHRLAPVDNINKLLLIDYAARRLVACGSIWQGICQFLRLDDLFKLGEPHHRKEHYLSGAQEPDSMAGVIVEQGQGPSKLFVGTAVDGKSEYFPTLSSRKLISDEDSADMFSLVYQDEFVSSQIKIPSDTLSLYPAFDIYYIYGFVSASFVYFLTLQLDTQQTLLDTAGEKFFTSKIVRMCAGDSEFYSYVEFPIGCSWRGVEYRLVQSAHLAKPGLLLAQALGVPADEDVLFTIFSQGQKNRASPPRQTILCLFTLSNINAHIRRRIQSCYRGEGTLALPWLLNKELPCINTPMQINGNFCGLVLNQPLGGLHVIEGLPLLADSTDGMASVAAYTYRQHSVVFIGTRSGSLKKVRVDGFQDAHLYETVPVVDGSPILRDLLFSPDHRHIYLLSEKQVSQLPVETCEQYQSCAACLGSGDPHCGWCVLRHRCCREGACLGASAPHGFAEELSKCVQVRVRPNNVSVTSPGVQLTVTLHNVPDLSAGVSCAFEAAAENEAVLLPSGELLCPSPSLQELRALTRGHGATRTVRLQLLSKETGVRFAGADFVFYNCSVLQSCMSCVGSPYPCHWCKYRHTCTSRPHECSFQEGRVHSPEGCPEILPSGDLLIPVGVMQPLTLRAKNLPQPQSGQKNYECVVRVQGRQQRVPAVRFNSSSVQCQNASYSYEGDEHGDTELDFSVVWDGDFPIDKPPSFRALLYKCWAQRPSCGLCLKADPRFNCGWCISEHRCQLRTHCPAPKTNWMHLSQKGTRCSHPRITQIHPLVGPKEGGTRVTIVGENLGLLSREVGLRVAGVRCNSIPAEYISAERIVCEMEESLVPSPPPGPVELCVGDCSADFRTQSEQVYSFVTPTFDQVSPSRGPASGGTRLTISGSSLDAGSRVTVTVRDSECQFVRRDAKAIVCISPLSTLGPSQAPITLAIDRANISSPGLIYTYTQDPTVTRLEPTWSIINGSTAITVSGTHLLTVQEPRVRAKYRGIETTNTCQVINDTAMLCKAPGIFLGRPQPRAQGEHPDEFGFLLDHVQTARSLNRSSFTYYPDPSFEPLGPSGVLDVKPGSHVVLKGKNLIPAAAGSSRLNYTVLIGGQPCSLTVSDTQLLCDSPSQTGRQPVMVLVGGLEFWLGTLHISAERALTLPAMMGLAAGGGLLLLAITAVLVAYKRKTQDADRTLKRLQLQMDNLESRVALECKEAFAELQTDINELTNHMDEVQIPFLDYRTYAVRVLFPGIEAHPVLKELDTPPNVEKALRLFGQLLHSRAFVLTFIHTLEAQSSFSMRDRGTVASLTMVALQSRLDYATGLLKQLLADLIEKNLESKNHPKLLLRRTESVAEKMLTNWFTFLLHKFLKECAGEPLFLLYCAIKQQMEKGPIDAITGEARYSLSEDKLIRQQIDYKTLTLHCVCPENEGSAQVPVKVLNCDSITQAKDKLLDTVYKGIPYSQRPKAEDMDLEWRQGRMTRIILQDEDVTTKIECDWKRLNSLAHYQVTDGSLVALVPKQVSAYNMANSFTFTRSLSRYESLLRTASSPDSLRSRAPMITPDQETGTKLWHLVKNHDHADHREGDRGSKMVSEIYLTRLLATKGTLQKFVDDLFETVFSTAHRGSALPLAIKYMFDFLDEQADQRQISDPDVRHTWKSNCLPLRFWVNVIKNPQFVFDIHKNSITDACLSVVAQTFMDSCSTSEHRLGKDSPSNKLLYAKDIPNYKSWVERYYRDIAKMASISDQDMDAYLVEQSRLHASDFSVLSALNELYFYVTKYRQEILTALDRDASCRKHKLRQKLEQIISLVSSDS

SEQ ID NO: 8656 - protein, 413 aa, Homo sapiens
MENMLLWLIFFTPGWTLIDGSEMEWDFMWHLRKVPRIVSERTFHLTSPAFEADAKMMVNTVCGIECQKELPTPSLSELEDYLSYETVFENGTRTLTRVKVQDLVLEPTQNITTKGVSVRRKRQVYGTDSRFSILDKRFLTNFPFSTAVKLSTGCSGILISPQHVLTAAHCVHDGKDYVKGSKKLRVGLLKMRNKSGGKKRRGSKRSRREASGGDQREGTREHLRERAKGGRRRKKSGRGQRIAEGRPSFQWTRVKNTHIPKGWARGGMGDATLDYDYALLELKRAHKKKYMELGISPTIKKMPGGMIHFSGFDNDRADQLVYRFCSVSDESNDLLYQYCDAESGSTGSGVYLRLKDPDKKNWKRKIIAVYSGHQWVDVHGVQKDYNVAVRITPLKYAQICLWIHGNDANCAYG

SEQ ID NO: 8657 - protein, 824 aa, Homo sapiens
MAAAFEASGALAAVATAMPAEHVAVQVPAPEPTPGPVRILRTAQDLSSPRTRTGDVLLAEPADFESLLLSRPVLEGLRAAGFERPSPVQLKAIPLGRCGLDLIVQAKSGTGKTCVFSTIALDSLVLENLSTQILILAPTREIAVQIHSVITAIGIKMEGLECHVFIGGTPLSQDKTRLKKCHIAVGSPGRIKQLIELDYLNPGSIRLFILDEADKLLEEGSFQEQINWIYSSLPASKQMLAVSATYPEFLANALTKYMRDPTFVRLNSSDPSLIGLKQYYKVVNSYPLAHKVFEEKTQHLQELFSRIPFNQALVFSNLHSRAQHLADILSSKGFPAECISGNMNQNQRLDAMAKLKHFHCRVLISTDLTSRGIDAEKVNLVVNLDVPLDWETYMHRIGRAGRFGTLGLTVTYCCRGEEENMMMRIAQKCNINLLPLPDPIPSGLMEECVDWDVEVKAAVHTYGIASVPNQPLKKQIQKIERTLQIQKAHGDHMASSRNNSVSGLSVKSKNNTKQKLPVKSHSECGIIEKATSPKELGCDRQSEEQMKNSVQTPVENSTNSQHQVKEALPVSLPQIPCLSSFKIHQPYTLTFAELVEDYEHYIKEGLEKPVEIIRHYTGPGDQTVNPQNGFVRNKVIEQRVPVLASSSQSGDSESDSDSYSSRTSSQSKGNKSYLEGSSDNQLKDSESTPVDDRISLEQPPNGSDTPNPEKYQESPGIQMKTRLKEGASQRAKQSRRNLPRRSSFRLQTEAQEDDWYDCHREIRLSFSDTYQDYEEYWRAYYRAWQEYYAAASHSYYWNAQRHPSWMAAYHMNTIYLQEMMHSNQ

SEQ ID NO: 8658 - protein, 572 aa, Homo sapiens
MEPEAPRRRHTHQRGYLLTRNPHLNKDLAFTLEERQQLNIHGLLPPSFNSQEIQVLRVVKNFEHLNSDFDRYLLLMDLQDRNEKLFYRVLTSDIEKFMPIVYTPTVGLACQQYSLVFRKPRGLFITIHDRGHIASVLNAWPEDVIKAIVVTDGERILGLGDLGCNGMGIPVGKLALYTACGGMNPQECLPVILDVGTENEELLKDPLYIGLRQRRVRGSEYDDFLDEFMEAVSSKYGMNCLIQFEDFANVNAFRLLNKYRNQYCTFNDDIQGTASVAVAGLLAALRITKNKLSDQTILFQGAGEAALGIAHLIVMALEKEGLPKEKAIKKIWLVDSKGLIVKGRASLTQEKEKFAHEHEEMKNLEAIVQEIKPTALIGVAAIGGAFSEQILKDMAAFNERPIIFALSNPTSKAECSAEQCYKITKGRAIFASGSPFDPVTLPNGQTLYPGQGNNSYVFPGVALGVVACGLRQITDNIFLTTAEVIAQQVSDKHLEEGRLYPPLNTIRDVSLKIAEKIVKDAYQEKTATVYPEPQNKEAFVRSQMYSTDYDQILPDCYSWPEEVQKIQTKVDQ

SEQ ID NO: 8659 - protein, 215 aa, Homo sapiens
MRFCPYSHRTRLVLKAKDIRHEVVNINLRNKPEWYYTKHPFGHIPVLETSQCQLIYESVIACEYLDDAYPGRKLFPYDPYERARQKMLLELFCKVPHLTKECLVALRCGRECTNLKAALRQEFSNLEEILEYQNTTFFGGTCISMIDYLLWPWFERLDVYGILDCVSHTPALRLWISAMKWDPTVCALLMDKSIFQGFLNLYFQNNPNAFDFGLC

SEQ ID NO: 8660 - protein, 241 aa, Homo sapiens
MSGESARSLGKGSAPPGPVPEGSIRIYSMRFCPFAERTRLVLKAKGIRHEVININLKNKPEWFFKKNPFGLVPVLENSQGQLIYESAITCEYLDEAYPGKKLLPDDPYEKACQKMILELFSKVPSLVGSFIRSQNKEDYAGLKEEFRKEFTKLEEVLTNKKTTFFGGNSISMIDYLIWPWFERLEAMKLNECVDHTPKLKLWMAAMKEDPTVSALLTSEKDWQGFLELYLQNSPEACDYGL

SEQ ID NO: 8661 - protein, 256 aa, Homo sapiens
MLSRVVLSAAATAAPSLKNAAFLGPGVLQATRTFHTGQPHLVPVPPLPEYGGKVRYGLIPEEFFQFLYPKTGVTGPYVLGTGLILYALSKEIYVISAETFTALSVLGVMVYGIKKYGPFVADFADKLNEQKLAQLEEAKQASIQHIQNAIDTEKSQQALVQKRHYLFDVQRNNIAMALEVTYRERLYRVYKEVKNRLDYHISVQNMMRRKEQEHMINWVEKHVVQSISTQQEKETIAKCIADLKLLAKKAQAQPVM

SEQ ID NO: 8662 - protein, 292 aa, Homo sapiens
MSASVKESLQLQLLEMEMLFSMFPNQGEVKLEDVNALTNIKRYLEGTREALPPKIEFVITLQIEEPKVKIDLQVTMPHSYPYVALQLFGRSSELDRHQQLLLNKGLTSYIGTFDPGELCVCAAIQWLQDNSASYFLNRKLVYEPSTQAKPVKNTFLRMWIYSHHIYQQDLRKKILDVGKRLDVTGFCMTGKPGIICVEGFKEHCEEFWHTIRYPNWKHISCKHAESVETEGNGEDLRLFHSFEELLLEAHGDYGLRNDYHMNLGQFLEFLKKHKSEHVFQILFGIESKSSDS

SEQ ID NO: 8663 - protein, 678 aa, Homo sapiens
MWKLLLWVGLVLVLKHHDGAAHKLVCYFTNWAHSRPGPASILPHDLDPFLCTHLIFAFASMNNNQIVAKDLQDEKILYPEFNKLKERNRELKTLLSIGGWNFGTSRFTTMLSTFANREKFIASVISLLRTHDFDGLDLFFLYPGLRGSPMHDRWTFLFLIEELLFAFRKEALLTMRPRLLLSAAVSGVPHIVQTSYDVRFLGRLLDFINVLSYDLHGSWERFTGHNSPLFSLPEDPKSSAYAMNYWRKLGAPSEKLIMGIPTYGRTFRLLKASKNGLQARAIGPASPGKYTKQEGFLAYFEICSFVWGAKKHWIDYQYVPYANKGKEWVGYDNAISFSYKAWFIRREHFGGAMVWTLDMDDVRGTFCGTGPFPLVYVLNDILVRAEFSSTSLPQFWLSSAVNSSSTDPERLAVTTAWTTDSKILPPGGEAGVTEIHGKCENMTITPRGTTVTPTKETVSLGKHTVALGEKTEITGAMTMTSVGHQSMTPGEKALTPVGHQSVTTGQKTLTSVGYQSVTPGEKTLTPVGHQSVTPVSHQSVSPGGTTMTPVHFQTETLRQNTVAPRRKAVAREKVTVPSRNISVTPEGQTMPLRGENLTSEVGTHPRMGNLGLQMEAENRMMLSSSPVIQLPEQTPLAFDNRFVPIYGNHSSVNSVTPQTSPLSLKKEIPENSAVDEEA

SEQ ID NO: 8664 - protein, 390 aa, Homo sapiens
MGATTMDQKSLWAGVVVLLLLQGGSAYKLVCYFTNWSQDRQEPGKFTPENIDPFLCSHLIYSFASIENNKVIIKDKSEVMLYQTINSLKTKNPKLKILLSIGGYLFGSKGFHPMVDSSTSRLEFINSIILFLRNHNFDGLDVSWIYPDQKENTHFTVLIHELAEAFQKDFTKSTKERLLLTAGVSAGRQMIDNSYQVEKLAKDLDFINLLSFDFHGSWEKPLITGHNSPLSKGWQDRGPSSYYNVEYAVGYWIHKGMPSEKVVMGIPTYGHSFTLASAETTVGAPASGPGAAGPITESSGFLAYYEICQFLKGAKITRLQDQQVPYAVKGNQWVGYDDVKSMETKVQFLKNLNLGGAMIWSIDMDDFTGKSCNQGPYPLVQAVKRSLGSL

SEQ ID NO: 8665 - protein, 420 aa, Homo sapiens
MPGGCSRGPAAGDGRLRLARLALVLLGWVSSSSPTSSASSFSSSAPFLASAVSAQPPLPDQCPALCECSEAARTVKCVNRNLTEVPTDLPAYVRNLFLTGNQLAVLPAGAFARRPPLAELAALNLSGSRLDEVRAGAFEHLPSLRQLDLSHNPLADLSPFAFSGSNASVSAPSPLVELILNHIVPPEDERQNRSFEGMVVAALLAGRALQGLRRLELASNHFLYLPRDVLAQLPSLRHLDLSNNSLVSLTYVSFRNLTHLESLHLEDNALKVLHNGTLAELQGLPHIRVFLDNNPWVCDCHMADMVTWLKETEVVQGKDRLTCAYPEKMRNRVLLELNSADLDCDPILPPSLQTSYVFLGIVLALIGAIFLLVLYLNRKGIKKWMHNIRDACRDHMEGYHYRYEINADPRLTNLSSNSDV

SEQ ID NO: 8666 - protein, 769 aa, Homo sapiens
MSNNLRRVFLKPAEENSGNASRCVSGCMYQVVQTIGSDGKNLLQLLPIPKSSGNLIPLVQSSVMSDALKGNTGKPVQVTFQTQISSSSTSASVQLPIFQPASSSNYFLTRTVDTSEKGRVTSVGTGNFSSSVSKVQSHGVKIDGLTMQTFAVPPSTQKDSSFIVVNTQSLPVTVKSPVLPSGHHLQIPAHAEVKSVPASSLPPSVQQKILATATTSTSGMVEASQMPTVIYVSPVNTVKNVVTKNFQNIYPKPVTEIAKPVILNTTQIPKNVATETQLKGGQHSQAAPVKWIFQDNLQPFTPSLVPVKSSNNVASKILKTFVDRKNLGDNTINMPPLSTIDPSGTRSKNMPIKDNALVMFNGKVYLLAKKGTDVLPSQIDQQNSVSPDTPVRKDTLQTVSSSPVTEISREVVNIVLAKSKSSQMETKSLSNTQLASMANLRAEKNKVEKPSPSTTNPHMNQSSNYLKQSKTLFTNPIFPVGFSTGHNAPRKVTAVIYARKGSVLQSIEKISSSVDATTVTSQQCVFRDQEPKIHNEMASTSDKGAQGRNDKKDSQGRSNKALHLKSDAEFKKIFGLTKDLRVCLTRIPDHLTSGEGFDSFSSLVKSGTYKETEFMVKEGERKQQNFDKKRKAKTNKKMDHIKKRKTENAYNAIINGEANVTGSQLLSSILPTSDVSQHNILTSHSKTRQEKRTEMEYYTHEKQEKGTLNSNAAYEQSHFFNKNYTEDIFPVTPPELEETIRDEKIRRLKQVLREKEAALEEMRKKMHQK

SEQ ID NO: 8667 - protein, 1133 aa, Homo sapiens
MLAYCVQDATVVDVEKRRNPSKHYVYIINVTWSDSTSQTIYRRYSKFFDLQMQLLDKFPIEGGQKDPKQRIIPFLPGKILFRRSHIRDVAVKRLKPIDEYCRALVRLPPHISQCDEVFRFFEARPEDVNPPKEDYGSSKRKSVWLSSWAESPKKDVTGADATAEPMILEQYVVVSNYKKQENSELSLQAGEVVDVIEKNESGWWFVSTSEEQGWVPATYLEAQNGTRDDSDINTSKTGEVSKRRKAHLRRLDRRWTLGGMVNRQHSREEKYVTVQPYTSQSKDEIGFEKGVTVEVIRKNLEGWWYIRYLGKEGWAPASYLKKAKDDLPTRKKNLAGPVEIIGNIMEISNLLNKKASGDKETPPAEGEGHEAPIAKKEISLPILCNASNGSAVGVPDRTVSRLAQGSPAVARIAPQRAQISSPNLRTRPPPRRESSLGFQLPKPPEPPSVEVEYYTIAEFQSCISDGISFRGGQKAEVIDKNSGGWWYVQIGEKEGWAPASYIDKRKKPNLSRRTSTLTRPKVPPPAPPSKPKEAEEGPTGASESQDSPRKLKYEEPEYDIPAFGFDSEPELSEEPVEDRASGERRPAQPHRPSPASSLQRARFKVGESSEDVALEEETIYENEGFRPYAEDTLSARGSSGDSDSPGSSSLSLTRKNSPKSGSPKSSSLLKLKAEKNAQAEMGKNHSSASFSSSITINTTCCSSSSSSSSSLSKTSGDLKPRSASDAGIRGTPKVRAKKDADANAGLTSCPRAKPSVRPKPFLNRAESQSQEKMDISTLRRQLRPTGQLRGGLKGSKSEDSELPPQTASEAPSEGSRRSSSDLITLPATTPPCPTKKEWEGPATSYMTCSAYQKVQDSEISFPAGVEVQVLEKQESGWWYVRFGELEGWAPSHYLVLDENEQPDPSGKELDTVPAKGRQNEGKSDSLEKIERRVQALNTVNQSKKATPPIPSKPPGGFGKTSGTPAVKMRNGVRQVAVRPQSVFVSPPPKDNNLSCALRRNESLTATDGLRGVRRNSSFSTARSAAAEAKGRLAERAASQGSDSPLLPAQRNSIPVSPVRPKPIEKSQFIHNNLKDVYVSIADYEGDEETAGFQEGVSMEVLERNPNGWWYCQILDGVKPFKGWVPSNYLEKKN

SEQ ID NO: 8668 - protein, 487 aa, Homo sapiens
MLKREGKVQPYTKTLDGGWGWMIVIHFFLVNVFVMGMTKTFAIFFVVFQEEFEGTSEQIGWIGSIMSSLRFCAGPLVAIICDILGEKTTSILGAFVVTGGYLISSWATSIPFLCVTMGLLPGLGSAFLYQVAAVVTTKYFKKRLALSTAIARSGMGLTFLLAPFTKFLIDLYDWTGALILFGAIALNLVPSSMLLRPIHIKSENNSGIKDKGSSLSAHGPEAHATETHCHETEESTIKDSTTQKAGLPSKNLTVSQNQSEEFYNGPNRNRLLLKSDEESDKVISWSCKQLFDISLFRNPFFYIFTWSFLLSQLAYFIPTFHLVARAKTLGIDIMDASYLVSVAGILETVSQIISGWVADQNWIKKYHYHKSYLILCGITNLLAPLATTFPLLMTYTICFAIFAGGYLALILPVLVDLCRNSTVNRFLGLASFFAGMAVLSGPPIAGWLYDYTQTYNGSFYFSGICYLLSSVSFFFVPLAERWKNSLT

SEQ ID NO: 8669 - protein, 977 aa, Homo sapiens
MRTAGRDPVPRRSPRWRRAVPLCETSAGRRVTQLRGDDLRRPATMKGKERSPVKAKRSRGGEDSTSRGERSKKLGGSGGSNGSSSGKTDSGGGSRRSLHLDKSSSRGGSREYDTGGGSSSSRLHSYSSPSTKNSSGGGESRSSSRGGGGESRSSGAASSAPGGGDGAEYKTLKISELGSQLSDEAVEDGLFHEFKRFGDVSVKISHLSGSGSGDERVAFVNFRRPEDARAAKHARGRLVLYDRPLKIEAVYVSRRRSRSPLDKDTYPPSASVVGASVGGHRHPPGGGGGQRSLSPGGAALGYRDYRLQQLALGRLPPPPPPPLPRDLERERDYPFYERVRPAYSLEPRVGAGAGAAPFREVDEISPEDDQRANRTLFLGNLDITVTESDLRRAFDRFGVITEVDIKRPSRGQTSTYGFLKFENLDMSHRAKLAMSGKIIIRNPIKIGYGKATPTTRLWVGGLGPWVPLAALAREFDRFGTIRTIDYRKGDSWAYIQYESLDAAHAAWTHMRGFPLGGPDRRLRVDFADTEHRYQQQYLQPLPLTHYELVTDAFGHRAPDPLRGARDRTPPLLYRDRDRDLYPDSDWVPPPPPVRERSTRTAATSVPAYEPLDSLDRRRDGWSLDRDRGDRDLPSSRDQPRKRRLPEESGGRHLDRSPESDRPRKRHCAPSPDRSPELSSSRDRYNSDNDRSSRLLLERPSPIRDRRGSLEKSQGDKRDRKNSASAERDRKHRTTAPTEGKSPLKKEDRSDGSAPSTSTASSKLKSPSQKQDGGTAPVASASPKLCLAWQGMLLLKNSNFPSNMHLLQGDLQVASSLLVEGSTGGKVAQLKITQRLRLDQPKLDEVTRRIKVAGPNGYAILLAVPGSSDSRSSSSSAASDTATSTQRPLRNLVSYLKQKQAAGVISLPVGGNKDKENTGVLHAFPPCEFSQQFLDSPAKALAKSEEDYLVMIIVRGFGFQIGVRYENKKRENLALTLL

SEQ ID NO: 8670 - protein, 837 aa, Homo sapiens
MEPAVGGPGPLIVNNKQPQPPPPPPPAAAQPPPGAPRAAAGLLPGGKAREFNRNQRKDSEGYSESPDLEFEYADTDKWAAELSELYSYTEGPEFLMNRKCFEEDFRIHVTDKKWTELDTNQHRTHAMRLLDGLEVTAREKRLKVARAILYVAQGTFGECSSEAEVQSWMRYNIFLLLEVGTFNALVELLNMEIDNSAACSSAVRKPAISLADSTDLRVLLNIMYLIVETVHQECEGDKAEWRTMRQTFRAELGSPLYNNEPFAIMLFGMVTKFCSGHAPHFPMKKVLLLLWKTVLCTLGGFEELQSMKAEKRSILGLPPLPEDSIKVIRNMRAASPPASASDLIEQQQKRGRREHKALIKQDNLDAFNERDPYKADDSREEEEENDDDNSLEGETFPLERDEVMPPPLQHPQTDRLTCPKGLPWAPKVREKDIEMFLESSRSKFIGYTLGSDTNTVVGLPRPIHESIKTLKQHKYTSIAEVQAQMEEEYLRSPLSGGEEEVEQVPAETLYQGLLPSLPQYMIALLKILLAAAPTSKAKTDSINILADVLPEEMPTTVLQSMKLGVDVNRHKEVIVKAISAVLLLLLKHFKLNHVYQFEYMAQHLVFANCIPLILKFFNQNIMSYITAKNSISVLDYPHCVVHELPELTAESLEAGDSNQFCWRNLFSCINLLRILNKLTKWKHSRTMMLVVFKSAPILKRALKVKQAMMQLYVLKLLKVQTKYLGRQWRKSNMKTMSAIYQKVRHRLNDDWAYGNDLDARPWDFQAEECALRANIERFNARRYDRAHSNPDFLPVDNCLQSVLGQRVDLPEDFQMNYDLWLEREVFSKPISWEELLQ

SEQ ID NO: 8671 - protein, 1871 aa, Homo sapiens
MANLEESFPRGGTRKIHKPEKAFQQSVEQDNLFDISTEEGSTKRKKSQKGPAKTKKLKIEKRESSKSAREKFEILSVESLCEGMRILGCVKEVNELELVISLPNGLQGFVQVTEICDAYTKKLNEQVTQEQPLKDLLHLPELFSPGMLVRCVVSSLGITDRGKKSVKLSLNPKNVNRVLSAEALKPGMLLTGTVSSLEDHGYLVDIGVDGTRAFLPLLKAQEYIRQKNKGAKLKVGQYLNCIVEKVKGNGGVVSLSVGHSEVSTAIATEQQSWNLNNLLPGLVVKAQVQKVTPFGLTLNFLTFFTGVVDFMHLDPKKAGTYFSNQAVRACILCVHPRTRVVHLSLRPIFLQPGRPLTRLSCQNLGAVLDDVPVQGFFKKAGATFRLKDGVLAYARLSHLSDSKNVFNPEAFKPGNTHKCRIIDYSQMDELALLSLRTSIIEAQYLRYHDIEPGAVVKGTVLTIKSYGMLVKVGEQMRGLVPPMHLADILMKNPEKKYHIGDEVKCRVLLCDPEAKKLMMTLKKTLIESKLPVITCYADAKPGLQTHGFIIRVKDYGCIVKFYNNVQGLVPKHELSTEYIPDPERVFYTGQVVKVVVLNCEPSKERMLLSFKLSSDPEPKKEPAGHSQKKGKAINIGQLVDVKVLEKTKDGLEVAVLPHNIRAFLPTSHLSDHVANGPLLHHWLQAGDILHRVLCLSQSEGRVLLCRKPALVSTVEGGQDPKNFSEIHPGMLLIGFVKSIKDYGVFIQFPSGLSGLAPKAIMSDKFVTSTSDHFVEGQTVAAKVTNVDEEKQRMLLSLRLSDCGLGDLAITSLLLLNQCLEELQGVRSLMSNRDSVLIQTLAEMTPGMFLDLVVQEVLEDGSVVFSGGPVPDLVLKASRYHRAGQEVESGQKKKVVILNVDLLKLEVHVSLHQDLVNRKARKLRKGSEHQAIVQHLEKSFAIASLVETGHLAAFSLTSHLNDTFRFDSEKLQVGQGVSLTLKTTEPGVTGLLLAVEGPAAKRTMRPTQKDSETVDEDEEVDPALTVGTIKKHTLSIGDMVTGTVKSIKPTHVVVTLEDGIIGCIHASHILDDVPEGTSPTTKLKVGKTVTARVIGGRDMKTFKYLPISHPRFVRTIPELSVRPSELEDGHTALNTHSVSPMEKIKQYQAGQTVTCFLKKYNVVKKWLEVEIAPDIRGRIPLLLTSLSFKVLKHPDKKFRVGQALRATVVGPDSSKTLLCLSLTGPHKLEEGEVAMGRVVKVTPNEGLTVSFPFGKIGTVSIFHMSDSYSETPLEDFVPQKVVRCYILSTADNVLTLSLRSSRTNPETKSKVEDPEINSIQDIKEGQLLRGYVGSIQPHGVFFRLGPSVVGLARYSHVSQHSPSKKALYNKHLPEGKLLTARVLRLNHQKNLVELSFLPGDTGKPDVLSASLEGQLTKQEERKTEAEERDQKGEKKNQKRNEKKNQKGQEEVEMPSKEKQQPQKPQAQKRGGRECRESGSEQERVSKKPKKAGLSEEDDSLVDVYYREGKEEAEETNVLPKEKQTKPAEAPRLQLSSGFAWNVGLDSLTPALPPLAESSDSEEDEKPHQATIKKSKKERELEKQKAEKELSRIEEALMDPGRQPESADDFDRLVLSSPNSSILWLQYMAFHLQATEIEKARAVAERALKTISFREEQEKLNVWVALLNLENMYGSQESLTKVFERAVQYNEPLKVFLHLADIYAKSEKFQEAGELYNRMLKRFRQEKAVWIKYGAFLLRRSQAAASHRVLQRALECLPSKEHVDVIAKFAQLEFQLGDAERAKAIFENTLSTYPKRTDVWSVYIDMTIKHGSQKDVRDIFERVIHLSLAPKRMKFFFKRYLDYEKQHGTEKDVQAVKAKALEYVEAKSSVLED

SEQ ID NO: 8672 - protein, 530 aa, Homo sapiens
MSMPDAMPLPGVGEELKQAKEIEDAEKYSFMATVTKAPKKQIQFADDMQEFTKFPTKTGRRSLSRSISQSSTDSYSSAASYTDSSDDEVSPREKQQTNSKGSSNFCVKNIKQAEFGRREIEIAEQDMSALISLRKRAQGEKPLAGAKIVGCTHITAQTAVLIETLCALGAQCRWSACNIYSTQNEVAAALAEAGVAVFAWKGESEDDFWWCIDRCVNMDGWQANMILDDGGDLTHWVYKKYPNVFKKIRGIVEESVTGVHRLYQLSKAGKLCVPAMNVNDSVTKQKFDNLYCCRESILDGLKRTTDVMFGGKQVVVCGYGEVGKGCCAALKALGAIVYITEIDPICALQACMDGFRVVKLNEVIRQVDVVITCTGNKNVVTREHLDRMKNSCIVCNMGHSNTEIDVTSLRTPELTWERVRSQVDHVIWPDGKRVVLLAEGRLLNLSCSTVPTFVLSITATTQALALIELYNAPEGRYKQDVYLLPKKMDEYVASLHLPSFDAHLTELTDDQAKYLGLNKNGPFKPNYYRY

SEQ ID NO: 8673 - protein, 438 aa, Homo sapiens
MTAPGAAGRCPPTTWLGSLLLLVCLLASRSITEEVSEYCSHMIGSGHLQSLQRLIDSQMETSCQITFEFVDQEQLKDPVCYLKKAFLLVQDIMEDTMRFRDNTPNAIAIVQLQELSLRLKSCFTKDYEEHDKACVRTFYETPLQLLEKVKNVFNETKNLLDKDWNIFSKNCNNSFAECSSQDVVTKPDCNCLYPKAIPSSDPASVSPHQPLAPSMAPVAGLTWEDSEGTEGSSLLPGEQPLHTVDPGSAKQRPPRSTCQSFEPPETPVVKDSTIGGSPQPRPSVGAFNPGMEDILDSAMGTNWVPEEASGEASEIPVPQGTELSPSRPGGGSMQTEPARPSNFLSASSPLPASAKGQQPADVTGHERQSEGSFSPQLQESVFHLLVPSVILVLLAVGGLLFYRWRRRSHQEPQRADSPLEQPEGSPLTQDDRQVELPV

SEQ ID NO: 8674 - protein, 314 aa, Homo sapiens
MGLLDSEPGSVLNVVSTALNDTVEFYRWTWSIADKRVENWPLMQSPWPTLSISTLYLLFVWLGPKWMKDREPFQMRLVLIIYNFGMVLLNLFIFRELFMGSYNAGYSYICQSVDYSNNVHEVRIAAALWWYFVSKGVEYLDTVFFILRKKNNQVSFLHVYHHCTMFTLWWIGIKWVAGGQAFFGAQLNSFIHVIMYSYYGLTAFGPWIQKYLWWKRYLTMLQLIQFHVTIGHTALSLYTDCPFPKWMHWALIAYAISFIFLFLNFYIRTYKEPKKPKAGKTAMNGISANGVSKSEKQLMIENGKKQKNGKAKGD

SEQ ID NO: 8675 - protein, 220 aa, Homo sapiens
MPMTLGYWNIRGLAHSIRLLLEYTDSSYEEKKYTMGDAPDYDRSQWLNEKFKLGLDFPNLPYLIDGTHKITQSNAILRYIARKHNLCGESEKEQIREDILENQFMDSRMQLAKLCYDPDFEKLKPEYLQALPEMLKLYSQFLGKQPWFLGDKITFVDFIAYDVLERNQVFEPSCLDAFPNLKDFISRFEEKCNVGWSSRRNLDTVCRTSQRILCQNRENE

SEQ ID NO: 8676 - protein, 218 aa, Homo sapiens
MSMTLGYWDIRGLAHAIRLLLEYTDSSYEEKKYTMGDAPDYDRSQWLNEKFKLGLDFPNLPYLIDGAHKITQSNAILCYIARKHNLCGETEEEKIRVDILENQAMDVSNQLARVCYSPDFEKLKPEYLEELPTMMQHFSQFLGKRPWFVGDKITFVDFLAYDVLDLHRIFEPNCLDAFPNLKDFISRFEGLEKISAYMKSSRFLPKPLYTRVAVWGNK

SEQ ID NO: 8677 - protein, 800 aa, Homo sapiens
MAALAEEQTEVAVKLEPEGPPTLLPPQAGDGAGEGSGGTTNNGPNGGGGNVAASSSTGGDGGTPKPTVAVSAAAPAGAAPVPAAAPDAGAPHDRQTLLAVLQFLRQSKLREAEEALRREAGLLEEAVAGSGAPGEVDSAGAEVTSALLSRVTASAPGPAAPDPPGTGASGATVVSGSASGPAAPGKVGSVAVEDQPDVSAVLSAYNQQGDPTMYEEYYSGLKHFIECSLDCHRAELSQLFYPLFVHMYLELVYNQHENEAKSFFEKFHGDQECYYQDDLRVLSSLTKKEHMKGNETMLDFRTSKFVLRISRDSYQLLKRHLQEKQNNQIWNIVQEHLYIDIFDGMPRSKQQIDAMVGSLAGEAKREANKSKVFFGLLKEPEIEVPLDDEDEEGENEEGKPKKKKPKKDSIGSKSKKQDPNAPPQNRIPLPELKDSDKLDKIMNMKETTKRVRLGPDCLPSICFYTFLNAYQGLTAVDVTDDSSLIAGGFADSTVRVWSVTPKKLRSVKQASDLSLIDKESDDVLERIMDEKTASELKILYGHSGPVYGASFSPDRNYLLSSSEDGTVRLWSLQTFTCLVGYKGHNYPVWDTQFSPYGYYFVSGGHDRVARLWATDHYQPLRIFAGHLADVNCTRFHPNSNYVATGSADRTVRLWDVLNGNCVRIFTGHKGPIHSLTFSPNGRFLATGATDGRVLLWDIGHGLMVGELKGHTDTVCSLRFSRDGEILASGSMDNTVRLWDAIKAFEDLETDDFTTATGHINLPENSQELLLGTYMTKSTPVVHLHFTRRNLVLAAGAYSPQ

SEQ ID NO: 8678 - protein, 254 aa, Homo sapiens
MDNYADLSDTELTTLLRRYNIPHGPVVGSTRRLYEKKIFEYETQRRRLSPPSSSAASSYSFSDLNSTRGDADMYDLPKKEDALLYQSKGYNDDYYEESYFTTRTYGEPESAGPSRAVRQSVTSFPDADAFHHQVHDDDLLSSSEEECKDRERPMYGRDSAYQSITHYRPVSASRSSLDLSYYPTSSSTSFMSSSSSSSSWLTRRAIRPENRAPGAGLGQDRQVPLWGQLLLFLVFVIVLFFIYHFMQAEEGNPF

SEQ ID NO: 8679 - protein, 697 aa, Homo sapiens
MGERAGSPGTDQERKAGKHHYSYLSDFETPQSSGRSSLVSSSPASVRRKNPKRQTSDGQVHHQAPRKPSPKGLPNRKGVRVGFRSQSLNREPLRKDTDLVTKRILSARLLKINELQNEVSELQVKLAELLKENKSLKRLQYRQEKALNKFEDAENEISQLIFRHNNEITALKERLRKSQEKERATEKRVKDTESELFRTKFSLQKLKEISEARHLPERDDLAKKLVSAELKLDDTERRIKELSKNLELSTNSFQRQLLAERKRAYEAHDENKVLQKEVQRLYHKLKEKERELDIKNIYSNRLPKSSPNKEKELALRKNAACQSDFADLCTKGVQTMEDFKPEEYPLTPETIMCYENKWEEPGHLTLDLQSQKQDRHGEAGILNPIMEREEKFVTDEELHVVKQEVEKLEDEWEREELDKKQKEKASLLEREEKPEWETGRYQLGMYPIQNMDKLQGEEEERLKREMLLAKLNEIDRELQDSRNLKYPVLPLLPDFESKLHSPERSPKTYRFSESSERLFNGHHLQDISFSTPKGEGQNSGNVRSPASPNEFAFGSYVPSFAKTSERSNPFSQKSSFLDFQRNSMEKLSKDGVDLITRKEKKANLMEQLFGASGSSTISSKSSDPNSVASSKGDIDPLNFLPGNKGSRDQEHDEDEGFFLSEGRSFNPNRHRLKHADDKPAVKAADSVEDEIEEVALR

SEQ ID NO: 8680 - protein, 350 aa, Homo sapiens
MEGVAVVTAGSVGAAKTEGAAALPPPPPVSPPALTPAPAAGEEGPAPLSETGAPGCSGSRPPELEPERSLGRFRGRFEDEDEELEEEEELEEEEEEEEEDMSHFSLRLEGGRQDSEDEEERLINLSELTPYILCSICKGYLIDATTITECLHTFCKSCIVRHFYYSNRCPKCNIVVHQTQPLYNIRLDRQLQDIVYKLVINLEEREKKQMHDFYKERGLEVPKPAVPQPVPSSKGRSKKVLESVFRIPPELDMSLLLEFIGANEGTGHFKPLEKKFVRVSGEATIGHVEKFLRRKMGLDPACQVDIICGDHLLEQYQTLREIRRAIGDAAMQDGLLVLHYGLVVSPLKIT

SEQ ID NO: 8681 - protein, 2647 aa, Homo sapiens
MSSSHSRAGQSAAGAAPGGGVDTRDAEMPATEKDLAEDAPWKKIQQNTFTRWCNEHLKCVSKRIANLQTDLSDGLRLIALLEVLSQKKMHRKHNQRPTFRQMQLENVSVALEFLDRESIKLVSIDSKAIVDGNLKLILGLIWTLILHYSISMPMWDEEEDEEAKKQTPKQRLLGWIQNKLPQLPITNFSRDWQSGRALGALVDSCAPGLCPDWDSWDASKPVTNAREAMQQADDWLGIPQVITPEEIVDPNVDEHSVMTYLSQFPKAKLKPGAPLRPKLNPKKARAYGPGIEPTGNMVKKRAEFTVETRSAGQGEVLVYVEDPAGHQEEAKVTANNDKNRTFSVWYVPEVTGTHKVTVLFAGQHIAKSPFEVYVDKSQGDASKVTAQGPGLEPSGNIANKTTYFEIFTAGAGTGEVEVVIQDPMGQKGTVEPQLEARGDSTYRCSYQPTMEGVHTVHVTFAGVPIPRSPYTVTVGQACNPSACRAVGRGLQPKGVRVKETADFKVYTKGAGSGELKVTVKGPKGEERVKQKDLGDGVYGFEYYPMVPGTYIVTITWGGQNIGRSPFEVKVGTECGNQKVRAWGPGLEGGVVGKSADFVVEAIGDDVGTLGFSVEGPSQAKIECDDKGDGSCDVRYWPQEAGEYAVHVLCNSEDIRLSPFMADIRDAPQDFHPDRVKARGPGLEKTGVAVNKPAEFTVDAKHGGKAPLRVQVQDNEGCPVEALVKDNGNGTYSCSYVPRKPVKHTAMVSWGGVSIPNSPFRVNVGAGSHPNKVKVYGPGVAKTGLKAHEPTYFTVDCAEAGQGDVSIGIKCAPGVVGPAEADIDFDIIRNDNDTFTVKYTPRGAGSYTIMVLFADQATPTSPIRVKVEPSHDASKVKAEGPGLSRTGVELGKPTHFTVNAKAAGKGKLDVQFSGLTKGDAVRDVDIIDHHDNTYTVKYTPVQQGPVGVNVTYGGDPIPKSPFSVAVSPSLDLSKIKVSGLGEKVDVGKDQEFTVKSKGAGGQGKVASKIVGPSGAAVPCKVEPGLGADNSVVRFLPREEGPYEVEVTYDGVPVPGSPFPLEAVAPTKPSKVKAFGPGLQGGSAGSPARFTIDTKGAGTGGLGLTVEGPCEAQLECLDNGDGTCSVSYVPTEPGDYNINILFADTHIPGSPFKAHVVPCFDASKVKCSGPGLERATAGEVGQFQVDCSSAGSAELTIEICSEAGLPAEVYIQDHGDGTHTITYIPLCPGAYTVTIKYGGQPVPNFPSKLQVEPAVDTSGVQCYGPGIEGQGVFREATTEFSVDARALTQTGGPHVKARVANPSGNLTETYVQDRGDGMYKVEYTPYEEGLHSVDVTYDGSPVPSSPFQVPVTEGCDPSRVRVHGPGIQSGTTNKPNKFTVETRGAGTGGLGLAVEGPSEAKMSCMDNKDGSCSVEYIPYEAGTYSLNVTYGGHQVPGSPFKVPVHDVTDASKVKCSGPGLSPGMVRANLPQSFQVDTSKAGVAPLQVKVQGPKGLVEPVDVVDNADGTQTVNYVPSREGPYSISVLYGDEEVPRSPFKVKVLPTHDASKVKASGPGLNTTGVPASLPVEFTIDAKDAGEGLLAVQITDPEGKPKKTHIQDNHDGTYTVAYVPDVTGRYTILIKYGGDEIPFSPYRVRAVPTGDASKCTVTVSIGGHGLGAGIGPTIQIGEETVITVDTKAAGKGKVTCTVCTPDGSEVDVDVVENEDGTFDIFYTAPQPGKYVICVRFGGEHVPNSPFQVTALAGDQPSVQPPLRSQQLAPQYTYAQGGQQTWAPERPLVGVNGLDVTSLRPFDLVIPFTIKKGEITGEVRMPSGKVAQPTITDNKDGTVTVRYAPSEAGLHEMDIRYDNMHIPGSPLQFYVDYVNCGHVTAYGPGLTHGVVNKPATFTVNTKDAGEGGLSLAIEGPSKAEISCTDNQDGTCSVSYLPVLPGDYSILVKYNEQHVPGSPFTARVTGDDSMRMSHLKVGSAADIPINISETDLSLLTATVVPPSGREEPCLLKRLRNGHVGISFVPKETGEHLVHVKKNGQHVASSPIPVVISQSEIGDASRVRVSGQGLHEGHTFEPAEFIIDTRDAGYGGLSLSIEGPSKVDINTEDLEDGTCRVTYCPTEPGNYIINIKFADQHVPGSPFSVKVTGEGRVKESITRRRRAPSVANVGSHCDLSLKIPEISIQDMTAQVTSPSGKTHEAEIVEGENHTYCIRFVPAEMGTHTVSVKYKGQHVPGSPFQFTVGPLGEGGAHKVRAGGPGLERAEAGVPAEFSIWTREAGAGGLAIAVEGPSKAEISFEDRKDGSCGVAYVVQEPGDYEVSVKFNEEHIPDSPFVVPVASPSGDARRLTVSSLQESGLKVNQPASFAVSLNGAKGAIDAKVHSPSGALEECYVTEIDQDKYAVRFIPRENGVYLIDVKFNGTHIPGSPFKIRVGEPGHGGDPGLVSAYGAGLEGGVTGNPAEFVVNTSNAGAGALSVTIDGPSKVKMDCQECPEGYRVTYTPMAPGSYLISIKYGGPYHIGGSPFKAKVTGPRLVSNHSLHETSSVFVDSLTKATCAPQHGAPGPGPADASKVVAKGLGLSKAYVGQKSSFTVDCSKAGNNMLLVGVHGPRTPCEEILVKHVGSRLYSVSYLLKDKGEYTLVVKWGDEHIPGSPYRVVVP

SEQ ID NO: 8682 - protein, 354 aa, Homo sapiens
MGCTLSAEDKAAVERSKMIDRNLREDGEKAAKEVKLLLLGAGESGKSTIVKQMKIIHEDGYSEDECKQYKVVVYSNTIQSIIAIIRAMGRLKIDFGEAARADDARQLFVLAGSAEEGVMTPELAGVIKRLWRDGGVQACFSRSREYQLNDSASYYLNDLDRISQSNYIPTQQDVLRTRVKTTGIVETHFTFKDLYFKMFDVGGQRSERKKWIHCFEGVTAIIFCVALSDYDLVLAEDEEMNRMHESMKLFDSICNNKWFTETSIILFLNKKDLFEEKIKRSPLTICYPEYTGSNTYEEAAAYIQCQFEDLNRRKDTKEIYTHFTCATDTKNVQFVFDAVTDVIIKNNLKECGLY

SEQ ID NO: 8683 - protein, 493 aa, Homo sapiens
MHPHRDPRGLWLLLPSLSLLLFEVARAGRAVVSCPAACLCASNILSCSKQQLPNVPHSLPSYTALLDLSHNNLSRLRAEWTPTRLTQLHSLLLSHNHLNFISSEAFSPVPNLRYLDLSSNQLRTLDEFLFSDLQVLEVLLLYNNHIMAVDRCAFDDMAQLQKLYLSQNQISRFPLELVKEGAKLPKLTLLDLSSNKLKNLPLPDLQKLPAWIKNGLYLHNNPLNCDCELYQLFSHWQYRQLSSVMDFQEDLYCMNSKKLHNVFNLSFLNCGEYKERAWEAHLGDTLIIKCDTKQQGMTKVWVTPSNERVLDEVTNGTVSVSKDGSLLFQQVQVEDGGVYTCYAMGETFNETLSVELKVHNFTLHGHHDTLNTAYTTLVGCILSVVLVLIYLYLTPCRCWCRGVEKPSSHQGDSLSSSMLSTTPNHDPMAGGDKDDGFDRRVAFLEPAGPGQGQNGKLKPGNTLPVPEATGKGQRRMSDPESVSSVFSDTPIVV

SEQ ID NO: 8684 - protein, 272 aa, Homo sapiens
MSSTESAGRTADKSPRQQVDRLLVGLRWRRLEEPLGFIKVLQWLFAIFAFGSCGSYSGETGAMVRCNNEAKDVSSIIVAFGYPFRLHRIQYEMPLCDEESSSKTMHLMGDFSAPAEFFVTLGIFSFFYTMAALVIYLRFHNLYTENKRFPLVDFCVTVSFTFFWLVAAAAWGKGLTDVKGATRPSSLTAAMSVCHGEEAVCSAGATPSMGLANISVLFGFINFFLWAGNCWFVFKETPWHGQGQGQDQDQDQDQGQGPSQESAAEQGAVEKQ

SEQ ID NO: 8685 - protein, 508 aa, Homo sapiens
MWELVALLLLTLAYLFWPKRRCPGAKYPKSLLSLPLVGSLPFLPRHGHMHNNFFKLQKKYGPIYSVRMGTKTTVIVGHHQLAKEVLIKKGKDFSGRPQMATLDIASNNRKGIAFADSGAHWQLHRRLAMATFALFKDGDQKLEKIICQEISTLCDMLATHNGQSIDISFPVFVAVTNVISLICFNTSYKNGDPELNVIQNYNEGIIDNLSKDSLVDLVPWLKIFPNKTLEKLKSHVKIRNDLLNKILENYKEKFRSDSITNMLDTLMQAKMNSDNGNAGPDQDSELLSDNHILTTIGDIFGAGVETTTSVVKWTLAFLLHNPQVKKKLYEEIDQNVGFSRTPTISDRNRLLLLEATIREVLRLRPVAPMLIPHKANVDSSIGEFAVDKGTEVIINLWALHHNEKEWHQPDQFMPERFLNPAGTQLISPSVSYLPFGAGPRSCIGEILARQELFLIMAWLLQRFDLEVPDDGQLPSLEGIPKVVFLIDSFKVKIKVRQAWREAQAEGST

SEQ ID NO: 8686 - protein, 892 aa, Homo sapiens
MTDPFCVGGRRLPGSSKSGPGKDGSRKEVRLPMLHDPPKMGMPVVRGGQTVPGQAPLCFDPGSPASDKTEGKKKGRPKAENQALRDIPLSLMNDWKDEFKAHSRVKCPNSGCWLEFPSIYGLKYHYQRCQGGAISDRLAFPCPFCEAAFTSKTQLEKHRIWNHMDRPLPASKPGPISRPVTISRPVGVSKPIGVSKPVTIGKPVGVSKPIGISKPVSVGRPMPVTKAIPVTRPVPVTKPVTVSRPMPVTKAMPVTKPITVTKSVPVTKPVPVTKPITVTKLVTVTKPVPVTKPVTVSRPIVVSKPVTVSRPIAISRHTPPCKMVLLTRSENKAPRATGRNSGKKRAADSLDTCPIPPKQARPENGEYGPSSMGQSSAFQLSADTSSGSLSPGSRPSGGMEALKAAGPASPPEEDPERTKHRRKQKTPKKFTGEQPSISGTFGLKGLVKAEDKARVHRSKKQEGPGPEDARKKVPAAPITVSKEAPAPVAHPAPGGPEEQWQRAIHERGEAVCPTCNVVTRKTLVGLKKHMEVCQKLQDALKCQHCRKQFKSKAGLNYHTMAEHSAKPSDAEASEGGEQEERERLRKVLKQMGRLRCPQEGCGAAFSSLMGYQYHQRRCGKPPCEVDSPSFPCTHCGKTYRSKAGHDYHVRSEHTAPPPEEPTDKSPEAEDPLGVERTPSGRVRRTSAQVAVFHLQEIAEDELARDWTKRRMKDDLVPETARLNYTRPGLPTLNPQLLEAWKNEVKEKGHVNCPNDCCEAIYSSVSGLKAHLASCSKGAHLAGKYRCLLCPKEFSSESGVKYHILKTHAENWFRTSADPPPKHRSQDSLVPKKEKKKNLAGGKKRGRKPKERTPEEPVAKLPPRRDDWPPGCRDKGARGSTGRKVGVSKAPEK

SEQ ID NO: 8687 - protein, 342 aa, Homo sapiens
MPFLLGLRQDKEACVGTNNQSYICDTGHCCGQSQCCNYYYELWWFWLVWTIIIILSCCCVCHHRRAKHRLQAQQRQHEINLIAYREAHNYSALPFYFRFLPNYLLPPYEEVVNRPPTPPPPYSAFQLQQQQLLPPQCGPAGGSPPGIDPTRGSQGAQSSPLSEPSRSSTRPPSIADPDPSDLPVDRAATKAPGMEPSGSVAGLGELDPGAFLDKDAECREELLKDDSSEHGAPDSKEKTPGRHRRFTGDSGIEVCVCNRGHHDDDLKEFNTLIDDALDGPLDFCDSCHVRPPGDEEEGLCQSSEEQAREPGHPHLPRPPACLLLNTINEQDSPNSQSSSSPS

SEQ ID NO: 8688 - protein, 322 aa, Homo sapiens
MEADLSGFNIDAPRWDQRTFLGRVKHFLNITDPRTVFVSERELDWAKVMVEKSRMGVVPPGTQVEQLLYAKKLYDSAFHPDTGEKMNVIGRMSFQLPGGMIITGFMLQFYRTMPAVIFWQWVNQSFNALVNYTNRNAASPTSVRQMALSYFTATTTAVATAVGMNMLTKKAPPLVGRWVPFAAVAAANCVNIPMMRQQELIKGICVKDRNENEIGHSRRAAAIGITQVVISRITMSAPGMILLPVIMERLEKLHFMQKVKVLHAPLQVMLSGCFLIFMVPVACGLFPQKCELPVSYLEPKLQDTIKAKYGELEPYVYFNKGL

SEQ ID NO: 8689 - protein, 484 aa, Homo sapiens
MAELRPSGAPGPTAPPAPGPTAPPAFASLFPPGLHAIYGECRRLYPDQPNPLQVTAIVKYWLGGPDPLDYVSMYRNVGSPSANIPEHWHYISFGLSDLYGDNRVHEFTGTDGPSGFGFELTFRLKRETGESAPPTWPAELMQGLARYVFQSENTFCSGDHVSWHSPLDNSESRIQHMLLTEDPQMQPVQTPFGVVTFLQIVGVCTEELHSAQQWNGQGILELLRTVPIAGGPWLITDMRRGETIFEIDPHLQERVDKGIETDGSNLSGVSAKCAWDDLSRPPEDDEDSRSICIGTQPRRLSGKDTEQIRETLRRGLEINSKPVLPPINPQRQNGLAHDRAPSRKDSLESDSSTAIIPHELIRTRQLESVHLKFNQESGALIPLCLRGRLLHGRHFTYKSITGDMAITFVSTGVEGAFATEEHPYAAHGPWLQILLTEEFVEKMLEDLEDLTSPEEFKLPKEYSWPEKKLKVSILPDVVFDSPLH

SEQ ID NO: 8690 - protein, 376 aa, Homo sapiens
MESYDVIANQPVVIDNGSGVIKAGFAGDQIPKYCFPNYVGRPKHVRVMAGALEGDIFIGPKAEEHRGLLSIRYPMEHGIVKDWNDMERIWQYVYSKDQLQTFSEEHPVLLTEAPLNPRKNRERAAEVFFETFNVPALFISMQAVLSLYATGRTTGVVLDSGDGVTHAVPIYEGFAMPHSIMRIDIAGRDVSRFLRLYLRKEGYDFHSSSEFEIVKAIKERACYLSINPQKDETLETEKAQYYLPDGSTIEIGPSRFRAPELLFRPDLIGEESEGIHEVLVFAIQKSDMDLRRTLFSNIVLSGGSTLFKGFGDRLLSEVKKLAPKDVKIRISAPQERLYSTWIGGSILASLDTFKKMWVSKKEYEEDGARSIHRKTF

SEQ ID NO: 8691 - protein, 536 aa, Homo sapiens
MVLDLDLFRVDKGGDPALIRETQEKRFKDPGLVDQLVKADSEWRRCRFRADNLNKLKNLCSKTIGEKMKKKEPVGDDESVPENVLSFDDLTADALANLKVSQIKKVRLLIDEAILKCDAERIKLEAERFENLREIGNLLHPSVPISNDEDVDNKVERIWGDCTVRKKYSHVDLVVMVDGFEGEKGAVVAGSRGYFLKGVLVFLEQALIQYALRTLGSRGYIPIYTPFFMRKEVMQEVAQLSQFDEELYKVIGKGSEKSDDNSYDEKYLIATSEQPIAALHRDEWLRPEDLPIKYAGLSTCFRQEVGSHGRDTRGIFRVHQFEKIEQFVYSSPHDNKSWEMFEEMITTAEEFYQSLGIPYHIVNIVSGSLNHAASKKLDLEAWFPGSGAFRELVSCSNCTDYQARRLRIRYGQTKKMMDKRKNNLHLSTQNKLEASLFSPKKVEFVHMLNATMCATTRTICAILENYQTEKGITVPEKLKEFMPPGLQELIPFVKPAPIEQEPSKKQKKQHEGSKKKAAARDVTLENRLQNMEVTDA

SEQ ID NO: 8692 - protein, 287 aa, Homo sapiens
MELERIVSAALLAFVQTHLPEADLSGLDEVIFSYVLGVLEDLGPSGPSEENFDMEAFTEMMEAYVPGFAHIPRGTIGDMMQKLSGQLSDARNKENLQPQSSGVQGQVPISPEPLQRPEMLKEETRSSAAAAADTQDEATGAEEELLPGVDVLLEVFPTCSVEQAQWVLAKARGDLEEAVQMLVEGKEEGPAAWEGPNQDLPRRLRGPQKDELKSFILQKYMMVDSAEDQKIHRPMAPKEAPKKLIRYIDNQVVSTKGERFKDVRNPEAEEMKATYINLKPARKYRFH

SEQ ID NO: 8693 - protein, 296 aa, Homo sapiens
MEPSGGEQEPGAVRFLDLPWEDVLLPHVLNRVPLRQLLRLQRVSRAFRSLVQLHLAGLRRFDAAQVGPQIPRAALARLLRDAEGLQELALAPCHEWLSDEDLVPVLARNPQLRSVALGGCGQLSRRALGALAEGCPRLQRLSLAHCDWVDGLALRGLADRCPALEELDLTACRQLKDEAIVYLAQRRGAGLRSLSLAVNANVGDAAVQELARNCPELHHLDLTGCLRVGSDGVRTLAEYCPVLRSLRVRHCHHVAESSLSRLRKRGVDIDVEPPLHQALVLLQDMAGFAPFVNLQV

SEQ ID NO: 8694 - protein, 919 aa, Homo sapiens
MTAEETVNVKEVEIIKLILDFLNSKKLHISMLALEKESGVINGLFSDDMLFLRQLILDGQWDEVLQFIQPLECMEKFDKKRFRYIILKQKFLEALCVNNAMSAEDEPQHLEFTMQEAVQCLHALEEYCPSKDDYSKLCLLLTLPRLTNHAEFKDWNPSTARVHCFEEACVMVAEFIPADRKLSEAGFKASNNRLFQLVMKGLLYECCVEFCQSKATGEEITESEVLLGIDLLCGNGCDDLDLSLLSWLQNLPSSVFSCAFEQKMLNIHVDKLLKPTKAAYADLLTPLISKLSPYPSSPMRRPQSADAYMTRSLNPALDGLTCGLTSHDKRISDLGNKTSPMSHSFANFHYPGVQNLSRSLMLENTECHSIYEESPERDTPVDAQRPIGSEILGQSSVSEKEPANGAQNPGPAKQEKNELRDSTEQFQEYYRQRLRYQQHLEQKEQQRQIYQQMLLEGGVNQEDGPDQQQNLTEQFLNRSIQKLGELNIGMDGLGNEVSALNQQCNGSKGNGSNGSSVTSFTTPPQDSSQRLTHDASNIHTSTPRNPGSTNHIPFLEESPCGSQISSEHSVIKPPLGDSPGSLSRSKGEEDDKSKKQFVCINILEDTQAVRAVAFHPAGGLYAVGSNSKTLRVCAYPDVIDPSAHETPKQPVVRFKRNKHHKGSIYCVAWSPCGQLLATGSNDKYVKVLPFNAETCNATGPDLEFSMHDGTIRDLAFMEGPESGGAILISAGAGDCNIYTTDCQRGQGLHALSGHTGHILALYTWSGWMIASGSQDKTVRFWDLRVPSCVRVVGTTFHGTGSAVASVAVDPSGRLLATGQEDSSCMLYDIRGGRMVQSYHPHSSDVRSVRFSPGAHYLLTGSYDMKIKVTDLQGDLTKQLPIMVVGEHKDKVIQCRWHTQDLSFLSSSADRTVTLWTYNG

SEQ ID NO: 8695 - protein, 920 aa, Homo sapiens
MTAEETVNVKEVEIIKLILDFLNSKKLHISMLALEKESGVINGLFSDDMLFLRQLILDGQWDEVLQFIQPLECMEKFDKKRFRYIILKQKFLEALCVNNAMSAEDEPQHLEFTMQEAVQCLHALEEYCPSKDDYSKLCLLLTLPRLTNHAEFKDWNPSTARVHCFEEACVMVAEFIPADRKLSEAGFKASNNRLFQLVMKGLLYECCVEFCQSKATGEEITESEVLLGIDLLCGNGCDDLDLSLLSWLQNLPSSVFSCAFEQKMLNIHVDKLLKPTKAAYADLLTPLISKLSPYPSSPMRRPQSADAYMTRSLNPALDGLTCGLTSHDKRISDLGNKTSPMSHSFANFHYPGVQNLSRSLMLENTECHSIYEESPERSDTPVDAQRPIGSEILGQSSVSEKEPANGAQNPGPAKQEKNELRDSTEQFQEYYRQRLRYQQHLEQKEQQRQIYQQMLLEGGVNQEDGPDQQQNLTEQFLNRSIQKLGELNIGMDGLGNEVSALNQQCNGSKGNGSNGSSVTSFTTPPQDSSQRLTHDASNIHTSTPRNPGSTNHIPFLEESPCGSQISSEHSVIKPPLGDSPGSLSRSKGEEDDKSKKQFVCINILEDTQAVRAVAFHPAGGLYAVGSNSKTLRVCAYPDVIDPSAHETPKQPVVRFKRNKHHKGSIYCVAWSPCGQLLATGSNDKYVKVLPFNAETCNATGPDLEFSMHDGTIRDLAFMEGPESGGAILISAGAGDCNIYTTDCQRGQGLHALSGHTGHILALYTWSGWMIASGSQDKTVRFWDLRVPSCVRVVGTTFHGTGSAVASVAVDPSGRLLATGQEDSSCMLYDIRGGRMVQSYHPHSSDVRSVRFSPGAHYLLTGSYDMKIKVTDLQGDLTKQLPIMVVGEHKDKVIQCRWHTQDLSFLSSSADRTVTLWTYNG

SEQ ID NO: 8696 - protein, 900 aa, Homo sapiens
MESCYNPGLDGIIEYDDFKLNSSIVEPKEPAPETADGPYLVIVEQPKQRGFRFRYGCEGPSHGGLPGASSEKGRKTYPTVKICNYEGPAKIEVDLVTHSDPPRAHAHSLVGKQCSELGICAVSVGPKDMTAQFNNLGVLHVTKKNMMGTMIQKLQRQRLRSRPQGLTEAEQRELEQEAKELKKVMDLSIVRLRFSAFLRASDGSFSLPLKPVISQPIHDSKSPGASNLKISRMDKTAGSVRGGDEVYLLCDKVQKDDIEVRFYEDDENGWQAFGDFSPTDVHKQYAIVFRTPPYHKMKIERPVTVFLQLKRKRGGDVSDSKQFTYYPLVEDKEEVQRKRRKALPTFSQPFGGGSHMGGGSGGAAGGYGGAGGGGSLGFFPSSLAYSPYQSGAGPMGCYPGGGGGAQMAATVPSRDSGEEAAEPSAPSRTPQCEPQAPEMLQRAREYNARLFGLAQRSARALLDYGVTADARALLAGQRHLLTAQDENGDTPLHLAIIHGQTSVIEQIVYVIHHAQDLGVVNLTNHLHQTPLHLAVITGQTSVVSFLLRVGADPALLDRHGDSAMHLALRAGAGAPELLRALLQSGAPAVPQLLHMPDFEGLYPVHLAVRARSPECLDLLVDSGAEVEATERQGGRTALHLATEMEELGLVTHLVTKLRANVNARTFAGNTPLHLAAGLGYPTLTRLLLKAGADIHAENEEPLCPLPSPPTSDSDSDSEGPEKDTRSSFRGHTPLDLTCSTKVKTLLLNAAQNTMEPPLTPPSPAGPGLSLGDTALQNLEQLLDGPEAQGSWAELAERLGLRSLVDTYRQTTSPSGSLLRSYELAGGDLAGLLEALSDMGLEEGVRLLRGPETRDKLPSTAEVKEDSAYGSQSVEQEAEKLGPPPEPPGGLCHGHPQPQVH

SEQ ID NO: 8697 - protein, 501 aa, Homo sapiens
MLCSLLLCECLLLVAGYAHDDDWIDPTDMLNYDAASGTMRKSQAKYGISGEKDVSPDLSCADEISECYHKLDSLTYKIDECEKKKREDYESQSNPVFRRYLNKILIEAGKLGLFHDFETWKWRFEDSFGVDPYNVLMVLLCLLCIVVLVATELWTYVRWYTQLRRVLIISFLFSLGWNWMYLYKLAFAQHQAEVAKMEPLNNVCAKKMDWTGSIWEWFRSSWTYKDDPCQKYYELLLVNPIWLVPPTKALAVTFTTFVTEPLKHIGKGTGEFIKALMKEIPALLHLPVLIIMALAILSFCYGAGKSVHVLRHIGGPESEPPQALRPRDRRRQEEIDYRPDGGAGDADFHYRGQMGPTEQGPYAKTYEGRREILRERDVDLRFQTGNKSPEVLRAFDVPDAEAREHPTVVPSHKSPVLDTKPKETGGILGEGTPKESSTESSQSAKPVSGQDTSGNTEGSPAAEKAQLKSEAAGSPDQGSTYSPARGVAGPRGQDPVSSPCG

SEQ ID NO: 8698 - protein, 1253 aa, Homo sapiens
MEDGKPVWAPHPTDGFQMGNIVDIGPDSLTIEPLNQKGKTFLALINQVFPAEEDSKKDVEDNCSLMYLNEATLLHNIKVRYSKDRIYTYVANILIAVNPYFDIPKIYSSEAIKSYQGKSLGTRPPHVFAIADKAFRDMKVLKMSQSIIVSGESGAGKTENTKFVLRYLTESYGTGQDIDDRIVEANPLLEAFGNAKTVRNNNSSRFGKFVEIHFNEKSSVVGGFVSHYLLEKSRICVQGKEERNYHIFYRLCAGASEDIREKLHLSSPDNFRYLNRGCTRYFANKETDKQILQNRKSPEYLKAGSMKDPLLDDHGDFIRMCTAMKKIGLDDEEKLDLFRVVAGVLHLGNIDFEEAGSTSGGCNLKNKSAQSLEYCAELLGLDQDDLRVSLTTRVMLTTAGGTKGTVIKVPLKVEQANNARDALAKTVYSHLFDHVVNRVNQCFPFETSSYFIGVLDIAGFEYFEHNSFEQFCINYCNEKLQQFFNERILKEEQELYQKEGLGVNEVHYVDNQDCIDLIEAKLVGILDILDEENRLPQPSDQHFTSAVHQKHKDHFRLTIPRKSKLAVHRNIRDDEGFIIRHFAGAVCYETTQFVEKNNDALHMSLESLICESRDKFIRELFESSTNNNKDTKQKAGKLSFISVGNKFKTQLNLLLDKLRSTGASFIRCIKPNLKMTSHHFEGAQILSQLQCSGMVSVLDLMQGGYPSRASFHELYNMYKKYMPDKLARLDPRLFCKALFKALGLNENDYKFGLTKVFFRPGKFAEFDQIMKSDPDHLAELVKRVNHWLTCSRWKKVQWCSLSVIKLKNKIKYRAEACIKMQKTIRMWLCKRRHKPRIDGLVKVGTLKKRLDKFNEVVSVLKDGKPEMNKQIKNLEISIDTLMAKIKSTMMTQEQIQKEYDALVKSSEELLSALQKKKQQEEEAERLRRIQEEMEKERKRREEDEKRRRKEEEERRMKLEMEAKRKQEEEERKKREDDEKRIQAEVEAQLARQKEEESQQQAVLEQERRDRELALRIAQSEAELISDEAQADLALRRGPAVLATKAAAGTKKYDLSKWKYAELRDTINTSCDIELLAACREEFHRRLKVYHAWKSKNKKRNTETEQRAPKSVTDYAQQNPAAQIPARQREIEMNRQQRFFRIPFIRPADQYKDPQSKKKGWWYAHFDGPWIARQMELHPDKPPILLVAGKDDMEMCELNLEETGLTRKRGAEILPRQFEEIWERCGGIQYLQNAIESRQARPTYATAMLQSLLK

SEQ ID NO: 8699 - protein, 262 aa, Homo sapiens
MLCSLLLCECLLLVAGYAHDDDWIDPTDMLNYDAASGTMRKSQAKYGISGEKDVSPDLSCADEISECYHKLDSLTYKIDECEKKKREDYESQSNPVFRRYLNKILIEAGKLGLPDENKGDMHYDAEIILKRETLLEIQKFLNGEDWKPGALDDALSDILINFKFHDFETWKWRFEDSFGVDPYNVLMVLLCLLCIVVLVATELWTYVRWYTQLRRVLIISCAQSEASRVKQVGNLFQAWAFAVCDPVLLQVPVCPILVFCYS

SEQ ID NO: 8700 - protein, 712 aa, Homo sapiens
MAGGPGPGEPAAPGAQHFLYEVPPWVMCRFYKVMDALEPADWCQFAALIVRDQTELRLCERSGQRTASVLWPWINRNARVADLVHILTHLQLLRARDIITAWHPPAPLPSPGTTAPRPSSIPAPAEAEAWSPRKLPSSASTFLSPAFPGSQTHSGPELGLVPSPASLWPPPPSPAPSSTKPGPESSVSLLQGARPFPFCWPLCEISRGTHNFSEELKIGEGGFGCVYRAVMRNTVYAVKRLKENADLEWTAVKQSFLTEVEQLSRFRHPNIVDFAGYCAQNGFYCLVYGFLPNGSLEDRLHCQTQACPPLSWPQRLDILLGTARAIQFLHQDSPSLIHGDIKSSNVLLDERLTPKLGDFGLARFSRFAGSSPSQSSMVARTQTVRGTLAYLPEEYIKTGRLAVDTDTFSFGVVVLETLAGQRAVKTHGARTKYLKDLVEEEAEEAGVALRSTQSTLQAGLAADAWAAPIAMQIYKKHLDPRPGPCPPELGLGLGQLACCCLHRRAKRRPPMTQVYERLEKLQAVVAGVPGHSEAASCIPPSPQENSYVSSTGRAHSGAAPWQPLAAPSGASAQAAEQLQRGPNQPVESDESLGGLSAALRSWHLTPSCPLDPAPLREAGCPQGDTAGESSWGSGPGSRPTAVEGLALGSSASSSSEPPQIIINPARQKMVQKLALYEDGALDSLQLLSSSSLPGLGLEQDRQGPEESDEFQS

SEQ ID NO: 8701 - protein, 261 aa, Homo sapiens
MNPEWGQAFVHVAVAGGLCAVAVFTGIFDSVSVQVGYEHYAEAPVAGLPAFLAMPFNSLVNMAYTLLGLSWLHRGGAMGLGPRYLKDVFAAMALLYGPVQWLRLWTQWRRAAVLDQWLTLPIFAWPVAWCLYLDRGWRPWLFLSLECVSLASYGLALLHPQGFEVALGAHVVAAVGQALRTHRHYGSTTSATYLALGVLSCLGFVVLKLCDHQLARWRLFQCLTGHFWSKVCDVLQFHFAFLFLTHFNTHPRFHPSGGKTR

SEQ ID NO: 8702 - protein, 1859 aa, Homo sapiens
MVDKNIYIIQGEINIVVGAIKRNARWSTHTPLDEERDPLLHSFGHLKEVLNSITELSEIEPNVFLRPFLEVIRSEDTTGPITGLALTSVNKFLSYALIDPTHEGTAEGMENMADAVTHARFVGTDPASDEVVLMKILQVLRTLLLTPVGAHLTNESVCEIMQSCFRICFEMRLSELLRKSAEHTLVDMVQLLFTRLPQFKEEPKNYVGTNMKKLKMRAGGMSDSSKWKKQKRSPRPPRHMTKVTPGSELPTPNGTTLSSNLTGGMPFIDVPTPISSASSEAASAVVSPSTDSGLEFSSQTTSKEDLTDLEQPGSPGYSTATEPGSSELGVPEQPDLQEGTHVEKSQSASVESIPEVLEECTSPADHSDSASVHDMDYVNPRGVRFTQSSQKEGTALVPYGLPCIRELFRFLISLTNPHDRHNSEVMIHMGLHLLTVALESAPVAQCQTLLGLIKDEMCRHLFQLLSIERLNLYAASLRVCFLLFESMREHLKFQMEMYIKKLMEIITVENPKMPYEMKEMALEAIVQLWRIPSFVTELYINYDCDYYCSNLFEELTKLLSKNAFPVSGQLYTTHLLSLDALLTVIDSTEAHCQAKVLNSLTQQEKKETARPSCEIVDGTREASNTERTASDGKAVGMASDIPGLHLPGGGRLPPEHGKSGCSDLEEAVDSGADKKFARKPPRFSCLLPDPRELIEIKNKKKLLITGTEQFNQKPKKGIQFLQEKGLLTIPMDNTEVAQWLRENPRLDKKMIGEFVSDRKNIDLLESFVSTFSFQGLRLDEALRLYLEAFRLPGEAPVIQRLLEAFTERWMNCNGSPFANSDACFSLAYAVIMLNTDQHNHNVRKQNAPMTLEEFRKNLKGVNGGKDFEQDILEDMYHAIKNEEIVMPEEQTGLVRENYVWNVLLHRGATPEGIFLRVPTASYDLDLFTMTWGPTIAALSYVFDKSLEETIIQKAISGFRKCAMISAHYGLSDVFDNLIISLCKFTALSSESIENLPSVFGSNPKAHIAAKTVFHLAHRHGDILREGWKNIMEAMLQLFRAQLLPKAMIEVEDFVDPNGKISLQREETPSNRGESTVLSFVSWLTLSGPEQSSVRGPSTENQEAKRVALECIKQCDPEKMITESKFLQLESLQELMKALVSVTPDEETYDEEDAAFCLEMLLRIVLENRDRVGCVWQTVRDHLYHLCVQAQDFCFLVERAVVGLLRLAIRLLRREEISAQVLLSLRILLLMKPSVLSRVSHQVAYGLHELLKTNAANIHSGDDWATLFTLLECIGSGVKPPAALQATARADAPDAGAQSDSELPSYHQNDVSLDRGYTSDSEVYTDHGRPGKIHRSATDADVVNSGWLVVGKDDVDNSKPGPSRPGPSPLINQYSLTVGLDLGPHDTKSLLKCVESLSFIVRDAAHITPDNFELCVKTLRIFVEASLNGGCKSQEKRGKSHKYDSKGNRFKKKSKEGSMLRRPRTSSQHASRGGQSDDDEDEGVPASYHTVSLQVSQDLLDLMHTLHTRAASIYSSWAEEQRHLETGGQKIEADSRTLWAHCWCPLLQGIACLCCDARRQVRMQALTYLQRALLVHDLQKLDALEWESCFNKVLFPLLTKLLENISPADVGGMEETRMRASTLLSKVFLQHLSPLLSLSTFAALWLTILDFMDKYMHAGSSDLLSEAIPESLKNMLLVMDTAEIFHSADARGGGPSALWEITWERIDCFLPHLRDELFKQTVIQDPMPMEPQGQKPLASAHLTSAAGDTRTPGHPPPPEIPSELGACDFEKPESPRAASSSSPGSPVASSPSRLSPTPDGPPPLAQPPLILQPLASPLQVGVPPMTLPIILNPALIEATSPVPLLATPRPTDPIPTSEVN

SEQ ID NO: 8703 - protein, 2080 aa, Homo sapiens
MASAVSPANLPAVLLQPRWKRVVGWSGPVPRPRHGHRAVAIKELIVVFGGGNEGIVDELHVYNTATNQWFIPAVRGDIPPGCAAYGFVCDGTRLLVFGGMVEYGKYSNDLYELQASRWEWKRLKAKTPKNGPPPCPRLGHSFSLVGNKCYLFGGLANDSEDPKNNIPRYLNDLYILELRPGSGVVAWDIPITYGVLPPPRESHTAVVYTEKDNKKSKLVIYGGMSGCRLGDLWTLDIDTLTWNKPSLSGVAPLPRSLHSATTIGNKMYVFGGWVPLVMDDVKVATHEKEWKCTNTLACLNLDTMAWETILMDTLEDNIPRARAGHCAVAINTRLYIWSGRDGYRKAWNNQVCCKDLWYLETEKPPPPARVQLVRANTNSLEVSWGAVATADSYLLQLQKYDIPATAATATSPTPNPVPSVPANPPKSPAPAAAAPAVQPLTQVGITLLPQAAPAPPTTTTIQVLPTVPGSSISVPTAARTQGVPAVLKVTGPQATTGTPLVTMRPASQAGKAPVTVTSLPAGVRMVVPTQSAQGTVIGSSPQMSGMAALAAAAAATQKIPPSSAPTVLSVPAGTTIVKTMAVTPGTTTLPATVKVASSPVMVSNPATRMLKTAAAQVGTSVSSATNTSTRPIITVHKSGTVTVAQQAQVVTTVVGGVTKTITLVKSPISVPGGSALISNLGKVMSVVQTKPVQTSAVTGQASTGPVTQIIQTKGPLPAGTILKLVTSADGKPTTIITTTQASGAGTKPTILGISSVSPSTTKPGTTTIIKTIPMSAIITQAGATGVTSSPGIKSPITIITTKVMTSGTGAPAKIITAVPKIATGHGQQGVTQVVLKGAPGQPGTILRTVPMGGVRLVTPVTVSAVKPAVTTLVVKGTTGVTTLGTVTGTVSTSLAGAGGHSTSASLATPITTLGTIATLSSQVINPTAITVSAAQTTLTAAGGLTTPTITMQPVSQPTQVTLITAPSGVEAQPVHDLPVSILASPTTEQPTATVTIADSGQGDVQPGTVTLVCSNPPCETHETGTTNTATTTVVANLGGHPQPTQVQFVCDRQEAAASLVTSTVGQQNGSVVRVCSNPPCETHETGTTNTATTATSNMAGQHGCSNPPCETHETGTTNTATTAMSSVGANHQRDARRACAAGTPAVIRISVATGALEAAQGSKSQCQTRQTSATSTTMTVMATGAPCSAGPLLGPSMAREPGGRSPAFVQLAPLSSKVRLSSPSIKDLPAGRHSHAVSTAAMTRSSVGAGEPRMAPVCESLQGGSPSTTVTVTALEALLCPSATVTQVCSNPPCETHETGTTNTATTSNAGSAQRVCSNPPCETHETGTTHTATTATSNGGTGQPEGGQQPPAGRPCETHQTTSTGTTMSVSVGALLPDATSSHRTVESGLEVAAAPSVTPQAGTALLAPFPTQRVCSNPPCETHETGTTHTATTVTSNMSSNQDPPPAASDQGEVESTQGDSVNITSSSAITTTVSSTLTRAVTTVTQSTPVPGPSVPKISSMTETAPRALTTEVPIPAKITVTIANTETSDMPFSAVDILQPPEELQVSPGPRQQLPPRQLLQSASTALMGESAEVLSASQTPELPAAVDLSSTGEPSSGQESAGSAVVATVVVQPPPPTQSEVDQLSLPQELMAEAQAGTTTLMVTGLTPEELAVTAAAEAAAQAAATEEAQALAIQAVLQAAQQAVMAGTGEPMDTSEAAATVTQAELGHLSAEGQEGQATTIPIVLTQQELAALVQQQQLQEAQAQQQHHHLPTEALAPADSLNDPAIESNCLNELAGTVPSTVALLPSTATESLAPSNTFVAPQPVVVASPAKLQAAATLTEVANGIESLGVKPDLPPPPSKAPMKKENQWFDVGVIKGTNVMVTHYFLPPDDAVPSDDDLGTVPDYNQLKKQELQPGTAYKFRVAGINACGRGPFSEISAFKTCLPGFPGAPCAIKISKSPDGAHLTWEPPSVTSGKIIEYSVYLAIQSSQAGGELKSSTPAQLAFMRVYCGPSPSCLVQSSSLSNAHIDYTTKPAIIFRIAARNEKGYGPATQVRWLQETSKDSSGTKPANKRPMSSPEMKSAPKKSKADGQ

SEQ ID NO: 8704 - protein, 1262 aa, Homo sapiens
MEDGKPVWAPHPTDGFQMGNIVDIGPDSLTIEPLNQKGKTFLALINQVFPAEEDSKKDVEDNCSLMYLNEATLLHNIKVRYSKDRIYTYVANILIAVNPYFDIPKIYSSEAIKSYQGKSLGTRPPHVFAIADKAFRDMKVLKMSQSIIVSGESGAGKTENTKFVLRYLTESYGTGQDIDDRIVEANPLLEAFGNAKTVRNNNSSRFGKFVEIHFNEKSSVVGGFVSHYLLEKSRICVQGKEERNYHIFYRLCAGASEDIREKLHLSSPDNFRYLNRGCTRYFANKETDKQILQNRKSPEYLKAGSMKDPLLDDHGDFIRMCTAMKKIGLDDEEKLDLFRVVAGVLHLGNIDFEEAGSTSGGCNLKNKSAQSLEYCAELLGLDQDDLRVSLTTRVMLTTAGGTKGTVIKVPLKVEQANNARDALAKTVYSHLFDHVVNRVNQCFPFETSSYFIGVLDIAGFEYFEHNSFEQFCINYCNEKLQQFFNERILKEEQELYQKEGLGVNEVHYVDNQDCIDLIEAKLVGILDILDEENRLPQPSDQHFTSAVHQKHKDHFRLTIPRKSKLAVHRNIRDDEGFIIRHFAGAVCYETTQFVEKNNDALHMSLESLICESRDKFIRELFESSTNNNKDTKQKAGKLSFISVGNKFKTQLNLLLDKLRSTGASFIRCIKPNLKMTSHHFEGAQILSQLQCSGMVSVLDLMQGGYPSRASFHELYNMYKKYMPDKLARLDPRLFCKALFKALGLNENDYKFGLTKVFFRPGKFAEFDQIMKSDPDHLAELVKRVNHWLTCSRWKKVQWCSLSVIKLKNKIKYRAEACIKMQKTIRMWLCKRRHKPRIDGLVKVGTLKKRLDKFNEVVSVLKDGKPEMNKQIKNLEISIDTLMAKIKSTMMTQEQIQKEYDALVKSSEELLSALQKKKQQEEEAERLRRIQEEMEKERKRREEDEKRRRKEEEERRMKLEMEAKRKQEEEERKKREDDEKRIQAEVEAQLARQKEEESQQQAVLEQERRDRELALRIAQSEAELISDEAQADLALRRGPAVLATKAAAGTKKYDLSKWKYAELRDTINTSCDIELLAACREEFHRRLKVYHAWKSKNKKRNTETEQRAPKSVTDYDFAPFLNNSPQQNPAAQIPARQREIEMNRQQRFFRIPFIRPADQYKDPQSKKKGWWYAHFDGPWIARQMELHPDKPPILLVAGKDDMEMCELNLEETGLTRKRGAEILPRQFEEIWERCGGIQYLQNAIESRQARPTYATAMLQSLLK

SEQ ID NO: 8705 - protein, 300 aa, Homo sapiens
MRALEGPGLSLLCLVLALPALLPVPAVRGVAETPTYPWRDAETGERLVCAQCPPGTFVQRPCRRDSPTTCGPCPPRHYTQFWNYLERCRYCNVLCGEREEEARACHATHNRACRCRTGFFAHAGFCLEHASCPPGAGVIAPGTPSQNTQCQPCPPGTFSASSSSSEQCQPHRNCTALGLALNVPGSSSHDTLCTSCTGFPLSTRVPGAEECERAVIDFVAFQDISIKRLQRLLQALEAPEGWGPTPRAGRAALQLKLRRRLTELLGAQDGALLVRLLQALRVARMPGLERSVRERFLPVH

SEQ ID NO: 8706 - protein, 592 aa, Homo sapiens
MAPPVAERGLKSVVWQKIKATVFDDCKKEGEWKIMLLDEFTTKLLASCCKMTDLLEEGITVVENIYKNREPVRQMKALYFITPTSKSVDCFLHDFASKSENKYKAAYIYFTDFCPDNLFNKIKASCSKSIRRCKEINISFIPHESQVYTLDVPDAFYYCYSPDPGNAKGKDAIMETMADQIVTVCATLDENPGVRYKSKPLDNASKLAQLVEKKLEDYYKIDEKSLIKGKTHSQLLIIDRGFDPVSTVLHELTFQAMAYDLLPIENDTYKYKTDGKEKEAILEEEDDLWVRIRHRHIAVVLEEIPKLMKEISSTKKATEGKTSLSALTQLMKKMPHFRKQITKQVVHLNLAEDCMNKFKLNIEKLCKTEQDLALGTDAEGQKVKDSMRVLLPVLLNKNHDNCDKIRAILLYIFSINGTTEENLDRLIQNVKIENESDMIRNWSYLGVPIVPQSQQGKPLRKDRSAEETFQLSRWTPFIKDIMEDAIDNRLDSKEWPYCSQCPAVWNGSGAVSARQKPRANYLEDRKNGSKLIVFVIGGITYSEVRCAYEVSQAHKSCEVIIGSTHVLTPKKLLDDIKMLNKPKDKVSLIKDE

SEQ ID NO: 8707 - protein, 733 aa, Homo sapiens
MAGGRETCLPLIGFILICLKMVASAKSAPEIPTIDQAYSKLSNSITVEWATVPGATSYLLTAEDGDTVIETTVANSPGTVTGLKAATWYEITIRSISAAGRSQASPPKQAKTVLAAPILEVSSPSSDSILVQWEAVYMAIAFSVSIMRANGLGSIWKENTTNTSLTFTSLEAGTLYTIKAYAWNANRIPGDDSTCNQRTSPRAPANIQVSFDSGALKASFSWARAEGAFNYTVMALSDSSELTCSTTFSSCTISSLQCGTEYLISVLASNDAGSSKSSSAMTLKTVACAPGRVTIQEDPPGHLSVAWSSVDLGDYYVVFVKSDDGLEVHCNTSLTQCNFLSECGFTYFISVFVYNKAGQSPLGDIFNYTTAPCCPSDINPVLVSSDRVEIVWSPVRGAELYETKAVDGYNMVECNDTTPACTLSALECDTKYNITVYSFNEVRGSNMSCTPQFITTAPCSPEIKNVSRDAFSMINVHWRSTNDDATYTVTAQGEKGLYQCSSTGESCTMRGLPCGSVFSVTAVAETQAGRSLPSYSVPLETVPCCPTGLTVTQITQSVINVSWTIGRVAQTHVAVLESHTGQSKCHTHQNHCLLGCITCGINYTVTLKAISATGLTADCSYQSYFSGACCPLGVKLYRLGPNGIRIYWQASRGSANYSTDLYGSKGIFTCTPSAGLSFCDVTEIPCGDVYTVMVSPVAKTGLKLTFCPKKIYSVTCSGSTLGMVIYRGKRNEE

SEQ ID NO: 8708 - protein, 546 aa, Homo sapiens
MANNSPALTGNSQPQHQAAAAAAQQQQQCGGGGATKPAVSGKQGNVLPLWGNEKTMNLNPMILTNILSSPYFKVQLYELKTYHEVVDEIYFKVTHVEPWEKGSRKTAGQTGMCGGVRGVGTGGIVSTAFCLLYKLFTLKLTRKQVMGLITHTDSPYIRALGFMYIRYTQPPTDLWDWFESFLDDEEDLDVKAGGGCVMTIGEMLRSFLTKLEWFSTLFPRIPVPVQKNIDQQIKTRPRKIKKDGKEGAEEIDRHVERRRSRSPRRSLSPRRSPRRSRSRSHHREGHGSSSFDRELEREKERQRLEREAKEREKERRRSRSIDRGLERRRSRSRERHRSRSRSRDRKGDRRDRDREREKENERGRRRDRDYDKERGNEREKERERSRERSKEQRSRGEVEEKKHKEDKDDRRHRDDKRDSKKEKKHSRSRSRERKHRSRSRSRNAGKRSRSRSKEKSSKHKNESKEKSNKRSRSGSQGRTDSVEKSKKREHSPSKEKSRKRSRSKERSHKRDHSDSKDQSDKHDRRRSQSIEQESQEKQHKNKDETV

SEQ ID NO: 8709 - protein, 393 aa, Homo sapiens
MEENNLQCSSVVDGNFEEVPRETAIQFKPPLYRQRYQFVKNLVDQHEPKKVADLGCGDTSLLRLLKVNPCIELLVGVDINEDKLRWRGDSLAPFLGDFLKPRDLNLTITLYHGSVVERDSRLLGFDLITCIELIEHLDSGDLARFPEVVFGYLSPSMIVISTPNSEFNPLFPSVTLRDSDHKFEWTRMEFQTWALYVANRYDYSVEFTGVGEPPAGAENVGYCTQIGIFRKNGGKATESCLSEQHDQHVYKAVFTTSYPSLQQERFFKLVLVNEVSQQVESLRVSHLPRRKEQAGERGDKPKDIGGSKAPVPCFGPVFTEVEKAKIENSPTPFCVGDKFFVPLQRLLAYPKLNRLCANEEMMRSVIADSIPLSSDGSAVVADLRNYFDEQFEF

SEQ ID NO: 8710 - protein, 689 aa, Homo sapiens
MAQVEKRGGLLRKSSASKKPLKEKVVLMYDEIFMTEDPSKCSPRFWEELFLMKVNLEYLEGKLESLDGEELMKIKDNINCLFQHCIQALGEEHPIRVVNALQTLCALIRGVHQKNKSTSGFDIINMLMGFDKAELCMKNLMESLDSLLCAEGSESLKSLCLKLLLCLVTVTDNISQNTILEYVMINSIFEAILQILSHPPSRREHGYDAVVLLALLVNYRKYESVNPYIVKLSIVDDEATLNGMGLVIAQALSEYNRQYKDKEEEHQSGFFSALTNMVGSMFIADAHEKISVQTNEAILLALYEAVHLNRNFITVLAQSHPEMGLVTTPVSPAPTTPVTPLGTTPPSSDVISSVELPLDADVQTSNLLITFLKYSSIVMQDTKDEHRLHSGKLCLIILTCIAEDQYANAFLHDDNMNFRVNLHRMPMRHRKKAADKNLPCRPLVCAVLDLMVEFIVTHMMKEFPMDLYIRCIQVVHKLLCYQKKCRVRLHYTWRELWSALINLLKFLMSNETVLLAKHNIFTLALMIVNLFNMFITYGDTFLPTPSSYDELYYEIIRMHQSFDNLYSMVLRLSTNAGQWKEAASKVTHALVNIRAIINHFNPKIESYAAVNHISQLSEEQVLEVVRANYDTLTLKLQDGLDQYERYSEQHKEAAFFKELVRSISTNVRRNLAFHTLSQEVLLKEFSTIS

SEQ ID NO: 8711 - protein, 1257 aa, Homo sapiens
MVVALRYVWPLLLCSPCLLIQIPEEYEGHHVMEPPVITEQSPRRLVVFPTDDISLKCEASGKPEVQFRWTRDGVHFKPKEELGVTVYQSPHSGSFTITGNNSNFAQRFQGIYRCFASNKLGTAMSHEIRLMAEGAPKWPKETVKPVEVEEGESVVLPCNPPPSAEPLRIYWMNSKILHIKQDERVTMGQNGNLYFANVLTSDNHSDYICHAHFPGTRTIIQKEPIDLRVKATNSMIDRKPRLLFPTNSSSHLVALQGQPLVLECIAEGFPTPTIKWLRPSGPMPADRVTYQNHNKTLQLLKVGEEDDGEYRCLAENSLGSARHAYYVTVEAAPYWLHKPQSHLYGPGETARLDCQVQGRPQPEVTWRINGIPVEELAKDQKYRIQRGALILSNVQPSDTMVTQCEARNRHGLLLANAYIYVVQLPAKILTADNQTYMAVQGSTAYLLCKAFGAPVPSVQWLDEDGTTVLQDERFFPYANGTLGIRDLQANDTGRYFCLAANDQNNVTIMANLKVKDATQITQGPRSTIEKKGSRVTFTCQASFDPSLQPSITWRGDGRDLQELGDSDKYFIEDGRLVIHSLDYSDQGNYSCVASTELDVVESRAQLLVVGSPGPVPRLVLSDLHLLTQSQVRVSWSPAEDHNAPIEKYDIEFEDKEMAPEKWYSLGKVPGNQTSTTLKLSPYVHYTFRVTAINKYGPGEPSPVSETVVTPEAAPEKNPVDVKGEGNETTNMVITWKPLRWMDWNAPQVQYRVQWRPQGTRGPWQEQIVSDPFLVVSNTSTFVPYEIKVQAVNSQGKGPEPQVTIGYSGEDYPQAIPELEGIEILNSSAVLVKWRPVDLAQVKGHLRGYNVTYWREGSQRKHSKRHIHKDHVVVPANTTSVILSGLRPYSSYHLEVQAFNGRGSGPASEFTFSTPEGVPGHPEALHLECQSNTSLLLRWQPPLSHNGVLTGYVLSYHPLDEGGKGQLSFNLRDPELRTHNLTDLSPHLRYRFQLQATTKEGPGEAIVREGGTMALSGISDFGNISATAGENYSVVSWVPKEGQCNFRFHILFKALGEEKGGASLSPQYVSYNQSSYTQWDLQPDTDYEIHLFKERMFRHQMAVKTNGTGRVRLPPAGFATEGWFIGFVSAIILLLLVLLILCFIKRSKGGKYSVKDKEDTQVDSEARPMKDETFGEYRSLESDNEEKAFGSSQPSLNGDIKPLGSDDSLADYGGSVDVQFNEDGSFIGQYSGKKEKEAAGGNDSSGATSPINPAVALE

SEQ ID NO: 8712 - protein, 494 aa, Homo sapiens
MYLSRFLSIHALWVTVSSVMQPYPLVWGHYDLCKTQIYTEEGKVWDYMACQPESTDMTKYLKVKLDPPDITCGDPPETFCAMGNPYMCNNECDASTPELAHPPELMFDFEGRHPSTFWQSATWKEYPKPLQVNITLSWSKTIELTDNIVITFESGRPDQMILEKSLDYGRTWQPYQYYATDCLDAFHMDPKSVKDLSQHTVLEIICTEEYSTGYTTNSKIIHFEIKDRFAFFAGPRLRNMASLYGQLDTTKKLRDFFTVTDLRIRLLRPAVGEIFVDELHLARYFYAISDIKVRGRCKCNLHATVCVYDNSKLTCECEHNTTGPDCGKCKKNYQGRPWSPGSYLPIPKGTANTCIPSISSIGNCECFGHSNRCSYIDLLNTVICVSCKHNTRGQHCELCRLGYFRNASAQLDDENVCIANVCDNELLHCQNGGTCHNNVRCLCPAAYTGILCEKLRCEEAGSCGSDSGQGAPPHGSPALLLLTTLLGTASPLVF

SEQ ID NO: 8713 - protein, 480 aa, Homo sapiens
MYLSRFLSIHALWVTVSSVMQPYPLVWGHYDLCKTQIYTEEGKVWDYMACQPESTDMTKYLKVKLDPPDITCGDPPETFCAMGNPYMCNNECDASTPELAHPPELMFDFEGRHPSTFWQSATWKEYPKPLQVNITLSWSKTIELTDNIVITFESGRPDQMILEKSLDYGRTWQPYQYYATDCLDAFHMDPKSVKDLSQHTVLEIICTEEYSTGYTTNSKIIHFEIKDRFAFFAGPRLRNMASLYGQLDTTKKLRDFFTVTDLRIRLLRPAVGEIFVDELHLARYFYAISDIKVRGRCKCNLHATVCVYDNSKLTCECEHNTTGPDCGKCKKNYQGRPWSPGSYLPIPKGTANTCIPSISSIGNPPKFNRIWPNISSLEVSNPKQVAPKLALSTVSSVQVANHKRANVCDNELLHCQNGGTCHNNVRCLCPAAYTGILCEKLRCEEAGSCGSDSGQGAPPHGSPALLLLTTLLGTASPLVF

SEQ ID NO: 8714 - protein, 460 aa, Homo sapiens
MYLSRFLSIHALWVTVSSVMQPYPLVWGHYDLCKTQIYTEEGKVWDYMACQPESTDMTKYLKVKLDPPDITCGDPPETFCAMGNPYMCNNECDASTPELAHPPELMFDFEGRHPSTFWQSATWKEYPKPLQVNITLSWSKTIELTDNIVITFESGRPDQMILEKSLDYGRTWQPYQYYATDCLDAFHMDPKSVKDLSQHTVLEIICTEEYSTGYTTNSKIIHFEIKDRFAFFAGPRLRNMASLYGQLDTTKKLRDFFTVTDLRIRLLRPAVGEIFVDELHLARYFYAISDIKVRGRCKCNLHATVCVYDNSKLTCECEHNTTGPDCGKCKKNYQGRPWSPGSYLPIPKGTANTCIPSISSIGNPPKFNRIWPNISSLEVSNPKQANVCDNELLHCQNGGTCHNNVRCLCPAAYTGILCEKLRCEEAGSCGSDSGQGAPPHGSPALLLLTTLLGTASPLVF

SEQ ID NO: 8715 - protein, 539 aa, Homo sapiens
MYLSRFLSIHALWVTVSSVMQPYPLVWGHYDLCKTQIYTEEGKVWDYMACQPESTDMTKYLKVKLDPPDITCGDPPETFCAMGNPYMCNNECDASTPELAHPPELMFDFEGRHPSTFWQSATWKEYPKPLQVNITLSWSKTIELTDNIVITFESGRPDQMILEKSLDYGRTWQPYQYYATDCLDAFHMDPKSVKDLSQHTVLEIICTEEYSTGYTTNSKIIHFEIKDRFAFFAGPRLRNMASLYGQLDTTKKLRDFFTVTDLRIRLLRPAVGEIFVDELHLARYFYAISDIKVRGRCKCNLHATVCVYDNSKLTCECEHNTTGPDCGKCKKNYQGRPWSPGSYLPIPKGTANTCIPSISSIGNCECFGHSNRCSYIDLLNTVICVSCKHNTRGQHCELCRLGYFRNASAQLDDENVCIECYCNPLGSIHDRCNGSGFCECKTGTTGPKCDECLPGNSWHYGCQPNVCDNELLHCQNGGTCHNNVRCLCPAAYTGILCEKLRCEEAGSCGSDSGQGAPPHGSPALLLLTTLLGTASPLVF

SEQ ID NO: 8716 - protein, 438 aa, Homo sapiens
MYLSRFLSIHALWVTVSSVMQPYPLVWGHYDLCKTQIYTEEGKVWDYMACQPESTDMTKYLKVKLDPPDITCGDPPETFCAMGNPYMCNNECDASTPELAHPPELMFDFEGRHPSTFWQSATWKEYPKPLQVNITLSWSKTIELTDNIVITFESGRPDQMILEKSLDYGRTWQPYQYYATDCLDAFHMDPKSVKDLSQHTVLEIICTEEYSTGYTTNSKIIHFEIKDRFAFFAGPRLRNMASLYGQLDTTKKLRDFFTVTDLRIRLLRPAVGEIFVDELHLARYFYAISDIKVRGRCKCNLHATVCVYDNSKLTCECEHNTTGPDCGKCKKNYQGRPWSPGSYLPIPKGTANTCIPSISSIGTNVCDNELLHCQNGGTCHNNVRCLCPAAYTGILCEKLRCEEAGSCGSDSGQGAPPHGSPALLLLTTLLGTASPLVF

SEQ ID NO: 8717 - protein, 511 aa, Homo sapiens; identical to SEQ ID NO: 5861

SEQ ID NO: 8718 - protein, 511 aa, Homo sapiens; identical to SEQ ID NO: 5861

SEQ ID NO: 8719 - protein, 148 aa, Homo sapiens
MAAMASLGALALLLLSSLSRCSAEACLEPQITPSYYTTSDAVISTETVFIVEISLTCKNRVQVSWSLDHKSAHAGTYEVRFFDEESYSLLRKAQRNNEDISIIPPLFTVSVDHRGTWNGPWVSTEVLAAAIGLVIYYLAFSAKSHIQA

SEQ ID NO: 8720 - protein, 380 aa, Homo sapiens
MALKVATVAGSAAKAVLGPALLCRPWEVLGAHEVPSRNIFSEQTIPPSAKYGGRHTVTMIPGDGIGPELMLHVKSVFRHACVPVDFEEVHVSSNADEEDIRNAIMAIRRNRVALKGNIETNHNLPPSHKSRNNILRTSLDLYANVIHCKSLPGVVTRHKDIDILIVRENTEGEYSSLEHESVAGVVESLKIITKAKSLRIAEYAFKLAQESGRKKVTAVHKANIMKLGDGLFLQCCREVAARYPQITFENMIVDNTTMQLVSRPQQFDVMVMPNLYGNIVNNVCAGLVGGPGLVAGANYGHVYAVFETATRNTGKSIANKNIANPTATLLASCMMLDHLKLHSYATSIRKAVLASMDNENVRFPSHPTLLPRPVSPCSLL

SEQ ID NO: 8721 - protein, 677 aa, Homo sapiens
MVQKESQATLEERESELSSNPAASAGASLEPPAAPAPGEDNPAGAGGAAVAGAAGGARRFLCGVVEGFYGRPWVMEQRKELFRRLQKWELNTYLYAPKDDYKHRMFWREMYSVEEAEQLMTLISAAREYEIEFIYAISPGLDITFSNPKEVSTLKRKLDQVSQFGCRSFALLFDDIDHNMCAADKEVFSSFAHAQVSITNEIYQYLGEPETFLFCPTEYCGTFCYPNVSQSPYLRTVGEKLLPGIEVLWTGPKVVSKEIPVESIEEVSKIIKRAPVIWDNIHANDYDQKRLFLGPYKGRSTELIPRLKGVLTNPNCEFEANYVAIHTLATWYKSNMNGVRKDVVMTDSEDSTVSIQIKLENEGSDEDIETDVLYSPQMALKLALTEWLQEFGVPHQYSSRQVAHSGAKASVVDGTPLVAAPSLNATTVVTTVYQEPIMSQGAALSGEPTTLTKEEEKKQPDEEPMDMVVEKQEETDHKNDNQILSEIVEAKMAEELKPMDTDKESIAESKSPEMSMQEDCISDIAPMQTDEQTNKEQFVPGPNEKPLYTAEPVTLEDLQLLADLFYLPYEHGPKGAQMLREFQWLRANSSVVSVNCKGKDSEKIEEWRSRAAKFEEMCGLVMGMFTRLSNCANRTILYDMYSYVWDIKSIMSMVKSFVQWLGRCTRNNLFSSNILSL

SEQ ID NO: 8722 - protein, 1806 aa, Homo sapiens
MEPWSSRWKTKRWLWDFTVTTLALTFLFQAREVRGAAPVDVLKALDFHNSPEGISKTTGFCTNRKNSKGSDTAYRVSKQAQLSAPTKQLFPGGTFPEDFSILFTVKPKKGIQSFLLSIYNEHGIQQIGVEVGRSPVFLFEDHTGKPAPEDYPLFRTVNIADGKWHRVAISVEKKTVTMIVDCKKKTTKPLDRSERAIVDTNGITVFGTRILDEEVFEGDIQQFLITGDPKAAYDYCEHYSPDCDSSAPKAAQAQEPQIDEYAPEDIIEYDYEYGEAEYKEAESVTEGPTVTEETIAQTEANIVDDFQEYNYGTMESYQTEAPRHVSGTNEPNPVEEIFTEEYLTGEDYDSQRKNSEDTLYENKEIDGRDSDLLVDGDLGEYDFYEYKEYEDKPTSPPNEEFGPGVPAETDITETSINGHGAYGEKGQKGEPAVVEPGMLVEGPPGPAGPAGIMGPPGLQGPTGPPGDPGDRGPPGRPGLPGADGLPGPPGTMLMLPFRYGGDGSKGPTISAQEAQAQAILQQARIALRGPPGPMGLTGRPGPVGGPGSSGAKGESGDPGPQGPRGVQGPPGPTGKPGKRGRPGADGGRGMPGEPGAKGDRGFDGLPGLPGDKGHRGERGPQGPPGPPGDDGMRGEDGEIGPRGLPGEAGPRGLLGPRGTPGAPGQPGMAGVDGPPGPKGNMGPQGEPGPPGQQGNPGPQGLPGPQGPIGPPGEKGPQGKPGLAGLPGADGPPGHPGKEGQSGEKGALGPPGPQGPIGYPGPRGVKGADGVRGLKGSKGEKGEDGFPGFKGDMGLKGDRGEVGQIGPRGEDGPEGPKGRAGPTGDPGPSGQAGEKGKLGVPGLPGYPGRQGPKGSTGFPGFPGANGEKGARGVAGKPGPRGQRGPTGPRGSRGARGPTGKPGPKGTSGGDGPPGPPGERGPQGPQGPVGFPGPKGPPGPPGKDGLPGHPGQRGETGFQGKTGPPGPGGVVGPQGPTGETGPIGERGHPGPPGPPGEQGLPGAAGKEGAKGDPGPQGISGKDGPAGLRGFPGERGLPGAQGAPGLKGGEGPQGPPGPVGSPGERGSAGTAGPIGLPGRPGPQGPPGPAGEKGAPGEKGPQGPAGRDGVQGPVGLPGPAGPAGSPGEDGDKGEIGEPGQKGSKGDKGENGPPGPPGLQGPVGAPGIAGGDGEPGPRGQQGMFGQKGDEGARGFPGPPGPIGLQGLPGPPGEKGENGDVGPMGPPGPPGPRGPQGPNGADGPQGPPGSVGSVGGVGEKGEPGEAGNPGPPGEAGVGGPKGERGEKGEAGPPGAAGPPGAKGPPGDDGPKGNPGPVGFPGDPGPPGEPGPAGQDGVGGDKGEDGDPGQPGPPGPSGEAGPPGPPGKRGPPGAAGAEGRQGEKGAKGEAGAEGPPGKTGPVGPQGPAGKPGPEGLRGIPGPVGEQGLPGAAGQDGPPGPMGPPGLPGLKGDPGSKGEKGHPGLIGLIGPPGEQGEKGDRGLPGTQGSPGAKGDGGIPGPAGPLGPPGPPGLPGPQGPKGNKGSTGPAGQKGDSGLPGPPGSPGPPGEVIQPLPILSSKKTRRHTEGMQADADDNILDYSDGMEEIFGSLNSLKQDIEHMKFPMGTQTNPARTCKDLQLSHPDFPDGEYWIDPNQGCSGDSFKVYCNFTSGGETCIYPDKKSEGVRISSWPKEKPGSWFSEFKRGKLLSYLDVEGNSINMVQMTFLKLLTASARQNFTYHCHQSAAWYDVSSGSYDKALRFLGSNDEEMSYDNNPFIKTLYDGCASRKGYEKTVIEINTPKIDQVPIVDVMINDFGDQNQKFGFEVGPVCFLG

SEQ ID NO: 8723 - protein, 458 aa, Homo sapiens
MQATSNLLNLLLLSLFAGLDPSKTQISPKEGWQVYSSAQDPDGRCICTVVAPEQNLCSRDAKSRQLRQLLEKVQNMSQSIEVLNLRTQRDFQYVLKMETQMKGLKAKFRQIEDDRKTLMTKHFQELKEKMDELLPLIPVLEQYKTDAKLITQFKEEIRNLSAVLTGIQEEIGAYDYEELHQRVLSLETRLRDCMKKLTCGKLMKITGPVTVKTSGTRFGAWMTDPLASEKNNRVWYMDSYTNNKIVREYKSIADFVSGAESRTYNLPFKWAGTNHVVYNGSLYFNKYQSNIIIKYSFDMGRVLAQRSLEYAGFHNVYPYTWGGFSDIDLMADEIGLWAVYATNQNAGNIVISQLNQDTLEVMKSWSTGYPKRSAGESFMICGTLYVTNSHLTGAKVYYSYSTKTSTYEYTDIPFHNQYFHISMLDYNARDRALYAWNNGHQVLFNVTLFHIIKTEDDT

SEQ ID NO: 8724 - protein, 285 aa, Homo sapiens
MLYLIGLGLGDAKDITVKGLEVVRRCSRVYLEAYTSVLTVGKEALEEFYGRKLVVADREEVEQEADNILKDADISDVAFLVVGDPFGATTHSDLVLRATKLGIPYRVIHNASIMNAVGCCGLQLYKFGETVSIVFWTDTWRPESFFDKVKKNRQNGMHTLCLLDIKVKEQSLENLIKGRKIYEPPRYMSVNQAAQQLLEIVQNQRIRGEEPAVTEETLCVGLARVGADDQKIAAGTLRQMCTVDLGEPLHSLIITGGSIHPMEMEMLSLFSIPENSSESQSINGL

SEQ ID NO: 8725 - protein, 178 aa, Homo sapiens
MAAGTAAALAFLSQESRTRAGGVGGLRVPAPVTMDSFFFGCELSGHTRSFTFKVEEEDDAEHVLALTMLCLTEGAKDECNVVEVVARNHDHQEIAVPVANLKLSCQPMLSLDDFQLQPPVTFRLKSGSGPVRITGRHQIVTMSNDVSEEESEEEEEDSDEEEVELCPILPAKKQGGRP

SEQ ID NO: 8726 - protein, 330 aa, Homo sapiens
MRCCHICKLPGRVMGIRVLRLSLVVILVLLLVAGALTALLPSVKEDKMLMLRREIKSQGKSTMDSFTLIMQTYNRTDLLLKLLNHYQAVPNLHKVIVVWNNIGEKAPDELWNSLGPHPIPVIFKQQTANRMRNRLQVFPELETNAVLMVDDDTLISTPDLVFAFSVWQQFPDQIVGFVPRKHVSTSSGIYSYGSFEMQAPGSGNGDQYSMVLIGASFFNSKYLELFQRQPAAVHALIDDTQNCDDIAMNFIIAKHIGKTSGIFVKPVNMDNLEKETNSGYSGMWHRAEHALQRSYCINKLVNIYDSMPLRYSNIMISQFGFPYANYKRKI

SEQ ID NO: 8727 - protein, 540 aa, Homo sapiens
MPGKMVVILGASNILWIMFAASQAFKIETTPESRYLAQIGDSVSLTCSTTGCESPFFSWRTQIDSPLNGKVTNEGTTSTLTMNPVSFGNEHSYLCTATCESRKLEKGIQVEIYSFPKDPEIHLSGPLEAGKPITVKCSVADVYPFDRLEIDLLKGDHLMKSQEFLEDADRKSLETKSLEVTFTPVIEDIGKVLVCRAKLHIDEMDSVPTVRQAVKELQVYISPKNTVISVNPSTKLQEGGSVTMTCSSEGLPAPEIFWSKKLDNGNLQHLSGNATLTLIAMRMEDSGIYVCEGVNLIGKNRKEVELIVQVAPRDTTVLVSPSSILEEGSSVNMTCLSQGFPAPKILWSRQLPNGELQPLSENATLTLISTKMEDSGVYLCEGINQAGRSRKEVELIIQVTPKDIKLTAFPSESVKEGDTVIISCTCGNVPETWIILKKKAETGDTVLKSIDGAYTIRKAQLKDAGVYECESKNKVGSQLRSLTLDVQGRENNKDYFSPELLVLYFASSLIIPAIGMIIYFARKANMKGSYSLVEAQKSKV

SEQ ID NO: 8728 - protein, 677 aa, Homo sapiens
MPGKMVVILGASNILWIMFAASQAFKIETTPESRYLAQIGDSVSLTCSTTGSFPKDPEIHLSGPLEAGKPITVKCSVADVYPFDRLEIDLLKGDHLMKSQEFLEDADRKSLETKSLEVTFTPVIEDIGKVLVCRAKLHIDEMDSVPTVRQAVKELQVYISPKNTVISVNPSTKLQEGGSVTMTCSSEGLPAPEIFWSKKLDNGNLQHLSGNATLTLIAMRMEDSGIYVCEGVNLIGKNRKEVELIVQEKPFTVEISPGPRIAAQIGDSVMLTCSVMGCESPSFSWRTQIDSPLSGKVRSEGTNSTLTLSPVSFENEHSYLCTVTCGHKKLEKGIQVELYSFPRDPEIEMSGGLVNGSSVTVSCKVPSVYPLDRLEIELLKGETILENIEFLEDTDMKSLENKSLEMTFIPTIEDTGKALVCQAKLHIDDMEFEPKQRQSTQTLYVNVAPRDTTVLVSPSSILEEGSSVNMTCLSQGFPAPKILWSRQLPNGELQPLSENATLTLISTKMEDSGVYLCEGINQAGRSRKEVELIIQVTPKDIKLTAFPSESVKEGDTVIISCTCGNVPETWIILKKKAETGDTVLKSIDGAYTIRKAQLKDAGVYECESKNKVGSQLRSLTLDVQGRENNKDYFSPELLVLYFASSLIIPAIGMIIYFARKANMKGSYSLVEAQKSKV

SEQ ID NO: 8729 - protein, 366 aa, Homo sapiens
MAGPRVEVDGSIMEGGGQILRVSTALSCLLGLPLRVQKIRAGRSTPGLRPQHLSGLEMIRDLCDGQLEGAEIGSTEITFTPEKIKGGIHTADTKTAGSVCLLMQVSMPCVLFAASPSELHLKGGTNAEMAPQIDYTVMVFKPIVEKFGFIFNCDIKTRGYYPKGGGEVIVRMSPVKQLNPINLTERGCVTKIYGRAFVAGVLPFKVAKDMAAAAVRCIRKEIRDLYVNIQPVQEPKDQAFGNGNGIIIIAETSTGCLFAGSSLGKRGVNADKVGIEAAEMLLANLRHGGTVDEYLQDQLIVFMALANGVSRIKTGPVTLHTQTAIHFAEQIAKAKFIVKKSEDEEDAAKDTYIIECQGIGMTNPNL

SEQ ID NO: 8730 - protein, 567 aa, Homo sapiens
MGSQGRSGPPGNGGPGEGEGGEARKLQEGRVARGKRRKGKGKGKARAGQGGRGSGAEGKPGPQTAKEAAGPGADAGARACPREEAEGGRSVEEGARGIVKGVEGSAGAGKEAQGREYGKKEEWRVRARRREGARPGRAQGRGGQAWADIAGTGVAMAAAAGEEEEEEEAARESAARPAAGPALWRLPEELLLLICSYLDMRALGRLAQVCRWLRRFTSCDLLWRRIARASLNSGFTRLGTDLMTSVPVKERVKVSQNWRLGRCREGILLKWRCSQMPWMQLEDDSLYISQANFILAYQFRPDGASLNRRPLGVFAGHDEDVCHFVLANSHIVSAGGDGKIGIHKIHSTFTVKYSAHEQEVNCVDCKGGIIVSGSRDRTAKVWPLASGRLGQCLHTIQTEDRVWSIAISPLLSSFVTGTACCGHFSPLRIWDLNSGQLMTHLGSDFPPGAGVLDVMYESPFTLLSCGYDTYVRYWDLRTSVRKCVMEWEEPHDSTLYCLQTDGNHLLATGSSYYGVVRLWDRRQRACLHAFPLTSTPLSSPVYCLRLTTKHLYAALSYNLHVLDFQNP

SEQ ID NO: 8731 - protein, 482 aa, Homo sapiens
MAAVRMLRTWSRNAGKLICVRYFQTCGNVHVLKPNYVCFFGYPSFKYSHPHHFLKTTAALRGQVVQFKLSDIGEGIREVTVKEWYVKEGDTVSQFDSICEVQSDKASVTITSRYDGVIKKLYYNLDDIAYVGKPLVDIETEALKDSEEDVVETPAVSHDEHTHQEIKGRKTLATPAVRRLAMENNIKLSEVVGSGKDGRILKEDILNYLEKQTGAILPPSPKVEIMPPPPKPKDMTVPILVSKPPVFTGKDKTEPIKGFQKAMVKTMSAALKIPHFGYCDEIDLTELVKLREELKPIAFARGIKLSFMPFFLKAASLGLLQFPILNASVDENCQNITYKASHNIGIAMDTEQGLIVPNVKNVQICSIFDIATELNRLQKLGSVSQLSTTDLTGGTFTLSNIGSIGGTFAKPVIMPPEVAIGALGSIKAIPRFNQKGEVYKAQIMNVSWSADHRVIDGATMSRFSNLWKSYLENPAFMLLDLK

SEQ ID NO: 8732 - protein, 130 aa, Homo sapiens
MVVAAGKRFCGEHAGAAEEEDARKRILCPLDPKHTVYEDQLAKHLKKCNSREKPKPDFYIQDINAGLRDETEIPEQLVPISSLSEEQLEKLIKKLRKASEALHDALNDPKNGDSATKHLKQQVCLGYSNY

SEQ ID NO: 8733 - protein, 481 aa, Homo sapiens
MATSATSPHAPGFPAEGRCGYYVEKKKRFCRMVVAAGKRFCGEHAGAAEEEDARKRILCPLDPKHTVYEDQLAKHLKKCNSREKPKPDFYIQDINAGLRDETEIPEQLVPISSLSEEQLEKLIKKLRKASEGLNSTLKDHIMSHPALHDALNDPKNGDSATKHLKQQASILGNIENLKLLGPRRCFVEFGAGKGKLSHWVDIALKDAEKVHFILVEKVTTRFKVDGKHRKKNSVFERLQIDIQHLCLNKIPVLREEKLPVVGIGKHLCGMATDLALRCLVETYAASFEERNEEPLAKRIKNDKTEKEIYTLAKEGNEKNVPEKWNPVAGIVIALCCHHRCDWRHYVGKEYFRALGLGAVEFHYFQRMSSWATCGMRKTSLETSNSTTKRQDNQNDDSEEHDDGGYRITDDGADCLPGLLSVEEKKKIGHLCKLLIDQGRIQYLQQKGFSPALQYYTDPLVSLENVLLTALPNHSSSPETTA

SEQ ID NO: 8734 - protein, 203 aa, Homo sapiens
MAVTGWLESLRTAQKTALLQDGRRKVHYLFPDGKEMAEEYDEKTSELLVRKWRVKSALGAMGQWQLEVGDPAPLGAGNLGPELIKESNANPIFMRKDTKMSFQWRIRNLPYPKDVYSVSVDQKERCIIVRTTNKKYYKKFSIPDLDRHQLPLDDALLSFAHANCTLIISYQKPKEVVVAESELQKELKKVKTAHSNDGDCKTQ

SEQ ID NO: 8735 - protein, 490 aa, Homo sapiens
MTQGKKKKRAANRSIMLAKKIIIKDGGTPQGIGSPSVYHAVIVIFLEFFAWGLLTAPTLVVLHETFPKHTFLMNGLIQGVKGLLSFLSAPLIGALSDVWGRKSFLLLTVFFTCAPIPLMKISPWWYFAVISVSGVFAVTFSVVFAYVADITQEHERSMAYGLVSATFAASLVTSPAIGAYLGRVYGDSLVVVLATAIALLDICFILVAVPESLPEKMRPASWGAPISWEQADPFASLKKVGQDSIVLLICITVFLSYLPEAGQYSSFFLYLRQIMKFSPESVAAFIAVLGILSIIAQTIVLSLLMRSIGNKNTILLGLGFQILQLAWYGFGSEPWMMWAAGAVAAMSSITFPAVSALVSRTADADQQGVVQGMITGIRGLCNGLGPALYGFIFYIFHVELKELPITGTDLGTNTSPQHHFEQNSIIPGPPFLFGACSVLLALLVALFIPEHTNLSLRSSSWRKHCGSHSHPHNTQAPGEAKEPLLQDTNV

SEQ ID NO: 8736 - protein, 367 aa, Homo sapiens
MSSRSVLSPVVGTDAPDQHLELKKPQELKEMERLPLANEDKTMFANLKYVSLGILVFQTTSLVLTMRYSRTLKEEGPRYLSSTAVVVAELLKIMACILLVYKDSKCSLRALNRVLHDEILNKPMETLKLAIPSGIYTLQNNLLYVALSNLDAATYQVTYQLKILTTALFSVSMLSKKLGVYQWLSLVILMTGVAFVQWPSDSQLDSKELSAGSQFVGLMAVLTACFSSGFAGVYFEKILKETKQSVWIRNIQLGFFGSIFGLMGVYIYDGELVSKNGFFQGYNRLTWIVVVLQALGGLVIAAVIKYADNILKGFATSLSIILSTLISYFWLQDFVPTSVFFLGAILVITATFLYGYDPKPAGNPTKA

SEQ ID NO: 8737 - protein, 487 aa, Homo sapiens
MDYERALRLLRLPQLPPGAQLVKSAWLSLCLQERRLVDVAGFSIFIPSRYLDHPQPSKAEQDASIPPGTHEALLQTALSPPPPPTRPVSPPQKAKEAPNTQAQPISDDEASDGEETQVSAADLEALISGHYPTSLEGDCEPSPAPAVLDKWVCAQPSSQKATNHNLHITEKLEVLAKAYSVQGDKWRALGYAKAINALKSFHKPVTSYQEACSIPGIGKRMAEKIIEILESGHLRKLDHISESVPVLELFSNIWGAGTKTAQMWYQQGFRSLEDIRSQASLTTQQAIGLKHYSDFLERMPREEATEIEQTVQKAAQAFNSGLLCVACGSYRRGKATCGDVDVLITHPDGRSHRGIFSRLLDSLRQEGFLTDDLVSQEENGQQQKYLGVCRLPGPGRRHRRLDIIVVPYSEFACALLYFTGSAHFNRSMRALAKTKGMSLSEHALSTAVVRNTHGCKVGPGRVLPTPTEKDVFRLLGLPYREPAERDW

SEQ ID NO: 8738 - protein, 114 aa, Homo sapiens
MAAIPSSGSLVATHDYYRRRLGSTSSNSSCSSTECPGEAIPHPPGLPKADPGHWWASFFFGKSTLPFMATVLESAEHSEPPQASSSMTACGLARDAPRKQPGGQSSTASAGPPS

SEQ ID NO: 8739 - protein, 605 aa, Homo sapiens
MDPAEAVLQEKALKFMCSMPRSLWLGCSSLADSMPSLRCLYNPGTGALTAFQNSSEREDCNNGEPPRKIIPEKNSLRQTYNSCARLCLNQETVCLASTAMKTENCVAKTKLANGTSSMIVPKQRKLSASYEKEKELCVKYFEQWSESDQVEFVEHLISQMCHYQHGHINSYLKPMLQRDFITALPARGLDHIAENILSYLDAKSLCAAELVCKEWYRVTSDGMLWKKLIERMVRTDSLWRGLAERRGWGQYLFKNKPPDGNAPPNSFYRALYPKIIQDIETIESNWRCGRHSLQRIHCRSETSKGVYCLQYDDQKIVSGLRDNTIKIWDKNTLECKRILTGHTGSVLCLQYDERVIITGSSDSTVRVWDVNTGEMLNTLIHHCEAVLHLRFNNGMMVTCSKDRSIAVWDMASPTDITLRRVLVGHRAAVNVVDFDDKYIVSASGDRTIKVWNTSTCEFVRTLNGHKRGIACLQYRDRLVVSGSSDNTIRLWDIECGACLRVLEGHEELVRCIRFDNKRIVSGAYDGKIKVWDLVAALDPRAPAGTLCLRTLVEHSGRVFRLQFDEFQIVSSSHDDTILIWDFLNDPAAQAEPPRSPSRTYTYISR

SEQ ID NO: 8740 - protein, 1025 aa, Homo sapiens
MAPVLSKDSADIESILALNPRTQTHATLCSTSAKKLDKKHWKRNPDKNCFNCEKLENNFDDIKHTTLGERGALREAMRCLKCADAPCQKSCPTNLDIKSFITSIANKNYYGAAKMIFSDNPLGLTCGMVCPTSDLCVGGCNLYATEEGPINIGGLQQFATEVFKAMSIPQIRNPSLPPPEKMSEAYSAKIALFGAGPASISCASFLARLGYSDITIFEKQEYVGGLSTSEIPQFRLPYDVVNFEIELMKDLGVKIICGKSLSVNEMTLSTLKEKGYKAAFIGIGLPEPNKDAIFQGLTQDQGFYTSKDFLPLVAKGSKAGMCACHSPLPSIRGVVIVLGAGDTAFDCATSALRCGARRVFIVFRKGFVNIRAVPEEMELAKEEKCEFLPFLSPRKVIVKGGRIVAMQFVRTEQDETGKWNEDEDQMVHLKADVVISAFGSVLSDPKVKEALSPIKFNRWGLPEVDPETMQTSEAWVFAGGDVVGLANTTVESVNDGKQASWYIHKYVQSQYGASVSAKPELPLFYTPIDLVDISVEMAGLKFINPFGLASATPATSTSMIRRAFEAGWGFALTKTFSLDKDIVTNVSPRIIRGTTSGPMYGPGQSSFLNIELISEKTAAYWCQSVTELKADFPDNIVIASIMCSYNKNDWTELAKKSEDSGADALELNLSCPHGMGERGMGLACGQDPELVRNICRWVRQAVQIPFFAKLTPNVTDIVSIARAAKEGGANGVTATNTVSGLMGLKSDGTPWPAVGIAKRTTYGGVSGTAIRPIALRAVTSIARALPGFPILATGGIDSAESGLQFLHSGASVLQVCSAIQNQDFTVIEDYCTGLKALLYLKSIEELQDWDGQSPATVSHQKGKPVPRIAELMDKKLPSFGPYLEQRKKIIAENKIRLKEQNVAFSPLKRNCFIPKRPIPTIKDVIGKALQYLGTFGELSNVEQVVAMIDEEMCINCGKCYMTCNDSGYQAIQFDPETHLPTITDTCTGCTLCLSVCPIVDCIKMVSRTTPYEPKRGVPLSVNPVC

SEQ ID NO: 8741 - protein, 304 aa, Homo sapiens
MLPPPRPAAALALPVLLLLLVVLTPPPTGARPSPGPDYLRRGWMRLLAEGEGCAPCRPEECAAPRGCLAGRVRDACGCCWECANLEGQLCDLDPSAHFYGHCGEQLECRLDTGGDLSRGEVPEPLCACRSQSPLCGSDGHTYSQICRLQEAARARPDANLTVAHPGPCESGPQIVSHPYDTWNVTGQDVIFGCEVFAYPMASIEWRKDGLDIQLPGDDPHISVQFRGGPQRFEVTGWLQIQAVRPSDEGTYRCLGRNALGQVEAPASLTVLTPDQLNSTGIPQLRSLNLVPEEEAESEENDDYY

SEQ ID NO: 8742 - protein, 263 aa, Homo sapiens
MEINTKLLISVTCISFFTFQLLFYFVSYWFSAKVSPGFNSLSFKKKIEWNSRVVSTCHSLVVGIFGLYIFLFDEATKADPLWGGPSLANVNIAIASGYLISDLSIIILYWKVIGDKFFIMHHCASLYAYYLVLKNGVLAYIGNFRLLAELSSPFVNQRWFFEALKYPKFSKAIVINGILMTVVFFIVRIASMLPHYGFMYSVYGTEPYIRLGVLIQLSWVISCVVLDVMNVMWMIKISKGCIKVISHIRQEKAKNSLQNGKLD

SEQ ID NO: 8743 - protein, 216 aa, Homo sapiens
MVCVLVLAAAAGAVAVFLILRIWVVLRSMDVTPRESLSILVVAGSGGHTTEILRLLGSLSNAYSPRHYVIADTDEMSANKINSFELDRADRDPSNMYTKYYIHRIPRSREVQQSWPSTVFTTLHSMWLSFPLIHRVKPDLVLCNGPGTCVPICVSALLLGILGIKKVIIVYVESICRVETLSMSGKILFHLSDYFIVQWPALKEKYPKSVYLGRIV

SEQ ID NO: 8744 - protein, 329 aa, Homo sapiens
MTHFNKGPSYGLSAEVKNKIASKYDHQAEEDLRNWIEEVTGMSIGPNFQLGLKDGIILCELINKLQPGSVKKVNESSLNWPQLENIGNFIKAIQAYGMKPHDIFEANDLFENGNMTQVQTTLVALAGLAKTKGFHTTIDIGVKYAEKQTRRFDEGKLKAGQSVIGLQMGTNKCASQAGMTAYGTRRHLYDPKMQTDKPFDQTTISLQMGTNKGASQAGMLAPGTRRDIYDQKLTLQPVDNSTISLQMGTNKVASQKGMSVYGLGRQVYDPKYCAAPTEPVIHNGSQGTGTNGSEISDSDYQAEYPDEYHGEYQDDYPRDYQYSDQGIDY

SEQ ID NO: 8745 - protein, 238 aa, Homo sapiens
METPAWPRVPRPETAVARTLLLGWVFAQVAGASGTTNTVAAYNLTWKSTNFKTILEWEPKPVNQVYTVQISTKSGDWKSKCFYTTDTECDLTDEIVKDVKQTYLARVFSYPAGNVESTGSAGEPLYENSPEFTPYLETNLGQPTIQSFEQVGTKVNVTVEDERTLVRRNNTFLSLRDVFGKDLIYTLYYWKSSSSGKKYSTSLELWYLWSSSLSSSWLYLYTSVERQEWGRAGRRTPH

SEQ ID NO: 8746 - protein, 659 aa, Homo sapiens
MAAFSKYLTARNSSLAGAAFLLLCLLHKRRRALGLHGKKSGKPPLQNNEKEGKKERAVVDKVFFSRLIQILKIMVPRTFCKETGYLVLIAVMLVSRTYCDVWMIQNGTLIESGIIGRSRKDFKRYLLNFIAAMPLISLVNNFLKYGLNELKLCFRVRLTKYLYEEYLQAFTYYKMGNLDNRIANPDQLLTQDVEKFCNSVVDLYSNLSKPFLDIVLYIFKLTSAIGAQGPASMMAYLVVSGLFLTRLRRPIGKMTITEQKYEGEYRYVNSRLITNSEEIAFYNGNKREKQTVHSVFRKLVEHLHNFILFRFSMGFIDSIIAKYLATVVGYLVVSRPFLDLSHPRHLKSTHSELLEDYYQSGRMLLRMSQALGRIVLAGREMTRLAGFTARITELMQVLKDLNHGKYERTMVSQQEKGIEGVQVIPLIPGAGEIIIADNIIKFDHVPLATPNGDVLIRDLNFEVRSGANVLICGPNGCGKSSLFRVLGELWPLFGGRLTKPERGKLFYVPQRPYMTLGTLRDQVIYPDGREDQKRKGISDLVLKEYLDNVQLGHILEREGGWDSVQDWMDVLSGGEKQRMAMARLFYHKPQFAILDECTSAVSVDVEGYIYSHCRKVGITLFTVSHRKSLWKHHEYYLHMDGRGNYEFKQITEDTVEFGS

SEQ ID NO: 8747 - protein, 274 aa, Homo sapiens
MGTDSRAAKALLARARTLHLQTGNLLNWGRLRKKCPSTHSEELHDCIQKTLNEWSSQINPDLVREFPDVLECTVSHAVEKINPDEREEMKVSAKLFIVESNSSSSTRSAVDMACSVLGVAQLDSVIIASPPIEDGVNLSLEHLQPYWEELENLVQSKKIVAIGTSDLDKTQLEQLYQWAQVKPNSNQVNLASCCVMPPDLTAFAKQFDIQLLTHNDPKELLSEASFQEALQESIPDIQAHEWVPLWLLRYSVIVKSRGIIKSKGYILQAKRRGS

SEQ ID NO: 8748 - protein, 734 aa, Homo sapiens
MPKECSAFHALSAALCCFYHRKSFIGVKFSKERHIMDRTPEKLKKELEEELLLSSEDLRSHAWYHGRIPRQVSENLVQRDGDFLVRDSLSSPGNFVLTCQWKNLAQHFKINRTVLRLSEAYSRVQYQFEMESFDSIPGLVRCYVGNRRPISQQSGAIIFQPINRTVPLRCLEEHYGTSPGQAREGSLTKGRPDVAKRLSLTMGGVQAREQNLPRGNLLRNKEKSGSQPACLDHMQDRRALSLKAHQSESYLPIGCKLPPQSSGVDTSPCPNSPVFRTGSEPALSPAVVRRVSSDARAGEALRGSDSQLCPKPPPKPCKVPFLKVPSSPSAWLNSEANYCELNPAFATGCGRGAKLPSCAQGSHTELLTAKQNEAPGPRNSGVNYLILDDDDRERPWEPAAAQMEKGQWDKGEFVTPLLETVSSFRPNEFESKFLPPENKPLETAMLKRAKELFTNNDPKVIAQHVLSMDCRVARILGVSEEMRRNMGVSSGLELITLPHGHQLRLDIIERHNTMAIGIAVDILGCTGTLEDRAATLSKIIQVAVELKDSMGDLYSFSALMKALEMPQITRLEKTWTALRHQYTQTAILYEKQLKPFSKLLHEGRESTCVPPNNVSVPLLMPLVTLMERQAVTFEGTDMWEKNDQSCEIMLNHLATARFMAEAADSYRMNAERILAGFQPDEEMNEICKTEFQMRLLWGSKGAQVNQTERYEKFNQILTALSRKLEPPPVKQAEL

SEQ ID NO: 8749 - protein, 838 aa, Homo sapiens
MWGRLWPLLLSILTATAVPGPSLRRPSRELDATPRMTIPYEELSGTRHFKGQAQNYSTLLLEEASARLLVGARGALFSLSANDIGDGAHKEIHWEASPEMQSKCHQKGKNNQTECFNHVRFLQRLNSTHLYACGTHAFQPLCAAIDAEAFTLPTSFEEGKEKCPYDPARGFTGLIIDGGLYTATRYEFRSIPDIRRSRHPHSLRTEETPMHWLNDAEFVFSVLVRESKASAVGDDDKVYYFFTERATEEGSGSFTQSRSSHRVARVARVCKGDLGGKKILQKKWTSFLKARLICHIPLYETLRGVCSLDAETSSRTHFYAAFTLSTQWKTLEASAICRYDLAEIQAVFAGPYMEYQDGSRRWGRYEGGVPEPRPGSCITDSLRSQGYNSSQDLPSLVLDFVKLHPLMARPVVPTRGRPLLLKRNIRYTHLTGTPVTTPAGPTYDLLFLGTADGWIHKAVVLGSGMHIIEETQVFRESQSVENLVISLLQHSLYVGAPSGVIQLPLSSCSRYRSCYDCILARDPYCGWDPGTHACAAATTIANRTALIQDIERGNRGCESSRDTGPPPPLKTRSVLRGDDVLLPCDQPSNLARALWLLNGSMGLSDGQGGYRVGVDGLLVTDAQPEHSGNYGCYAEENGLRTLLASYSLTVRPATPAPAPKAPATPGAQLAPDVRLLYVLAIAALGGLCLILASSLLYVACLREGRRGRRRKYSLGRASRAGGSAVQLQTVSGQCPGEEDEGDDEGAGGLEGSCLQIIPGEGAPAPPPPPPPPPPAELTNGLVALPSRLRRMNGNSYVLLRQSNNGVPAGPCSFAEELSRILEKRKHTQLVEQLDESSV

SEQ ID NO: 8750 - protein, 547 aa, Homo sapiens
MSWGTELWDQFDSLDKHTQWGIDFLERYAKFVKERIEIEQNYAKQLRNLVKKYCPKRSSKDEEPRFTSCVAFFNILNELNDYAGQREVVAEEMAHRVYGELMRYAHDLKTERKMHLQEGRKAQQYLDMCWKQMDNSKKKFERECREAEKAQQSYERLDNDTNATKADVEKAKQQLNLRTHMADENKNEYAAQLQNFNGEQHKHFYVVIPQIYKQLQEMDERRTIKLSECYRGFADSERKVIPIISKCLEGMILAAKSVDERRDSQMVVDSFKSGFEPPGDFPFEDYSQHIYRTISDGTISASKQESGKMDAKTTVGKAKGKLWLFGKKPKGPALEDFSHLPPEQRRKKLQQRIDELNRELQKESDQKDALNKMKDVYEKNPQMGDPGSLQPKLAETMNNIDRLRMEIHKNEAWLSEVEGKTGGRGDRRHSSDINHLVTQGRESPEGSYTDDANQEVRGPPQQHGHHNEFDDEFEDDDPLPAIGHCKAIYPFDGHNEGTLAMKEGEVLYIIEEDKGDGWTRARRQNGEEGYVPTSYIDVTLEKNSKGS

SEQ ID NO: 8751 - protein, 627 aa, Homo sapiens
MELGGPGAPRLLPPLLLLLGTGLLRASSHVETRAHAEERLLKKLFSGYNKWSRPVANISDVVLVRFGLSIAQLIDVDEKNQMMTTNVWVKQEWHDYKLRWDPADYENVTSIRIPSELIWRPDIVLYNNADGDFAVTHLTKAHLFHDGRVQWTPPAIYKSSCSIDVTFFPFDQQNCTMKFGSWTYDKAKIDLVNMHSRVDQLDFWESGEWVIVDAVGTYNTRKYECCAEIYPDITYAFVIRRLPLFYTINLIIPCLLISCLTVLVFYLPSECGEKITLCISVLLSLTVFLLLITEIIPSTSLVIPLIGEYLLFTMIFVTLSIVITVFVLNVHHRSPRTHTMPTWVRRVFLDIVPRLLLMKRPSVVKDNCRRLIESMHKMASAPRFWPEPEGEPPATSGTQSLHPPSPSFCVPLDVPAEPGPSCKSPSDQLPPQQPLEAEKASPHPSPGPCRPPHGTQAPGLAKARSLSVQHMSSPGEAVEGGVRCRSRSIQYCVPRDDAAPEADGQAAGALASRNTHSAELPPPDQPSPCKCTCKKEPSSVSPSATVKTRSTKAPPPHLPLSPALTRAVEGVQYIADHLKAEDTDFSVKEDWKYVAMVIDRIFLWMFIIVCLLGTVGLFLPPWLAGMI

SEQ ID NO: 8752 - protein, 176 aa, Homo sapiens
MASSSGNDDDLTIPRAAINKMIKETLPNVRVANDARELVVNCCTEFIHLISSEANEICNKSEKKTISPEHVIQALESLGFGSYISEVKEVLQECKTVALKRRKASSRLENLGIPEEELLRQQQELFAKARQQQAELAQQEWLQMQQAAQQAQLAAASASASNQAGSSQDEEDDDDI

SEQ ID NO: 8753 - protein, 172 aa, Homo sapiens
MASNFKKANMASSSQRKRMSPKPELTEEQKQEIREAFDLFDADGTGTIDVKELKVAMRALGFEPKKEEIKKMISEIDKEGTGKMNFGDFLTVMTQKMSEKDTKEEILKAFKLFDDDETGKISFKNLKRVAKELGENLTDEELQEMIDEADRDGDGEVSEQEFLRIMKKTSLY

SEQ ID NO: 8754 - protein, 162 aa, Homo sapiens
MGDKIWLPFPVLLLAALPPVLLPGAAGFTPSLDSDFTFTLPAGQKECFYQPMPLKASLEIEYQVLDGAGLDIDFHLASPEGKTLVFEQRKSDGVHTVETEVGDYMFCFDNTFSTISEKVIFFELILDNMGEQAQEQEDWKKYITGTDILDMKLEDILVSMVF

SEQ ID NO: 8755 - protein, 229 aa, Homo sapiens
MGDKIWLPFPVLLLAALPPVLLPGAAGFTPSLDSDFTFTLPAGQKECFYQPMPLKASLEIEYQVLDGAGLDIDFHLASPEGKTLVFEQRKSDGVHTVETEVGDYMFCFDNTFSTISEKVIFFELILDNMGEQAQEQEDWKKYITGTDILDMKLEDILESINSIKSRLSKSGHIQTLLRAFEARDRNIQESNFDRVNFWSMVNLVVMVVVSAIQVYMLKSLFEDKRKSRT

SEQ ID NO: 8756 - protein, 406 aa, Homo sapiens
MASPRTRKVLKEVRVQDENNVCFECGAFNPQWVSVTYGIWICLECSGRHRGLGVHLSFVRSVTMDKWKDIELEKMKAGGNAKFREFLESQEDYDPCWSLQEKYNSRAAALFRDKVVALAEGREWSLESSPAQNWTPPQPRTLPSMVHRVSGQPQSVTASSDKAFEDWLNDDLGSYQGAQGNRYVGFGNTPPPQKKEDDFLNNAMSSLYSGWSSFTTGASRFASAAKEGATKFGSQASQKASELGHSLNENVLKPAQEKVKEGKIFDDVSSGVSQLASKVQGVGSKGWRDVTTFFSGKAEGPLDSPSEGHSYQNSGLDHFQNSNIDQSFWETFGSAEPTKTRKSPSSDSWTCADTSTERRSSDSWEVWGSASTNRNSNSDGGEGGEGTKKAVPPAVPTDDGWDNQNW

SEQ ID NO: 8757 - protein, 593 aa, Homo sapiens
MRDSTGAGNSLVHKRSPLRRNQKTPTSLTKLSLQDGHKAKKPACKFEEGQDVLARWSDGLFYLGTIKKINILKQSCFIIFEDSSKSWVLWKDIQTGATGSGEMVCTICQEEYSEAPNEMVICDKCGQGYHQLCHTPHIDSSVIDSDEKWLCRQCVFATTTKRGGALKKGPNAKALQVMKQTLPYSVADLEWDAGHKTNVQQCYCYCGGPGDWYLKMLQCCKCKQWFHEACVQCLQKPMLFGDRFYTFICSVCSSGPEYLKRLPLQWVDIAHLCLYNLSVIHKKKYFDSELELMTYINENWDRLHPGELADTPKSERYEHVLEALNDYKTMFMSGKEIKKKKHLFGLRIRVPPVPPNVAFKAEKEPEGTSHEFKIKGRKASKPISDSREVSNGIEKKGKKKSVGRPPGPYTRKMIQKTAEPLLDKESISENPTLDLPCSIGRTEGTAHSSNTSDVDFTGASSAKETTSSSISRHYGLSDSRKRTRTGRSWPAAIPHLRRRRGRLPRRALQTQNSEIVKDDEGKEDYQFDELNTEILNNLADQELQLNHLKNSITSYFGAAGRIACGEKYRVLARRVTLDGKVQYLVEWEGATAS

SEQ ID NO: 8758 - protein, 428 aa, Homo sapiens
MARSLCPGAWLRKPYYLQARFSYVRMKYLFFSWLVVFVGSWIIYVQYSTYTELCRGKDCKKIICDKYKTGVIDGPACNSLCVTETLYFGKCLSTKPNNQMYLGIWDNLPGVVKCQMEQALHLDFGTELEPRKEIVLFDKPTRGTTVQKFKEMVYSLFKAKLGDQGNLSELVNLILTVADGDKDGQVSLGEAKSAWALLQLNEFLLMVILQDKEHTPKLMGFCGDLYVMESVEYTSLYGISLPWVIELFIPSGFRRSMDQLFTPSWPRKAKIAIGLLEFVEDVFHGPYGNFLMCDTSAKNLGYNDKYDLKMVDMRKIVPETNLKELIKDRHCESDLDCVYGTDCRTSCDQSTMKCTSEVIQPNLAKACQLLKDYLLRGAPSEIREELEKQLYSCIALKVTANQMEMEHSLILNNLKTLLWKKISYTNDS

SEQ ID NO: 8759 - protein, 492 aa, Homo sapiens
MIITQTSHCYMTSLGILFLINILPGTTGQGESRRQEPGDFVKQDIGGLSPKHAPDIPDDSTDNITIFTRILDRLLDGYDNRLRPGLGDAVTEVKTDIYVTSFGPVSDTDMEYTIDVFFRQTWHDERLKFDGPMKILPLNNLLASKIWTPDTFFHNGKKSVAHNMTTPNKLLRLVDNGTLLYTMRLTIHAECPMHLEDFPMDVHACPLKFGSYAYTTAEVVYSWTLGKNKSVEVAQDGSRLNQYDLLGHVVGTEIIRSSTGEYVVMTTHFHLKRKIGYFVIQTYLPCIMTVILSQVSFWLNRESVPARTVFGVTTVLTMTTLSISARNSLPKVAYATAMDWFIAVCYAFVFSALIEFATVNYFTKRSWAWEGKKVPEALEMKKKTPAAPAKKTSTTFNIVGTTYPINLAKDTEFSTISKGAAPSASSTPTIIASPKATYVQDSPTETKTYNSVSKVDKISRIIFPVLFAIFNLVYWATYVNRESAIKGMIRKQ

SEQ ID NO: 8760 - protein, 167 aa, Homo sapiens
VWVTWNVFIICFYLEVGGLLKDSELLTFSLSRHRSWWRERWPGCLHEEVPAVGLGAPHGQALVSGAGCALEPSYVEALHSCLQILIANPRWLAPQRRRNPWWLLAGVGWGQSFWALSVAARWSACLRRKRTALISLVDLIHFLSTMSMKSHPVSCPSRCTSPQARPH

SEQ ID NO: 8761 - protein, 297 aa, Homo sapiens [sequence omitted]

SEQ ID NO: 8762 - protein, 155 aa, Homo sapiens
MTKDMFPGPYPRTPEERAAAAKKYNMRVEDYEPYPDDGMGYGDYPKLPDRSQHERDPWYSWDQPGLRLNWGEPMHWHLDMYNRNRVDTSPTPVSWHVMCMQLFGFLAFMIFMCWVGDVYPVYQPVGPKQYPYNNLYLERGGDPSKEPERVVHYEI

SEQ ID NO: 8763 - protein, 506 aa, Homo sapiens
MLSKVLPVLLGILLILQSRVEGPQTESKNEASSRDVVYGPQPQPLENQLLSEETKSTETETGSRVGKLPEASRILNTILSNYDHKLRPGIGEKPTVVTVEISVNSLGPLSILDMEYTIDIIFSQTWYDERLCYNDTFESLVLNGNVVSQLWIPDTFFRNSKRTHEHEITMPNQMVRIYKDGKVLYTIRMTIDAGCSLHMLRFPMDSHSCPLSFSSFSYPENEMIYKWENFKLEINEKNSWKLFQFDFTGVSNKTEIITTPVGDFMVMTIFFNVSRRFGYVAFQNYVPSSVTTMLSWVSFWIKTESAPARTSLGITSVLTMTTLGTFSRKNFPRVSYITALDFYIAICFVFCFCALLEFAVLNFLIYNQTKAHASPKLRHPRINSRAHARTRARSRACARQHQEAFVCQIVTTEGSDGEERPSCSAQQPPSPGSPEGPRSLCSKLACCEWCKRFKKYFCMVPDCEGSTWQQGRLCIHVYRLDNYSRVVFPVTFFFFNVLYWLVCLNL

SEQ ID NO: 8764 - protein, 359 aa, Homo sapiens
MPAHLLQDDISSSYTTTTTITAPPSRVLQNGGDKLETMPLYLEDDIRPDIKDDIYDPTYKDKEGPSPKVEYVWRNIILMSLLHLGALYGITLIPTCKFYTWLWGVFYYFVSALGITAGAHRLWSHRSYKARLPLRLFLIIANTMAFQNDVYEWARDHRAHHKFSETHADPHNSRRGFFFSHVGWLLVRKHPAVKEKGSTLDLSDLEAEKLVMFQRRYYKPGLLMMCFILPTLVPWYFWGETFQNSVFVATFLRYAVVLNATWLVNSAAHLFGYRPYDKNISPRENILVSLGAVGEGFHNYHHSFPYDYSASEYRWHINFTTFFIDCMAALGLAYDRKKVSKAAILARIKRTGDGNYKSG

SEQ ID NO: 8765 - protein, 594 aa, Homo sapiens
MAVEELQSIIKRCQILEEQDFKEEDFGLFQLAGQRCIEEGHTDQLLEIIQNEKNKVIIKNMGWNLVGPVVRCLLCKDKEDSKRKVYFLIFDLLVKLCNPKELLLGLLELIEEPSGKQISQSILLLLQPLQTVIQKLHNKAYSIGLALSTLWNQLSLLPVPYSKEQIQMDDYGLCQCCKALIEFTKPFVEEVIDNKENSLENEKLKDELLKFCFKSLKCPLLTAQFFEQSEEGGNDPFRYFASEIIGFLSAIGHPFPKMIFNHGRKKRTWNYLEFEEEENKQLADSMASLAYLVFVQGIHIDQLPMVLSPLYLLQFNMGHIEVFLQRTEESVISKGLELLENSLLRIEDNSLLYQYLEIKSFLTVPQGLVKVMTLCPIETLRKKSLAMLQLYINKLDSQGKYTLFRCLLNTSNHSGVEAFIIQNIKNQIDMSLKRTRNNKWFTGPQLISLLDLVLFLPEGAETDLLQNSDRIMASLNLLRYLVIKDNENDNQTGLWTELGNIENNFLKPLHIGLNMSKAHYEAEIKNSQEAQKSKDLCSITVSGEEIPNMPPEMQLKVLHSALFTFDLIESVLARVEELIEIKTKSTSEENIGIK

SEQ ID NO: 8766 - protein, 142 aa, Homo sapiens
MAAAAEGVLATRSDEPARDDAAVETAEEAKEPAEADITELCRDMFSKMATYLTGELTATSEDYKLLENMNKLTSLKYLEMKDIAINISRNLKDLNQKYAGLQPYLDQINVIEEQVAALEQAAYKLDAYSKKLEAKYKKLEKR

SEQ ID NO: 8767 - protein, 262 aa, Homo sapiens
MVAWRSAFLVCLAFSLATLVQRGSGDFDDFNLEDAVKETSSVKQPWDHTTTTTTNRPGTTRAPAKPPGSGLDLADALDDQDDGRRKPGIGGRERWNHVTTTTKRPVTTRAPANTLGNDFDLADALDDRNDRDDGRRKPIAGGGGFSDKDLEDIVGGGEYKPDKGKGDGRYGSNDDPGSGMVAEPGTIAGVASALAMALIGAVSSYISYQQKKFCFSIQQGLNADYVKGENLEAVVCEEPQVKYSTLHTQSAEPPPPPEPARI

SEQ ID NO: 8768 - protein, 665 aa, Homo sapiens
MDRPAAAAAAGCEGGGGPNPGPAGGRRPPRAAGGATAGSRQPSVETLDSPTGSHVEWCKQLIAATISSQISGSVTSENVSRDYKALRDGNKLAQMEEAPLFPGESIKAIVKDVMYICPFMGAVSGTLTVTDFKLYFKNVERDPHFILDVPLGVISRVEKIGAQSHGDNSCGIEIVCKDMRNLRLAYKQEEQSKLGIFENLNKHAFPLSNGQALFAFSYKEKFPINGWKVYDPVSEYKRQGLPNESWKISKINSNYEFCDTYPAIIVVPTSVKDDDLSKVAAFRAKGRVPVLSWIHPESQATITRCSQPLVGPNDKRCKEDEKYLQTIMDANAQSHKLIIFDARQNSVADTNKTKGGGYESESAYPNAELVFLEIHNIHVMRESLRKLKEIVYPSIDEARWLSNVDGTHWLEYIRMLLAGAVRIADKIESGKTSVVVHCSDGWDRTAQLTSLAMLMLDSYYRTIKGFETLVEKEWISFGHRFALRVGHGNDNHADADRSPIFLQFVDCVWQMTRQFPSAFEFNELFLITILDHLYSCLFGTFLCNCEQQRFKEDVYTKTISLWSYINSQLDEFSNPFFVNYENHVLYPVASLSHLELWVNYYVRWNPRMRPQMPIHQNLKELLAVRAELQKRVEGLQREVATRAVSSSSERGSSPSHSATSVHTSV

SEQ ID NO: 8769 - protein, 603 aa, Homo sapiens
MASASTSKYNSHSLENESIKRTSRDGVNRDLTEAVPRLPGETLITDKEVIYICPFNGPIKGRVYITNYRLYLRSLETDSSLILDVPLGVISRIEKMGGATSRGENSYGLDITCKDMRNLRFALKQEGHSRRDMFEILTRYAFPLAHSLPLFAFLNEEKFNVDGWTVYNPVEEYRRQGLPNHHWRITFINKCYELCDTYPALLVVPYRASDDDLRRVATFRSRNRIPVLSWIHPENKTVIVRCSQPLVGMSGKRNKDDEKYLDVIRETNKQISKLTIYDARPSVNAVANKATGGGYESDDAYHNAELFFLDIHNIHVMRESLKKVKDIVYPNVEESHWLSSLESTHWLEHIKLVLTGAIQVADKVSSGKSSVLVHCSDGWDRTAQLTSLAMLMLDSFYRSIEGFEILVQKEWISFGHKFASRIGHGDKNHTDADRSPIFLQFIDCVWQMSKQFPTAFEFNEQFLIIILDHLYSCRFGTFLFNCESARERQKVTERTVSLWSLINSNKEKFKNPFYTKEINRVLYPVASMRHLELWVNYYIRWNPRIKQQQPNPVEQRYMELLALRDEYIKRLEELQLANSAKLSDPPTSPSSPSQMMPHVQTHF

SEQ ID NO: 8770 - protein, 745 aa, Homo sapiens
MERPPGLRPGAGGPWEMRERLGTGGFGNVCLYQHRELDLKIAIKSCRLELSTKNRERWCHEIQIMKKLNHANVVKACDVPEELNILIHDVPLLAMEYCSGGDLRKLLNKPENCCGLKESQILSLLSDIGSGIRYLHENKIIHRDLKPENIVLQDVGGKIIHKIIDLGYAKDVDQGSLCTSFVGTLQYLAPELFENKPYTATVDYWSFGTMVFECIAGYRPFLHHLQPFTWHEKIKKKDPKCIFACEEMSGEVRFSSHLPQPNSLCSLVVEPMENWLQLMLNWDPQQRGGPVDLTLKQPRCFVLMDHILNLKIVHILNMTSAKIISFLLPPDESLHSLQSRIERETGINTGSQELLSETGISLDPRKPASQCVLDGVRGCDSYMVYLFDKSKTVYEGPFASRSLSDCVNYIVQDSKIQLPIIQLRKVWAEAVHYVSGLKEDYSRLFQGQRAAMLSLLRYNANLTKMKNTLISASQQLKAKLEFFHKSIQLDLERYSEQMTYGISSEKMLKAWKEMEEKAIHYAEVGVIGYLEDQIMSLHAEIMELQKSPYGRRQGDLMESLEQRAIDLYKQLKHRPSDHSYSDSTEMVKIIVHTVQSQDRVLKELFGHLSKLLGCKQKIIDLLPKVEVALSNIKEADNTVMFMQGKRQKEIWHLLKIACTQSSARSLVGSSLEGAVTPQTSAWLPPTSAEHDHSLSCVVTPQDGETSAQMIEENLNCLGHLSTIIHEANEEQGNSMMNLDWSWLTE

SEQ ID NO: 8771 - protein, 850 aa, Homo sapiens
MTSHYVIAIFALMSSCLATAGPEPGALCELSPVSASHPVQALMESFTVLSGCASRGTTGLPQEVHVLNLRTAGQGPGQLQREVTLHLNPISSVHIHHKSVVFLLNSPHPLVWHLKTERLATGVSRLFLVSEGSVVQFSSANFSLTAETEERNFPHGNEHLLNWARKEYGAVTSFTELKIARNIYIKVGEDQVFPPKCNIGKNFLSLNYLAEYLQPKAAEGCVMSSQPQNEEVHIIELITPNSNPYSAFQVDITIDIRPSQEDLEVVKNLILILKCKKSVNWVIKSFDVKGSLKIIAPNSIGFGKESERSMTMTKSIRDDIPSTQGNLVKWALDNGYSPITSYTMAPVANRFHLRLENNEEMGDEEVHTIPPELRILLDPGALPALQNPPIRGGEGQNGGLPFPFPDISRRVWNEEGEDGLPRPKDPVIPSIQLFPGLREPEEVQGSVDIALSVKCDNEKMIVAVEKDSFQASGYSGMDVTLLDPTCKAKMNGTHFVLESPLNGCGTRPRWSALDGVVYYNSIVIQVPALGDSSGWPDGYEDLESGDNGFPGDMDEGDASLFTRPEIVVFNCSLQQVRNPSSFQEQPHGNITFNMELYNTDLFLVPSQGVFSVPENGHVYVEVSVTKAEQELGFAIQTCFISPYSNPDRMSHYTIIENICPKDESVKFYSPKRVHFPIPQADMDKKRFSFVFKPVFNTSLLFLQCELTLCTKMEKHPQKLPKCVPPDEACTSLDASIIWAMMQNKKTFTKPLAVIHHEAESKEKGPSMKEPNPISPPIFHGLDTLTVMGIAFAAFVIGALLTGALWYIYSHTGETAGRQQVPTSPPASENSSAAHSIGSTQSTPCSSSSTA

SEQ ID NO: 8772 - protein, 458 aa, Homo sapiens
MSDLLSVFLHLLLLFKLVAPVTFRHHRYDDLVRTLYKVQNECPGITRVYSIGRSVEGRHLYVLEFSDHPGIHEPLEPEVKYVGNMHGNEALGRELMLQLSEFLCEEFRNRNQRIVQLIQDTRIHILPSMNPDGYEVAAAQGPNKPGYLVGRNNANGVDLNRNFPDLNTYIYYNEKYGGPNHHLPLPDNWKSQVEPETRAVIRWMHSFNFVLSANLHGGAVVANYPYDKSFEHRVRGVRRTASTPTPDDKLFQKLAKVYSYAHGWMFQGWNCGDYFPDGITNGASWYSLSKGMQDFNYLHTNCFEITLELSCDKFPPEEELQREWLGNREALIQFLEQVHQGIKGMVLDENYNNLANAVISVSGINHDVTSGDHGDYFRLLLPGIYTVSATAPGYDPETVTVTVGPAEPTLVNFHLKRSIPQVSPVRRAPSRRHGVRAKVQPQARKKEMEMRQLQRGPA

SEQ ID NO: 8773 - protein, 343 aa, Homo sapiens
MPPPRTGRGLLWLGLVLSSVCVALGSETQANSTTDALNVLLIIVDDLRPSLGCYGDKLVRSPNIDQLASHSLLFQNAFAQQAVCAPSRVSFLTGRRPDTTRLYDFNSYWRVHAGNFSTIPQYFKENGYVTMSVGKVFHPGISSNHTDDSPYSWSFPPYHPSSEKYENTKTCRGPDGELHANLLCPVDVLDVPEGTLPDKQSTEQAIQLLEKMKTSASPFFLAVGYHKPHIPFRYPKEFQKLYPLENITLAPDPEVPDGLPPVAYNPWMDIRQREDVQALNISVPYGPIPVDFQRKIRQSYFASVSYLDTQVGRLLSALDDLQLANSTIIAFTSDHGFLMRTNT

SEQ ID NO: 8774 - protein, 803 aa, Homo sapiens
MIPVTEFRQFSEQQPAFRVLKPWWDVFTDYLSVAMLMIGVFGCTLQVMQDKIICLPKRVQPAQNHSSLSNVSQAVASTTPLPPPKPSPANPITVEMKGLKTDLDLQQYSFINQMCYERALHWYAKYFPYLVLIHTLVFMLCSNFWFKFPGSSSKIEHFISILGKCFDSPWTTRALSEVSGEDSEEKDNRKNNMNRSNTIQSGPEDSLVNSQSLKSIPEKFVVDKSTAGALDKKEGEQAKALFEKVKKFRLHVEEGDILYAMYVRQTVLKVIKFLIIIAYNSALVSKVQFTVDCNVDIQDMTGYKNFSCNHTMAHLFSKLSFCYLCFVSIYGLTCLYTLYWLFYRSLREYSFEYVRQETGIDDIPDVKNDFAFMLHMIDQYDPLYSKRFAVFLSEVSENKLKQLNLNNEWTPDKLRQKLQTNAHNRLELPLIMLSGLPDTVFEITELQSLKLEIIKNVMIPATIAQLDNLQELSLHQCSVKIHSAALSFLKENLKVLSVKFDDMRELPPWMYGLRNLEELYLVGSLSHDISRNVTLESLRDLKSLKILSIKSNVSKIPQAVVDVSSHLQKMCIHNDGTKLVMLNNLKKMTNLTELELVHCDLERIPHAVFSLLSLQELDLKENNLKSIEEIVSFQHLRKLTVLKLWHNSITYIPEHIKKLTSLERLSFSHNKIEVLPSHLFLCNKIRYLDLSYNDIRFIPPEIGVLQSLQYFSITCNKVESLPDELYFCKKLKTLKIGKNSLSVLSPKIGNLLFLSYLDVKGNHFEILPPELGDCRALKRAGLVVEDALFETLPSDVREQMKTE

SEQ ID NO: 8775 - protein, 467 aa, Homo sapiens
MATRSCREKAQKLNEQHQLILSKLLREEDNKYCADCEAKGPRWASWNIGVFICIRCAGIHRNLGVHISRVKSVNLDQWTAEQIQCMQDMGNTKARLLYEANLPENFRRPQTDQAVEFFIRDKYEKKKYYDKNAIAITNISSSDAPLQPLVSSPSLQAAVDKNKLEKEKEKKKEEKKREKEPEKPAKPLTAEKLQKKDQQLEPKKSTSPKKAAEPTVDLLGLDGPAVAPVTNGNTTVPPLNDDLDIFGPMISNPLPATVMPPAQGTPSAPAAATLSTVTSGDLDLFTEQTTKSEEVAKKQLSKDSILSLYGTGTIQQQSTPGVFMGPTNIPFTSQAPAAFQGFPSMGVPVPAAPGLIGNVMGQSPSMMVGMPMPNGFMGNAQTGVMPLPQNVVGPQGGMVGQMGAPQSKFGLPQAQQPQWSLSQMNQQMAGMSISSATPTAGFGQPSSTTAGWSGSSSGQTLSTQLWK

SEQ ID NO: 8776 - protein, 1311 aa, Homo sapiens
MDLFDFFRDWDLEQQCHYEQDRSALKKREWERRNQEVQQEDDLFSSGFDLFGEPYKVAEYTNKGDALANRVQNTLGNYDEMKNLLTNHSNQNHLVGIPKNSVPQNPNNKNEPSFFPEQKNRIIPPHQDNTHPSAPMPPPSVVILNSTLIHSNRKSKPEWSRDSHNPSTVLASQASGQPNKMQTLTQDQSQAKLEDFFVYPAEQPQIGEVEESNPSAKEDSNPNSSGEDAFKEIFQSNSPEESEFAVQAPGSPLVASSLLAPSSGLSVQNFPPGLYCKTSMGQQKPTAYVRPMDGQDQAPDISPTLKPSIEFENSFGNLSFGTLLDGKPSAASSKTKLPKFTILQTSEVSLPSDPSCVEEILREMTHSWPTPLTSMHTAGHSEQSTFSIPGQESQHLTPGFTLQKWNDPTTRASTKSVSFKSMLEDDLKLSSDEDDLEPVKTLTTQCTATELYQAVEKAKPRNNPVNPPLATPQPPPAVQASGGSGSSSESESSSESDSDTESSTTDSESNEAPRVATPEPEPPSTNKWQLDKWLNKVTSQNKSFICGQNETPMETISLPPPIIQPMEVQMKVKTNASQVPAEPKERPLLSLIREKARPRPTQKIPETKALKHKLSTTSETVSQRTIGKKQPKKVEKNTSTDEFTWPKPNITSSTPKEKESVELHDPPRGRNKATAHKPAPRKEPRPNIPLAPEKKKYRGPGKIVPKSREFIETDSSTSDSNTDQEETLQIKVLPPCIISGGNTAKSKEICGASLTLSTLMSSSGSNNNLSISNEEPTFSPIPVMQTEILSPLRDHENLKNLWVKIDLDLLSRVPGHSSLHAAPAKPDHKETATKPKRQTAVTAVEKPAPKGKRKHKPIEVAEKIPEKKQRLEEATTICLLPPCISPAPPHKPPNTRENNSSRRANRRKEEKLFPPPLSPLPEDPPRRRNVSGNNGPFGQDKNIAMTGQITSTKPKRTEGKFCATFKGISVNEGDTPKKASSATITVTNTAIATATVTATAIVTTTVTATATATATTTTTTTTISTITSTITTGLMDSSHLEMTSWAALPLLSSSSTNVRRPKLTFDDSVHNADYYMQEAKKLKHKADALFEKFGKAVNYADAALSFTECGNAMERDPLEAKSPYTMYSETVELLRYAMRLKNFASPLASDGDKKLAVLCYRCLSLLYLRMFKLKKDHAMKYSRSLMEYFKQNASKVAQIPSPWVSNGKNTPSPVSLNNVSPINAMGNCNNGPVTIPQRIHHMAASHVNITSNVLRGYEHWDMADKLTRENKEFFGDLDTLMGPLTQHSSMTNLVRYVRQGLCWLRIDAHLL

SEQ ID NO: 8777 - protein, 591 aa, Homo sapiens
MAPEINLPGPMSLIDNTKGQLVVNPEALKILSAITQPVVVVAIVGLYRTGKSYLMNKLAGKKNGFSLGSTVKSHTKGIWMWCVPHPKKPEHTLVLLDTEGLGDIEKGDNENDSWIFALAILLSSTFVYNSMGTINQQAMDQLHYVTELTDRIKANSSPGNNSVDDSADFVSFFPAFVWTLRDFTLELEVDGEPITADDYLELSLKLRKGTDKKSKSFNDPRLCIRKFFPKRKCFVFDWPAPKKYLAHLEQLKEEELNPDFIEQVAEFCSYILSHSNVKTLSGGIPVNGPRLESLVLTYVNAISSGDLPCMENAVLALAQIENSAAVEKAIAHYEQQMGQKVQLPTETLQELLDLHRDSEREAIEVFMKNSFKDVDQMFQRKLGAQLEARRDDFCKQNSKASSDCCMALLQDIFGPLEEDVKQGTFSKPGGYRLFTQKLQELKNKYYQVPRKGIQAKEVLKKYLESKEDVADALLQTDQSLSEKEKAIEVERIKAESAEAAKKMLEEIQKKNEEMMEQKEKSYQEHVKQLTEKMERDRAQLMAEQEKTLALKLQEQERLLKEGFENESKRLQKDIWDIQMRSKSLEPICNIL

SEQ ID NO: 8778 - protein, 590 aa, Homo sapiens
MEELVVEVRGSNGAFYKAFVKDVHEDSITVAFENNWQPDRQIPFHDVRFPPPVGYNKDINESDEVEVYSRANEKEPCCWWLAKVRMIKGEFYVIEYAACDATYNEIVTIERLRSVNPNKPATKDTFHKIKLDVPEDLRQMCAKEAAHKDFKKAVGAFSVTYDPENYQLVILSINEVTSKRAHMLIDMHFRSLRTKLSLIMRNEEASKQLESSRQLASRFHEQFIVREDLMGLAIGTHGANIQQARKVPGVTAIDLDEDTCTFHIYGEDQDAVKKARSFLEFAEDVIQVPRNLVGKVIGKNGKLIQEIVDKSGVVRVRIEAENEKNVPQEEEIMPPNSLPSNNSRVGPNAPEEKKHLDIKENSTHFSQPNSTKVQRVLVASSVVAGESQKPELKAWQGMVPFVFVGTKDSIANATVLLDYHLNYLKEVDQLRLERLQIDEQLRQIGASSRPPPNRTDKEKSYVTDDGQGMGRGSRPYRNRGHGRRGPGYTSAPTEEERESFLRRGDGRRRGGGGRGQGGRGRGGGFKGNDDHSRTDNRPRNPREAKGRTTDGSLQNTSSEGSRLRTGKDRNQKKEKPDSVDGQQPLVNGVP

SEQ ID NO: 8779 - protein, 592 aa, Homo sapiens
MASEIHMTGPMCLIENTNGRLMANPEALKILSAITQPMVVVAIVGLYRTGKSYLMNKLAGKKKGFSLGSTVQSHTKGIWMWCVPHPKKPGHILVLLDTEGLGDVEKGDNQNDSWIFALAVLLSSTFVYNSIGTINQQAMDQLYYVTELTHRIRSKSSPDENENEVEDSADFVSFFPDFVWTLRDFSLDLEADGQPLTPDEYLTYSLKLKKGTSQKDETFNLPRLCIRKFFPKKKCFVFDRPVHRRKLAQLEKLQDEELDPEFVQQVADFCSYIFSNSKTKTLSGGIQVNGPRLESLVLTYVNAISSGDLPCMENAVLALAQIENSAAVQKAIAHYEQQMGQKVQLPTETLQELLDLHRDSEREAIEVFIRSSFKDVDHLFQKELAAQLEKKRDDFCKQNQEASSDRCSALLQVIFSPLEEEVKAGIYSKPGGYRLFVQKLQDLKKKYYEEPRKGIQAEEILQTYLKSKESMTDAILQTDQTLTEKEKEIEVERVKAESAQASAKMLQEMQRKNEQMMEQKERSYQEHLKQLTEKMENDRVQLLKEQERTLALKLQEQEQLLKEGFQKESRIMKNEIQDLQTKMRRRKACTIS

SEQ ID NO: 8780 - protein, 108 aa, Homo sapiens
MTPSRLPWLLSWVSATAWRAARSPLLCHSLRKTSSSQGGKSELVKQSLKKPKLPEGRFDAPEDSHLEKEPLEKFPDDVNPVTKEKGGPRGPEPTRYGDWERKGRCIDF

SEQ ID NO: 8781 - protein, 632 aa, Homo sapiens [sequence omitted]

SEQ ID NO: 8782 - protein, 273 aa, Homo sapiens
MKRQGASSERKRARIPSGKAGAANGFLMEVCVDSVESAVNAERGGADRIELCSGLSEGGTTPSMGVLQVVKQSVQIPVFVMIRPRGGDFLYSDREIEVMKADIRLAKLYGADGLVFGALTEDGHIDKELCMSLMAICRPLPVTFHRAFDMVHDPMAALETLLTLGFERVLTSGCDSSALEGLPLIKRLIEQAKGRIVVMPGGGITDRNLQRILEGSGATEFHCSARSTRDSGMKFRNSSVAMGASLSCSEYSLKVTDVTKVRTLNAIAKNILV

SEQ ID NO: 8783 - protein, 582 aa, Homo sapiens
MEELVVEVRGSNGAFYKAFVKDVHEDSITVAFENNWQPDRQIPFHDVRFPPPVGYNKDINESDEVEVYSRANEKEPCCWWLAKVRMIKGEFYVIEYAACDATYNEIVTIERLRSVNPNKPATKDTFHKIKLDVPEDLRQMCAKEAAHKDFKKAVGAFSVTYDPENYQLVILSINEVTSKRAHMLIDMHFRSLRTKLSLIMRNEEASKQLESSRQLASRFHEQFIVREDLMGLAIGTHGANIQQARKVPGVTAIDLDEDTCTFHIYGEDQDAVKKARSFLEFAEDVIQVPRNLVGKVIGKNGKLIQEIVDKSGVVRVRIEAENEKNVPQEEEIMPPNSLPSNNSRVGPNAPEEKKHLDIKENSTHFSQPNSTKVQRGMVPFVFVGTKDSIANATVLLDYHLNYLKEVDQLRLERLQIDEQLRQIGASSRPPPNRTDKEKSYVTDDGQGMGRGSRPYRNRGHGRRGPGYTSESDHRDELSDWSLAPTEEERESFLRRGDGRRRGGGGRGQGGRGRGGGFKGNDDHSRTDNRPRNPREAKGRTTDGSLQNTSSEGSRLRTGKDRNQKKEKPDSVDGQQPLVNGVP

SEQ ID NO: 8784 - protein, 595 aa, Homo sapiens
MAPEIHMTGPMCLIENTNGELVANPEALKILSAITQPVVVVAIVGLYRTGKSYLMNKLAGKNKGFSLGSTVKSHTKGIWMWCVPHPKKPEHTLVLLDTEGLGDVKKGDNQNDSWIFTLAVLLSSTLVYNSMGTINQQAMDQLYYVTELTHRIRSKSSPDENENEDSADFVSFFPDFVWTLRDFSLDLEADGQPLTPDEYLEYSLKLTQGTSQKDKNFNLPRLCIRKFFPKKKCFVFDLPIHRRKLAQLEKLQDEELDPEFVQQVADFCSYIFSNSKTKTLSGGIKVNGPRLESLVLTYINAISRGDLPCMENAVLALAQIENSAAVQKAIAHYDQQMGQKVQLPAETLQELLDLHRVSEREATEVYMKNSFKDVDHLFQKKLAAQLDKKRDDFCKQNQEASSDRCSALLQVIFSPLEEEVKAGIYSKPGGYCLFIQKLQDLEKKYYEEPRKGIQAEEILQTYLKSKESVTDAILQTDQILTEKEKEIEVECVKAESAQASAKMVEEMQIKYQQMMEEKEKSYQEHVKQLTEKMERERAQLLEEQEKTLTSKLQEQARVLKERCQGESTQLQNEIQKLQKTLKKKTKRYMSHKLKI

SEQ ID NO: 8785 - protein, 204 aa, Homo sapiens
MGEAEVGGGGAAGDKGPGEAATSPAEETVVWSPEVEVCLFHAMLGHKPVGVNRHFHMICIRDKFSQNIGRQVPSKVIWDHLSTMYDMQALHESEILPFPNPERNFVLPEEIIQEVREGKVMIEEEMKEEMKEDVDPHNGADDVFSSSGSLGKASEKSSKDKEKNSSDLGCKEGADKRKRSRVTDKVLTANSNPSSPSAAKRRRT

SEQ ID NO: 8786 - protein, 420 aa, Homo sapiens
MSLKFTNAKRIEGLDSNVWIEFTKLAADPSVVNLGQGFPDISPPTYVKEELSKIAAIDSLNQYTRGFGHPSLVKALSYLYEKLYQKQIDSNKEILVTVGAYGSLFNTIQALIDEGDEVILIVPFYDCYEPMVRMAGATPVFIPLRSKPVYGKRWSSSDWTLDPQELESKFNSKTKAIILNTPHNPLGKVYNREELQVIADLCIKYDTLCISDEVYEWLVYSGNKHLKIATFPGMWERTITIGSAGKTFSVTGWKLGWSIGPNHLIKHLQTVQQNTIYTCATPLQEALAQAFWIDIKRMDDPECYFNSLPKELEVKRDRMVRLLESVGLKPIVPDGGYFIIADVSLLDPDLSDMKNNEPYDYKFVKWMTKHKKLSAIPVSAFCNSETKSQFEKFVRFCFIKKDSTLDAAEEIIKAWSVQKS

SEQ ID NO: 8787 - protein, 328 aa, Homo sapiens
MKTCWKIPVFFFVCSFLEPWASAAVKRRPRFPVNSNSNGGNELCPKIRIGQDDLPGFDLISQFQVDKAASRRAIQRVVGSATLQVAYKLGNNVDFRIPTRNLYPSGLPEEYSFLTTFRMTGSTLKKNWNIWQIQDSSGKEQVGIKINGQTQSVVFSYKGLDGSLQTAAFSNLSSLFDSQWHKIMIGVERSSATLFVDCNRIESLPIKPRGPIDIDGFAVLGKLADNPQVSVPFELQWMLIHCDPLRPRRETCHELPARITPSQTTDERGPPGEQGPPGPPGPPGVPGIDGIDGDRGPKGPPGPPGPAGEPGKPGAPGKPGTPGADTSP

SEQ ID NO: 8788 - protein, 316 aa, Homo sapiens
MASTSRLDALPRVTCPNHPDAILVEDYRAGDMICPECGLVVGDRVIDVGSEWRTFSNDKATKDPSRVGDSQNPLLSDGDLSTMIGKGTGAASFDEFGNSKYQNRRTMSSSDRAMMNAFKEITTMADRINLPRNIVDRTNNLFKQVYEQKSLKGRANDAIASACLYIACRQEGVPRTFKEICAVSRISKKEIGRCFKLILKALETSVDLITTGDFMSRFCSNLCLPKQVQMAATHIARKAVELDLVPGRSPISVAAAAIYMASQASAEKRTQKEIGDIAGVADVTIRQSYRLIYPRAPDLFPTDFKFDTPVDKLPQL

SEQ ID NO: 8789 - protein, 413 aa, Homo sapiens
MAPPSVFAEVPQAQPVLVFKLTADFREDPDPRKVNLGVGAYRTDDCHPWVLPVVKKVEQKIANDNSLNHEYLPILGLAEFRSCASRLALGDDSPALKEKRVGGVQSLGGTGALRIGADFLARWYNGTNNKNTPVYVSSPTWENHNAVFSAAGFKDIRSYRYWDAEKRGLDLQGFLNDLENAPEFSIVVLHACAHNPTGIDPTPEQWKQIASVMKHRFLFPFFDSAYQGFASGNLERDAWAIRYFVSEGFEFFCAQSFSKNFGLYNERVGNLTVVGKEPESILQVLSQMEKIVRITWSNPPAQGARIVASTLSNPELFEEWTGNVKTMADRILTMRSELRARLEALKTPGTWNHITDQIGMFSFTGLNPKQVEYLVNEKHIYLLPSGRINVSGLTTKNLDYVATSIHEAVTKIQ

SEQ ID NO: 8790 - protein, 220 aa, Homo sapiens
MAGLSRGSARALLAALLASTLLALLVSPARGRGGRDHGDWDEASRLPPLPPREDAARVARFVTHVSDWGALATISTLEAVRGRPFADVLSLSDGPPGAGSGVPYFYLSPLQLSVSNLQENPYATLTMTLAQTNFCKKHGFDPQSPLCVHIMLSGTVTKVNETEMDIAKHSLFIRHPEMKTWPSSHNWFFAKLNITNIWVLDYFGGPKIVTPEEYYNVTVQ

SEQ ID NO: 8791 - protein, 984 aa, Homo sapiens
MASNPERGEILLTELQGDSRSLPFSENVSAVQKLDFSDTMVQQKLDDIKDRIKREIRKELKIKEGAENLRKVTTDKKSLAYVDNILKKSNKKLEELHHKLQELNAHIVVSDPEDITDCPRTPDTPNNDPRCSTSNNRLKALQKQLDIELKVKQGAENMIQMYSNGSSKDRKLHGTAQQLLQDSKTKIEVIRMQILQAVQTNELAFDNAKPVISPLELRMEELRHHFRIEFAVAEGAKNVMKLLGSGKVTDRKALSEAQARFNESSQKLDLLKYSLEQRLNEVPKNHPKSRIIIEELSLVAASPTLSPRQSMISTQNQYSTLSKPAALTGTLEVRLMGCQDILENVPGRSKATSVALPGWSPSETRSSFMSRTSKSKSGSSRNLLKTDDLSNDVCAVLKLDNTVVGQTSWKPISNQSWDQKFTLELDRSRELEISVYWRDWRSLCAVKFLRLEDFLDNQRHGMCLYLEPQGTLFAEVTFFNPVIERRPKLQRQKKIFSKQQGKTFLRAPQMNINIATWGRLVRRAIPTVNHSGTFSPQAPVPTTVPVVDVRIPQLAPPASDSTVTKLDFDLEPEPPPAPPRASSLGEIDESSELRVLDIPGQDSETVFDIQNDRNSILPKSQSEYKPDTPQSGLEYSGIQELEDRRSQQRFQFNLQDFRCCAVLGRGHFGKVLLAEYKNTNEMFAIKALKKGDIVARDEVDSLMCEKRIFETVNSVRHPFLVNLFACFQTKEHVCFVMEYAAGGDLMMHIHTDVFSEPRAVFYAACVVLGLQYLHEHKIVYRDLKLDNLLLDTEGFVKIADFGLCKEGMGYGDRTSTFCGTPEFLAPEVLTETSYTRAVDWWGLGVLIYEMLVGESPFPGDDEEEVFDSIVNDEVRYPRFLSTEAISIMRRLLRRNPERRLGASEKDAEDVKKHPFFRLIDWSALMDKKVKPPFIPTIRGREDVSNFDDEFTSEAPILTPPREPRILSEEEQEMFRDFDYIADWC

SEQ ID NO: 8792 - protein, 146 aa, Homo sapiens
MVDELVLLLHALLMRHRALSIENSQLMEQLRLLVCERASLLRQVRPPSCPVPFPETFNGESSRLPEFIVQTASYMLVNENRFCNDAMKVAFLISLLTGEAEEWVVPYIEMDSPILGDYRAFLDEMKQCFGWDDDEDDDDEEEEDDY

SEQ ID NO: 8793 - protein, 165 aa, Homo sapiens
MVNPGSSSQPPPVTAGSLSWKRCAGCGGKIADRFLLYAMDSYWHSRCLKCSCCQAQLGDIGTSCYTKSGMILCRNDYIRLFGNSGACSACGQSIPASELVMRAQGNVYHLKCFTCSTCRNRLVPGDRFHYINGSLFCEHDRPTALINGHLNSLQSNPLLPDQKVC

SEQ ID NO: 8794 - protein, 356 aa, Homo sapiens
MGLLRIMMPPKLQLLAVVAFAVAMLFLENQIQKLEESRSKLERAIARHEVREIEQRHTMDGPRQDATLDEEEDMVIIYNRVPKTASTSFTNIAYDLCAKNKYHVLHINTTKNNPVMSLQDQVRFVKNITSWKEMKPGFYHGHVSYLDFAKFGVKKKPIYINVIRDPIERLVSYYYFLRFGDDYRPGLRRRKQGDKKTFDECVAEGGSDCAPEKLWLQIPFFCGHSSECWNVGSRWAMDQAKYNLINEYFLVGVTEELEDFIMLLEAALPRFFRGATELYRTGKKSHLRKTTEKKLPTKQTIAKLQQSDIWKMENEFYEFALEQFQFIRAHAVREKDGDLYILAQNFFYEKIYPKSN

SEQ ID NO: 8795 - protein, 124 aa, Homo sapiens
MVAMAAGPSGCLVPAFGLRLLLATVLQAVSAFGAEFSSEACRELGFSSNLLCSSCDLLGQFNLLQLDPDCRGCCQEEAQFETKKLYAGAILEVCGUKLGRFPQVQVCPWFRPCIKAFGRQWEHC

SEQ ID NO: 8796 - protein, 919 aa, Homo sapiens
MGLFRGFVFLLVLCLLHQSNTSFIKLNNNGFEDIVIVIDPSVPEDEKIIEQIEDMVTTASTYLFEATEKRFFFKNVSILIPENWKENPQYKRPKHENHKHADVIVAPPTLPGRDEPYTKQFTECGEKGEYIHFTPDLLLGKKQNEYGPPGKLFVHEWAHLRWGVFDEYNEDQPFYRAKSKKIEATRCSAGISGRNRVYKCQGGSCLSRACRIDSTTKLYGKDCQFFPDKVQTEKASIMFMQSIDSVVEFCNEKTHNQEAPSLQNIKCNFRSTWEVISNSEDFKNTIPMVTPPPPPVFSLLKISQRIVCLVLDKSGSMGGKDRLNRMNQAAKHFLLQTVENGSWVGMVHFDSTATIVNKLIQIKSSDERNTLMAGLPTYPLGGTSICSGIKYAFQVIGELHSQLDGSEVLLLTDGEDNTASSCIDEVKQSGAIVHFIALGRAADEAVIEMSKITGGSHFYVSDEAQNNGLIDAFGALTSGNTDLSQKSLQLESKGLTLNSNAWMNDTVIIDSTVGKDTFFLITWNSLPPSISLWDPSGTIMENFTVDATSKMAYLSIPGTAKVGTWAYNLQAKANPETLTITVTSRAANSSVPPITVNAKMNKDVNSFPSPMIVYAEILQGYVPVLGANVTAFIESQNGHTEVLELLDNGAGADSFKNDGVYSRYFTAYTENGRYSLKVRAHGGANTARLKLRPPLNRAAYIPGWVVNGEIEANPPRPEIDEDTQTTLEDFSRTASGGAFVVSQVPSLPLPDQYPPSQITDLDATVHEDKIILTWTAPGDNFDVGKVQRYIIRISASILDLRDSFDDALQVNTTDLSPKEANSKESFAFKPENISEENATHIFIAIKSIDKSNLTSKVSNIAQVTLFIPQANPDDIDPTPTPTPTPTPDKSHNSGVNISTLVLSVIGSVVIVNFILSTTI

SEQ ID NO: 8797 - protein, 943 aa, Homo sapiens
MTQRSIAGPICNLKFVTLLVALSSELPFLGAGVQLQDNGYNGLLIAINPQVPENQNLISNIKEMITEASFYLFNATKRRVFFRNIKILIPATWKANNNSKIKQESYEKANVIVTDWYGAHGDDPYTLQYRGCGKEGKYIHFTPNFLLNDNLTAGYGSRGRVFVHEWAHLRWGVFDEYNNDKPFYINGQNQIKVTRCSSDITGIFVCEKGPCPQENCIISKLFKEGCTFIYNSTQNATASIMFMQSLSSVVEFCNASTHNQEAPNLQNQMCSLRSAWDVITDSADFHHSFPMNGTELPPPPTFSLVQAGDKVVCLVLDVSSKMAEADRLLQLQQAAEFYLMQIVEIHTFVGIASFDSKGEIRAQLHQINSNDDRKLLVSYLPTTVSAKTDISICSGLKKGFEVVEKLNGKAYGSVMILVTSGDDKLLGNCLPTVLSSGSTIHSIALGSSAAPNLEELSRLTGGLKFFVPDISNSNSMIDAFSRISSGTGDIFQQHIQLESTGENVKPHHQLKNTVTVDNTVGNDTMFLVTWQASGPPEIILFDPDGRKYYTNNFITNLTFRTASLWIPGTAKPGHWTYTLNNTHHSLQALKVTVTSRASNSAVPPATVEAFVERDSLHFPHPVMIYANVKQGFYPILNATVTATVEPETGDPVTLRLLDDGAGADVIKNDGIYSRYFFSFAANGRYSLKVHVNHSPSISTPAHSIPGSHAMYVPGYTANGNIQMNAPRKSVGRNEEERKWGFSRVSSGGSFSVLGVPAGPHPDVFPPCKIIDLEAVKVEEELTLSWTAPGEDFDQGQATSYEIRMSKSLQNIQDDFNNAILVNTSKRNPQQAGIREIFTFSPQISTNGPEHQPNGETHESHRIYVAIRAMDRNSLQSAVSNIAQAPLFIPPNSDPVPARDYLILKGVLTAMGLIGIICLIIVVTHHTLSRKKRADKKENGTKLL

SEQ ID NO: 8798 - protein, 467 aa, Homo sapiens
MKNQNGTFKDWANANVSRQIEDTVLYGYYTLYSVILFCVFFWIPFVYFYYEEKDDDDTSKCTQIKTALKYTLGFVVICALLLLVGAFVPLNVPNNKNSTEWEKVKSLFEELGSSHGLAALSFSISSLTLIGMLAAITYTAYGMSALPLNLIKGTRSAAYERLENTEDIEEVEQHIQTIKSKSKDGRPLPARDKRALKQFEERLRTLKKRERHLEFIENSWWTKFCGALRPLKIVWGIFFILVALLFVISLFLSNLDKALHSAGIDSGFIIFGANLSNPLNMLLPLLQTVFPLDYILITIIIMYFIFTSMAGIRNIGIWFFWIRLYKIRRGRTRPQALLFLCMILLLIVLHTSYMIYSLAPQYVMYGSQNYLIETNITSDNHKGNSTLSVPKRCDADAPEDQCTVTRTYLFLHKFWFFSAAYYFGNWAFLGVFLIGLIVSCCKGKKSVIEGVDEDSDISDDEPSVYSA

SEQ ID NO: 8799 - protein, 470 aa, Homo sapiens
MEFAAENEGKSGGGLHSVAEGVRLSPEPGREGVRDLAGAEEFGGGEEGTGLTGIKEIGDGEEGSGQRPEEIPMDLTVVKQEIIDWPGTEGRLAGQWVEQEVEDRPEVKDENAGVLEVKQETDSSLVVKEAKVGEPEVKEEKVKEEVMDWSEVKEEKDNLEIKQEEKFVGQCIKEELMHGECVKEEKDFLKKEIVDDTKVKEEPPINHPVGCKRKLAMSRCETCGTEEAKYRCPRCMRYSCSLPCVKKHKAELTCNGVRDKTAYISIQQFTEMNLLSDYRFLEDVARTADHISRDAFLKRPISNKYMYFMKNRARRQGINLKLLPNGFTKRKENSTFFDKKKQQFCWHVKLQFPQSQAEYIEKRVPDDKTINEILKPYIDPEKSDPVIRQRLKAYIRSQTGVQILMKIEYMQQNLVRYYELDPYKSLLDNLRNKVIIEYPTLHVVLKGSNNDMKVLHQVKSESTKNVGNEN

SEQ ID NO: 8800 - protein, 581 aa, Homo sapiens
MAASGRGLCKAVAASPFPAWRRDNTEARGGLKPEYDAVVIGAGHNGLVAAAYLQRLGVNTAVFERRHVIGGAAVTEEIIPGFKFSRASYLLSLLRPQIYTDLELKKHGLRLHLRNPYSFTPMLEEGAGSKVPRCLLLGTDMAENQKQIAQFSQKDAQVFPKYEEFMHRLALAIDPLLDAAPVDMAAFQHGSLLQRMRSLSTLKPLLKAGRILGAQLPRYYEVLTAPITKVLDQWFESEPLKATLATDAVIGAMTSPHTPGSGYVLLHHVMGGLEGMQGAWGYVQGGMGALSDAIASSATTHGASIFTEKTVAKVQVNSEGCVQGVVLEDGTEVRSKMVLSNTSPQITFLKLTPQEWLPEEFLERISQLDTRSPVTKINVAVDRLPSFLAAPNAPRGQPLPHHQCSIHLNCEDTLLLHQAFEDAMDGLPSHRPVIELCIPSSLDPTLAPPGCHVVSLFTQYMPYTLAGGKAWDEQERDAYADRVFDCIEVYAPGFKDSVVGRDILTPPDLERIFGLPGGNIFHCAMSLDQLYFARPVPLHSGYRCPLQGLYLCGSGAHPGGGVMGAAGRNAAHVAFRDLKSM

SEQ ID NO: 8801 - protein, 645 aa, Homo sapiens
MAPSADPGMSRMLPFLLLLWFLPITEGSQRAEPMFTAVTNSVLPPDYDSNPTQLNYGVAVTDVDHDGDFEIVVAGYNGPNLVLKYDRAQKRLVNIAVDERSSPYYALRDRQGNAIGVTACDIDGDGREEIYFLNTNNAFSGVATYTDKLFKFRNNRWEDILSDEVNVARGVASLFAGRSVACVDRKGSGRYSIYIANYAYGNVGPDALIEMDPEASDLSRGILALRDVAAEAGVSKYTGGRGVSVGPILSSSASDIFCDNENGPNFLFHNRGDGTFVDAAASAGVDDPHQHGRGVALADFNRDGKVDIVYGNWNGPHRLYLQMSTHGKVRFRDIASPKFSMPSPVRTVITADFDNDQELEIFFNNIAYRSSSANRLFRVIRREHGDPLIEELNPGDALEPEGRGTGGVVTDFDGDGMLDLILSHGESMAQPLSVFRGNQGFNNNWLRVVPRTRFGAFARGAKVVLYTKKSGAHLRIIDGGSGYLCEMEPVAHFGLGKDEASSVEVTWPDGKMVSRNVASGEMNSVLEILYPRDEDTLQDPAPLECGQGFSQQENGHCMDTNECIQFPFVCPRDKPVCVNTYGSYRCRTNKKCSRGYEPNEDGTACVAQVAFLGGYSSAASRISEPLSRASYLSLGLGLCLQLYAL

SEQ ID NO: 8802 - protein, 661 aa, Homo sapiens
MAPSADPGMSRMLPFLLLLWFLPITEGSQRAEPMFTAVTNSVLPPDYDSNPTQLNYGVAVTDVDHDGDFEIVVAGYNGPNLVLKYDRAQKRLVNIAVDERSSPYYALRDRQGNAIGVTACDIDGDGREEIYFLNTNNAFSGVATYTDKLFKFRNNRWEDILSDEVNVARGVASLFAGRSVACVDRKGSGRYSIYIANYAYGNVGPDALIEMDPEASDLSRGILALRDVAAEAGVSKYTGGRGVSVGPILSSSASDIFCDNENGPNFLFHNRGDGTFVDAAASAGVDDPHQHGRGVALADFNRDGKVDIVYGNWNGPHRLYLQMSTHGKVRFRDIASPKFSMPSPVRTVITADFDNDQELEIFFNNIAYRSSSANRLFRVIRREHGDPLIEELNPGDALEPEGRGTGGVVTDFDGDGMLDLILSHGESMAQPLSVFRGNQGFNNNWLRVVPRTRFGAFARGAKVVLYTKKSGAHLRIIDGGSGYLCEMEPVAHFGLGKDEASSVEVTWPDGKMVSRNVASGEMNSVLEILYPRDEDTLQDPAPLECGQGFSQQENGHCMDTNECIQFPFVCPRDKPVCVNTYGSYRCRTNKKCSRGYEPNEDGTACVGTLGQSPGPRPTTPTAAAATAAAAAAAGAATAAPVLVDGDLNLGSVVKESCEPSC

SEQ ID NO: 8803 - protein, 622 aa, Homo sapiens
MTENGSHQLIVKARFNFKQTNEDELSVCKGDIIYVTRVEEGGWWEGTLNGRTGWFPSNYVREIKSSERPLSPKAVKGFETAPLTKNYYTVVLQNILDTEKEYAKELQSLLVTYLRPLQSNNNLSTVEVTSLLGNFEEVCTFQQTLCQALEECSKFPENQHKVGGCLLSLMPHFKSMYLAYCANHPSAVNVLTQHSDELEQFMENQGASSPGILILTTNLSKPFMRLEKYVTLLQELERHMEDTHPDHQDILKAIVAFKTLMGQCQDLRKRKQLELQILSEPIQAWEGEDIKNLGNVIFMSQVMVQYGACEEKEERYLMLFSNVLIMLSASPRMSGFIYQGKIPIAGTVVTRLDEIEGNDCTFEITGNTVERIVVHCNNNQDFQEWLEQLNRLIRGPASCSSLSKTSSSSCSAHSSFSSTGQPRGPLEPPQIIKPWSLSCLRPAPPLRPSAALGYKERMSYILKESSKSPKTMKKFLHKRKTERKPSEEEYVIRKSTAALEEDAQILKVIEAYCTSANFQQGHGSSTRKDSIPQVLLPEEEKLIIEETRSNGQTIMEEKSLVDTVYALKDEVRELKQENKRMKQCLEEELKSRRDLEKLVRRLLKQTDECIRGESSSKTSILP

SEQ ID NO: 8804 - protein, 3165 aa, Homo sapiens
MTDKSIVILSLMVFHSSFINGKTCRRQLVEEWHPQPSSYVVNWTLTENICLDFYRDCWFLGVNTKIDTSGNQAVPQICPLQIQLGDILVISSEPSLQFPEINLMNVSETSFVGCVQNTTTEDQLLFGCRLKGMHTVNSKWLSVGTHYFITVMASGPSPCPLGLRLNVTVKQQFCQESLSSEFCSGHGKCLSEAWSKTYSCHCQPPFSGKYCQELDACSFKPCKNNGSCINKRENWDEQAYECVCHPPFTGKNCSEIIGQCQPHVCFHGNCSNITSNSFICECDEQFSGPFCEVSAKPCVSLLFWKRGICPNSSSAYTYECPKGSSSQNGETDVSEFSLVPCQNGTDCIKISNDVMCICSPIFTDLLCKSIQTSCESFPLRNNATCKKCEKDYPCSCISGFTEKNCEKAIDHCKLLSINCLNEEWCFNIIGRFKYVCIPGCTKNPCWFLKNVYLIHQHLCYCGVTFHGICQDKGPAQFEYVWQLGFAGSEGEKCQGVIDAYFFLAANCTEDATYVNDPEDNNSSCWFPHEGTKEICANGCSCLSEEDSQEYRYLCFLRWAGNMYLENTTDDQENECQHEAVCKDEINRPRCSCSLSYIGRLCVVNVDYCLGNHSISVHGLCLALSHNCNCSGLQRYERNICEIDTEDCKSASCKNGTTSTHLRGYFFRKCVPGFKGTQCEIDIDECASHPCKNGATCIDQPGNYFCQCVPPFKVVDGFSCLCNPGYVGIRCEQDIDDCILNACEHNSTCKDLHLSYQCVCLSDWEGNFCEQESNECKMNPCKNNSTCTDLYKSYRCECTSGWTGQNCSEEINECDSDPCMNGGLCHESTIPGQFVCLCPPLYTGQFCHQRYNLCDLLHNPCRNNSTCLALVDANQHCICREEFEGKNCEIDVKDCLFLSCQDYGDCEDMVNNFRCICRPGFSGSLCEIEINECSSEPCKNNGTCVDLTNRFFCNCEPEYHGPFCELDVNKCKISPCLDEENCVYRTDGYNCLCAPGYTGINCEINLDECLSEPCLHDGVCIDGINHYTCDCKSGFFGTHCETNANDCLSNPCLHGRCTELINEYPCSCDADGTSTQCKIKINDCTSIPCMNEGFCQKSAHGFTCICPRGYTGAYCEKSIDNCAEPELNSVICLNGGICVDGPGHTFDCRCLPGFSGQFCEININECSSSPCLHGADCEDHINGYVCKCQPGWSGHHCENELECIPNSCVHELCMENEPGSTCLCTPGFMTCSIGLLCGDEIRRITCLTPIFQRTDPISTQTYTIPPSETLVSSFPSIKATRIPAIMDTYPVDQGPKQTGIVKHDILPTTGLATLRISTPLESYLLQELIVTRELSAKHSLLSSADVSSSRFLNFGIRDPAQIVQDKTSVSHMPIRTSAATLGFFFPDRRARTPFIMSSLMSDFIFPTQSLLFENCQTVALSATPTTSVIRSIPGADIELNRQSLLSRGFLLIAASISATPVVSRGAQEDIEEYSADSLISRREHWRLLSPSMSPIFPAKVIISKQVTILNSSALHRFSTKAFNPSEYQAITEASSNQRLTNIKSQAADSLRELSQTCATCSMTEIKSSREFSDQVLHSKQSHFYETFWMNSAILASWYALMGAQTITSGHSFSSATEITPSVAFTEVPSLFPSKKSAKRTILSSSLEESITLSSNLDVNLCLDKTCLSIVPSQTISSDLMNSDLTSKMTTDELSVSENILKLLKIRQYGITMGPTEVLNQESLLDMEKSKGSHTLFKLHPSDSSLDFELNLQIYPDVTLKTYSEITHANDFKNNLPPLTGSVPDFSEVTTNVAFYTVSATPALSIQTSSSMSVIRPDWPYFTDYMTSLKKEVKTSSEWSKWELQPSVQYQEFPTASRHLPFTRSLTLSSLESILAPQRLMISDFSCVRYYGDSYLEFQNVALNPQNNISLEFQTFSSYGLLLYVKQDSNLVDGFFIQLFIENGTLKYHFYCPGEAKFKSINTTVRVDNGQKYTLLIRQELDPCNAELTILGRNTQICESINHVLGKPLPKSGSVFIGGFPDLHGKIQMPVPVKNFTGCIEVIEINNWRSFIPSKAVKNYHINNCRSQGFMLSPTASFVDASDVTQGVDTMWTSVSPSVAAPSVCQQDVCHNGGTCHAIFLSSGIVSFQCDCPLHFTGRFCEKDAGLFFPSFNGNSYLELPFLKFVLEKEHNRTVTIYLTIKTNSLNGTILYSNGNNCGKQFLHLFLVEGRPSVKYGCGNSQNILTVSANYSINTNAFTPITIRYTTPVGSPGVVCMIEMTADGKPPVQKKDTEISHASQAYFESMFLGHIPANVQIHKKAGPVYGFRGCILDLQVNNKEFFIIDEARHGKNIENCHVPWCAHHLCRNNGTCISDNENLFCECPRLYSGKLCQFASCENNPCGNGATCVPKSGTDIVCLCPYGRSGPLCTDAINITQPRFSGTDAFGYTSFLAYSRISDISFHYEFHLKFQLANNHSALQNNLIFFTGQKGHGLNGDDFLAVGLLNGSVVYSYNLGSGIASIRSEPLNLSLGVHTVHLGKFFQEGWLKVDDHKNKSIIAPGRLVGLNVFSQFYVGGYSEYTPDLLPNGADFKNGFQGCIFTLQVRTEKDGHFRGLGNPEGHPNAGRSVGQCHASPCSLMKCGNGGTCIESGTSVYCNCTTGWKGSFCTETVSTCDPEHDPPHHCSRGATCISLPHGYTCFCPLGTTGIYCEQALILIVILEKPKPAERKVKKEALSISDPSFRSNELSWMSFASFHVRKKTHIQLQFQPLAADGILFYAAQHLKAQSGDFLCISLVNSSVQLRYNLGDRTIILETLQKVTINGSTWHIIKAGRVGAEGYLDLDGINVTEKASTKMSSLDTNTDFYIGGVSSLNLVNPMAIENEPVGFQGCIRQVIINNQELQLTEFGAKGGSNVGDCDGTACGYNTCRNGGECTVNGTTFSCRCLPDWAGNTCNQSVSCLNNLCLHQSLCIPDQSFSYSCLCTLGWVGRYCENKTSFSTAKFMGNSYIKYIDPNYRMRNLQFTTISLNFSTTKTEGLIVWMGIAQNEENDFLAIGLHNQTLKIAVNLGERISVPMSYNNGTFCCNKWHHVVVIQNQTLIKAYINNSLILSEDIDPHKNFVALNYDGICYLGGFEYGRKVNIVTQEIFKTNFVGKIKDVVFFQEPKNIELIKLEGYNVYDGDEQNEVT

SEQ ID NO: 8805 - protein, 147 aa, Homo sapiens
MGTPASVVSEPPPWQAPIEARGRKQASANIFQDAELLQIQALFQRSGDQLAEERAQIIWECAGDHRVAEALKRLRRKRPPRQKPLGHSLHHCSRLRILEPHSALANPQSATETASSEQYLHSRKKSARIRRNWRKSGPTSYLHQIRH

SEQ ID NO: 8806 - protein, 385 aa, Homo sapiens
MSRPQLRRWRLVSSPPSGVPGLALLALLALLALRLAAGTDCPCPEPELCRPIRHHPDFEVFVFDVGQKTWKSYDWSQITTVATFGKYDSELMCYAHSKGARVVLKGDVSLKDIIDPAFRASWIAQKLNLAKTQYMDGINIDIEQEVNCLSPEYDALTALVKETTDSFHREIEGSQVTFDVAWSPKNIDRRCYNYTGIADACDFLFVMSYDEQSQIWSECIAAANAPYNQTLTGYNDYIKMSINPKKLVMGVPWYGYDYTCLNLSEDHVCTIAKVPFRGAPCSDAAGRQVPYKTIMKQINSSISGNLWDKDQRAPYYNYKDPAGHFHQVWYDNPQSISLKATYIQNYRLRGIGMWNANCLDYSGDAVAKQQTEEMWEVLKPKLLQR

SEQ ID NO: 8807 - protein, 479 aa, Homo sapiens
MDETSPLVSPERAQPPDYTFPSGSGAHFPQVPGGAVRVAAAAGSGPSPPGSPGHDRERQPLLDRARGAAAQGQTQTVAAQAQALAAQAAAAAHAAQAHRERNEFPEDPEFEAVVRQAELAIERCIFPERIYQGSSGSYFVKDPQGRIIAVFKPKNEEPYGHLNPKWTKWLQKLCCPCCFGRDCLVLNQGYLSEAGASLVDQKLELNIVPRTKVVYLASETFNYSAIDRVKSRGKRLALEKVPKVGQRFNRIGLPPKVGSFQLFVEGYKDADYWLRRFEAEPLPENTNRQLLLQFERLVVLDYIIRNTDRGNDNWLIKYDCPMDSSSSRDTDWVVVKEPVIKVAAIDNGLAFPLKHPDSWRAYPFYWAWLPQAKVPFSQEIKDLILPKISDPNFVKDLEEDLYELFKKDPGFDRGQFHKQIAVMRGQILNLTQALKDNKSPLHLVQMPPVIVETARSHQRSSSESYTQSFQSRKPFFSWW

SEQ ID NO: 8808 - protein, 68 aa, Homo sapiens
MSGSSSVAAMKKVVQQLRLEAGLNRVKVSQAAADLKQFCLQNAQHDPLLTGVSSSTNPFRPQKVCSFL

SEQ ID NO: 8809 - protein, 449 aa, Homo sapiens
MLGPQVWSSVRQGLSRSLSRNVGVWASGEGKKVDIAGIYPPVTTPFTATAEVDYGKLEENLHKLGTFPFRGAVGGVCALANVLGAQVCQLERLCCTGQWEDAQKLQHRLIEPNAARIIAVFKPKNEEPYGHLNPKWTKWLQKLCCPCCFGRDCLVLNQGYLSEAGASLVDQKLELNIVPRTKVVYLASETFNYSAIDRVKSRGKRLALEKVPKVGQRFNRIGLPPKVGSFQLFVEGYKDADYWLRRFEAEPLPENTNRQLLLQFERLVVLDYIIRNTDRGNDNWLIKYDCPMDSSSSRDTDWVVVKEPVIKVAAIDNGLAFPLKHPDSWRAYPFYWAWLPQAKVPFSQEIKDLILPKISDPNFVKDLEEDLYELFKKDPGFDRGQFHKQIAVMRGQILNLTQALKDNKSPLHLVQMPPVIVETARSHQRSSSESYTQSFQSRKPFFSWW

SEQ ID NO: 8810 - protein, 44 aa, Homo sapiens
MIRPQSSMSKHIPQFCGVLGHTFMEFLKGSGDYCQAQHDLYADK

SEQ ID NO: 8811 - protein, 3080 aa, Homo sapiens
MKEHIIYQKLYGLILMSSFIFLSDTLSLKGKKLDFFGRGDTYVSLIDTIPELSRFTACIDLVFMDDNSRYWMAFSYITNNALLGREDIDLGLAGDHQQLILYRLGKTFSIRHHLASFQWHTICLIWDGVKGKLELFLNKERILEVTDQPHNLTPHGTLFLGHFLKNESSEVKSMMRSFPGSLYYFQLWDHILENEEFMKCLDGNIVSWEEDVWLVNKIIPTVDRTLRCFVPENMTIQEKSTTVSQQIDMTTPSQITGVKPQNTAHSSTLLSQSIPIFATDYTTISYSNTTSPPLETMTAQKILKTLVDETATFAVDVLSTSSAISLPTQSISIDNTTNSMKKTKSPSSESTKTTKMVEAMATEIFQPPTPSNFLSTSRFTKNSVVSTTSAIKSQSAVTKTTSLFSTIESTSMSTTPCLKQKSTNTGALPISTAGQEFIESTAAGTVPWFTVEKTSPASTHVGTASSFPPEPVLISTAAPVDSVFPRNQTAFPLATTDMKIAFTVHSLTLPTRLIETTPAPRTAETELTSTNFQDVSLPRVEDAMSTSMSKETSSKTFSFLTSFSFTGTESVQTVIDAEATRTALTPEITLASTVAETMLSSTITGRVYTQNTPTADGHLLTLMSTRSASTSKAPESGPTSTTDEAAHLFSSNETIWTSRPDQALLASMNTTTILTFVPNENFTSAFHENTTYTEYLSATTNITPLKASPEGKGTTANDATTARYTTAVSKLTSPWFANFSIVSGTTSITNMPEFKLTTLLLKTIPMSTKPANELPLTPRETVVPSVDIISTLACIQPNFSTEESASETTQTEINGAIVFGGTTTPVPKSATTQRLNATVTRKEATSHYLMRKSTIAAVAEVSPFSTMLEVTDESAQRVTASVTVSSFPDIEKLSTPLDNKTATTEVRESWLLTKLVKTTPRSSYNEMTEMFNFNHTYVAHWTSETSEGISAGSPTSGSTHIFGEPLGASTTRISETSFSTTPTDRTATSLSDGILPPQPTAAHSSATPVPVTHMFSLPVNGSSVVAEETEVTMSEPSTLARAFSTSVLSDVSNLSSTTMTTALVPPLDQTASTTIVIVPTHGDLIRTTSEATVISVRKTSMAVPSLTETPFHSLRLSTPVTAKAETTLFSTSVDTVTPSTHTLVCSKPPPDNIPPASSTHVISTTSTPEATQPISQVEETSTYALSFPYTFSGGGVVASLATGTTETSVVDETTPSHISANKLTTSVNSHISSSATYRVHTPVSIQLVTSTSVLSSDKDQMTISLGKTPRTMEVTEMSPSKNSFISYSRGTPSLEMTDTGFPETTKISSHQTHSPSEIPLGTPSDGNLASSPTSGSTQITPTLTSSNTVGVHIPEMSTSLGKTALPSQALTITTFLCPEKESTSALPAYTPRTVEMIVNSTYVTHSVSYGQDTSFVDTTTSSSTRISNPMDINTTFSHLHSLRTQPEVTSVASFISESTQTFPESLSLSTAGLYNDGFTVLSDRITTAFSVPNVPTMLPRESSMATSTPIYQMSSLPVNVTAFTSKKVSDTPPIVITKSSKTMHPGCLKSPCTATSGPMSEMSSIPVNNSAFTPATVSSDTSTRVGLFSTLLSSVTPRTTMTMQTSTLDVTPVIYAGATSKNKMVSSAFTTEMIEAPSRITPTTFLSPTEPTLPFVKTVPTTIMAGIVTPFVGTTAFSPLSSKSTGAISSIPKTTFSPFLSATQQSSQADEATTLGILSGITNRSLSTVNSGTGVALTDTYSRITVPENMLSPTHADSLHTSFNIQVSPSLTSFKSASGPTKNVKTTTNCFSSNTRKMTSLLEKTSLTNYATSLNTPVSYPPWTPSSATLPSLTSFVYSPHSTEAEISTPKTSPPPTSQMVEFPVLGTRMTSSNTQPLLMTSWNIPTAEGSQFPISTTINVPTSNEMETETLHLVPGPLSTFTASQTGLVSKDVMAMSSIPMSGILPNHGLSENPSLSTSLRAITSTLADVKHTFEKMTTSVTPGTTLPSILSGATSGSVISKSPILTWLLSSLPSGSPPATVSNAPHVMTSSTVEVSKSTFLTSDMISAHPFTNLTTLPSATMSTILTRTIPTPTLGGITTGFPTSLPMSINVTDDIVYISTHPEASSRTTITANPRTVSHPSSFSRKTMSPSTTDHTLSVGAMPLPSSTITSSWNRIPTASSPSTLIIPKPTLDSLLNIMTTTSTVPGASFPLISTGVTYPFTATVSSPISSFFETTWLDSTPSFLSTEASTSPTATKSTVSFYNVEMSFSVFVEEPRIPITSVINEFTENSLNSIFQNSEFSLATLETQIKSRDISEEEMVMDRAILEQREGQEMATISYVPYSCVCQVIIKASSSLASSELMRKIKSKIHGNFTHGNFTQDQLTLLVNCEHVAVKKLEPGNCKADETASKYKGTYKWLLTNPTETAQTRCIKNEDGNATRFCSISINTGKSQWEKPKFKQCKLLQELPDKIVDLANITISDENAEDVAEHILNLINESPALGKEETKIIVSKISDISQCDEISMNLTHVMLQIINVVLEKQNNSASDLHEISNEILRIIERTGHKMEFSGQIANLTVAGLALAVLRGDHTFDGMAFSIHSYEEGTDPEIFLGNVPVGGILASIYLPKSLTERIPLSNLQTILFNFFGQTSLFKTKNVTKALTTYVVSASISDDMFIQNLADPVVITLQHIGGNQNYGQVHCAFWDFENNNGLGGWNSSGCKVKETNVNYTICQCDHLTHFGVLMDLSRSTVDSVNEQILALITYTGCGISSIFLGVAVVTYIAFHKLRKDYPAKILINLCTALLMLNLVFLINSWLSSFQKVGVCITAAVALHYFLLVSFTWMGLEAVHMYLALVKVFNIYIPNYILKFCLVGWGIPAIMVAITVSVKKDLYGTLSPTTPFCWIKDDSIFYISVVAYFCLIFLMNLSMFCTVLVQLNSVKSQIQKTRRKMILHDLKGTMSLTFLLGLTWGFAFFAWGPMRNFFLYLFAIFNTLQGFFIFVFHCVMKESVREQWQIHLCCGWLRLDNSSDGSSRCQIKVGYKQEGLKKIFEHKLLTPSLKSTATSSTFKSLGSAQGTPSEISFPNDDFDKDPYCSSP

SEQ ID NO: 8812 - protein, 349 aa, Homo sapiens
MAKAGDKSSSSGKKSLKRKAAAEELQEAAGAGDGATENGVQPPKAAAFPPGFSISEIKNKQRRHLMFTRWKQQQRKEKLAAKKKLKKEREALGDKAPPKPVPKTIDNQRVYDETTVDPNDEEVAYDEATDEFASYFNKQTSPKILITTSDRPHGRTVRLCEQLSTVIPNSHVYYRRGLALKKIIPQCIARDFTDLIVINEDRKTPNGLILSHLPNGPTAHFKMSSVRLRKEIKRRGKDPTEHIPEIILNNFTTRLGHSIGRMFASLFPHNPQFIGRQVATFHNQRDYIFFRFHRYIFRSEKKVGIQELGPRFTLKLRSLQKGTFDSKYGEYEWVHKPREMDTSRRKFHL

SEQ ID NO: 8813 - protein, 210 aa, Homo sapiens
MASHRHSGPSSYKVGTMAEKFDCHYCRDPLQGKKYVQKDGHHCCLKCFDKFCANTCVECRKPIGADSKEVHYKNRFWHDTCFRCAKCLHPLANETFVAKDNKILCNKCTTREDSPKCKGCFKAIVAGDQNVEYKGTVWHKDCFTCSNCKQVIGTGSFFPKGEDFYCVTCHETKFAKHCVKCNKGLVKAPVWWPMKDNPGTTTASTAKNAP

SEQ ID NO: 8814 - protein, 296 aa, Homo sapiens
MASHRHSGPSSYKVGTMAEKFDCHYCRDPLQGKKYVQKDGHHCCLKCFDKFCANTCVECRKPIGADSKEVHYKNRFWHDTCFRCAKCLHPLANETFVAKDNKILCNKCTTREDSPKCKGCFKAIVAGDQNVEYKGTVWHKDCFTCSNCKQVIGTGSFFPKGEDFYCVTCHETKFAKHCVKCNKAITSGGITYQDQPWHADCFVCVTCSKKLAGQRFTAVEDQYYCVDCYKNFVAKKCAGCKNPITGFGKGSSVVAYEGQSWHDYCFHCKKCSVNLANKRFVFHQEQVYCPDCAKKL

SEQ ID NO: 8815 - protein, 351 aa, Homo sapiens
MGNAATAKKGSEVESVKEFLAKAKEDFLKKWENPTQNNAGLEDFERKKTLGTGSFGRVMLVKHKATEQYYAMKILDKQKVVKLKQIEHTLNEKRILQAVNFPFLVRLEYAFKDNSNLYMVMEYVPGGEMFSHLRRIGRFSEPHARFYAAQIVLTFEYLHSLDLIYRDLKPENLLIDHQGYIQVTDFGFAKRVKGRTWTLCGTPEYLAPEIILSKGYNKAVDWWALGVLIYEMAAGYPPFFADQPIQIYEKIVSGKVRFPSHFSSDLKDLLRNLLQVDLTKRFGNLKNGVSDIKTHKWFATTDWIAIYQRKVEAPFIPKFRGSGDTSNFDDYEEEDIRVSITEKCAKEFGEF

SEQ ID NO: 8816 - protein, 211 aa, Homo sapiens
MAQAKINAKANEGRFCRSSSMADRSSRLLESLDQLELRVEALREAATAVEQEKEILLEMIHSIQNSQDMRQISDGEREELNLTANRLMGRTLTVEVSVETIRNPQQQESLKHATRIIDEVVNKFLDDLGNAKSHLMSLYSACSSEVPHGPVDQKFQSIVIGCALEDQKKIKRRLETLLRNIENSDKAIKLLEHSKGAGSKTLQQNAESRFN

SEQ ID NO: 8817 - protein, 701 aa, Homo sapiens
MARRGWRRAPLRRGVGSSPRARRLMRPLWLLLAVGVFDWAGASDGGGGEARAMDEEIVSEKQAEESHRQDSANLLIFILLLTLTILTIWLFKHRRARFLHETGLAMIYGLLVGLVLRYGIHVPSDVNNVTLSCEVQSSPTTLLVNVSGKFYEYMLKGEISSHELNNVQDNEMLRKVTFDPEVFFNILLPPIIFYAGYSLKRRHFFRNLGSILAYAFLGTAISCFVIGSIMYGCVTLMKVTGQLAGDFYFTDCLLFGAIVSATDPVTVLAIFHELQVDVELYALLFGESVLNDAVAIVLSSSIVAYQPAGDNSHTFDVTAMFKSIGIFLGIFSGSFAMGAATGVVTALVTKFTKLREFQLLETGLFFLMSWSTFLLAEAWGFTGVVAVLFCGITQAHYTYNNLSTESQHRTKQLFELLNFLAENFIFSYMGLTLFTFQNHVFNPTFVVGAFVAIFLGRAANIYPLSLLLNLGRRSKIGSNFQHMMMFAGLRGAMAFALAIRDTATYARQMMFSTTLLIVFFTVWVFGGGTTAMLSCLHIRVGVDSDQEHLGVPENERRTTKAESAWLFRMWYNFDHNYLKPLLTHSGPPLTTTLPACCGPIARCLTSPQAYENQEQLKDDDSDLILNDGDISLTYGDSTVNTEPATSSAPRRFMGNSSEDALDRELAFGDHELVIRGTRLVLPMDDSEPPLNLLDNTRHGPA

SEQ ID NO: 8818 - protein, 649 aa, Homo sapiens
MDEEIVSEKQAEESHRQDSANLLIFILLLTLTILTIWLFKHRRARFLHETGLAMIYGLLVGLVLRYGIHVPSDVNNVTLSCEVQSSPTTLLVNVSGKFYEYMLKGEISSHELNNVQDNEMLRKVTFDPEVFFNILLPPIIFYAGYSLKRRHFFRNLGSILAYAFLGTAISCFVIGSIMYGCVTLMKVTGQLAGDFYFTDCLLFGAIVSATDPVTVLAIFHELQVDVELYALLFGESVLNDAVAIVLSSSIVAYQPAGDNSHTFDVTAMFKSIGIFLGIFSGSFAMGAATGVVTALVTKFTKLREFQLLETGLFFLMSWSTFLLAEAWGFTGVVAVLFCGITQAHYTYNNLSTESQHRTKQLFELLNFLAENFIFSYMGLTLFTFQNHVFNPTFVVGAFVAIFLGRAANIYPLSLLLNLGRRSKIGSNFQHMMMFAGLRGAMAFALAIRDTATYARQMMFSTTLLIVFFTVWVFGGGTTAMLSCLHIRVGVDSDQEHLGVPENERRTTKAESAWLFRMWYNFDHNYLKPLLTHSGPPLTTTLPACCGPIARCLTSPQAYENQEQLKDDDSDLILNDGDISLTYGDSTVNTEPATSSAPRRFMGNSSEDALDRELAFGDHELVIRGTRLVLPMDDSEPPLNLLDNTRHGPA

SEQ ID NO: 8819 - protein, 1061 aa, Homo sapiens
MGDPGSEIIESVPPAGPEASESTTDENEDDIQFVSEGPLRPVLEYIDLVSSDDEEPSTSYTDENIKRKDHIDYQKDKVALTLARLARHVEVEKQQKEEKNRAFREKIDFQHAHGLQELEFIRGHSDTEAARLCVDQWLKMPGLKTGTINCGTKSSFRRGGHTWVSGKPILCPIMHCNKEFDNGHLLLGHLKRFDHSPCDPTITLHGPFFSSFACVVCYKKFVTQQQYRDHLFDKEATDDGHNNNLLPQIIQCFACPNCFLLFSRKEECSKHMSGKNHFHQSFKLGDNKGIAHPISFPSFAKKLLISLCKDVPFQVKCVACHKTLRSHMELTAHFRVHCRNAGPVAVAEKSITQVAEKFILRGYCPDCNQVFVDETSTQNHKQNSGHKVRVINSVEESVLLYCHSSEGNKDPSSDLHLLLDQSKFSSLKRTMSIKESSSLECIAIPKKKMNLKDKSHEGVACVQKEKSVVKTWFCECNQRFPSEDAVEKHVFSANTMGYKCVVCGKVCDDSGVIRLHMSRIHGGAHLNNFLFWCRTCKKELTRKDTIMAHVTEFHNGHRYFYEMDEVEGETLPSSSTTLDNLTANKPSSAITVIDHSPANSSPRGKWQCRICEDMFDSQEYVKQHCMSLASHKFHRYSCAHCRKPFHKIETLYRHCQDEHDNEIKIKYFCGLCDLIFNVEEAFLSHYEEHHSIDYVFVSEKTETSIKTEDDFPVIETSNQLTCGCRESYICKVNRKEDYSRCLQIMLDKGKLWFRCSLCSATAQNLTDMNTHIHQVHKEKSDEEEQQYVIKCGTCTKAFHDPESAQQHFHRKHCFLQKPSVAHFGSEKSNLYKFTASASHTERKLKQAINYSKSLDMEKGVENDLSYQNIEEEIVELPDLDYLRTMTHIVFVDFDNWSNFFGHLPGHLNQGTFIWGFQGGNTNWKPPLNCKIYNYLNRIGCFFLHPRCSKRKDAADFAICMHAGRLDEQLPKQIPFTILSGDQGFLELENQFKKTQRPAHILNPHHLEGDMMCALLNSISDTTKECDSDDNMGAKNTSIGEEFISTEDVELEEAIRRSLEEM

SEQ ID NO: 8820 - protein, 559 aa, Homo sapiens
MGDPGSEIIESVPPAGPEASESTTDENEDDIQFVSEGPLRPVLEYIDLVSSDDEEPSTSYTDRMPESKVPSSENHRPEMCSSCNVPLPIGDSSSFSGSCSSSPERIVSQTSSVENPLENQKNDQNNSDTKISETETLKSSQNFQTLPSSPLLVPQESLASSEVKENLRIDSSSASQHGRDAILYLQTQVAEMSRVIRDLQSRSCFRFHHSRPSENSSVPWDISTSKEENLSTVEEETDYKSPSADDKGQPSDPSQSSFTGLLKRMEQRGVIKRVTLQSEAESCEGKPDCVTSKKRLVPPLHPLLRIATTEVFKDPADCHPSSFMGHRVYPVAKDTSPFQPNPPAEGPIVEALEHSKRGNTTSPLDSTSKEMEVMGCRFYHAASIAARAASYMAYMTQYQRKLWEDMEDLVHDPEFDRGKARCIISDGMDAGLWQLCTTRDIMDSVVRVMAMAIDYRRQAWLRLTSLTKKTQEKISHLPFDGTSLFGQDVKAVVAEDNNIKENDYKDHKYYNQHRYFYSHDQKAHYHNRGYSKGDWYKPRNHPYRYRKKGDSPERHGYKN

SEQ ID NO: 8821 - protein, 1123 aa, Homo sapiens
MVSSGCRMRSLWFIIVISFLPNTEGFSRAALPFGLVRRELSCEGYSIDLRCPGSDVIMIESANYGRTDDKICDADPFQMENTDCYLPDAFKIMTQRCNNRTQCIVVTGSDVFPDPCPGTYKYLEVQYECVPYIFVCPGTLKAIVDSPCIYEAEQKAGAWCKDPLQAADKIYFMPWTPYRTDTLIEYASLEDFQNSRQTTTYKLPNRVDGTGFVVYDGAVFFNKERTRNIVKFDLRTRIKSGEAIINYANYHDTSPYRWGGKTDIDLAVDENGLWVIYATEQNNGMIVISQLNPYTLRFEATWETVYDKRAASNAFMICGVLYVVRSVYQDNESETGKNSIDYIYNTRLNRGEYVDVPFPNQYQYIAAVDYNPRDNQLYVWNNNFILRYSLEFGPPDPAQVPTTAVTITSSAELFKTIISTTSTTSQKGPMSTTVAGSQEGSKGTKPPPAVSTTKIPPITNIFPLPERFCEALDSKGIKWPQTQRGMMVERPCPKGTRGTASYLCMISTGTWNPKGPDLSNCTSHWVNQLAQKIRSGENAASLANELAKHTKGPVFAGDVSSSVRLMEQLVDILDAQLQELKPSEKDSAGRSYNKAIVDTVDNLLRPEALESWKHMNSSEQAHTATMLLDTLEEGAFVLADNLLEPTRVSMPTENIVLEVAVLSTEGQIQDFKFPLGIKGAGSSIQLSANTVKQNSRNGLAKLVFIIYRSLGQFLSTENATIKLGADFIGRNSTIAVNSHVISVSINKESSRVYLTDPVLFTLPHIDPDNYFNANCSFWNYSERTMMGYWSTQGCKLVDTNKTRTTCACSHLTNFAILMAHREIAYKDGVHELLLTVITWVGIVISLVCLAICIFTFCFFRGLQSDRNTIHKNLCINLFIAEFIFLIGIDKTKYAIACPIFAGLLHFFFLAAFAWMCLEGVQLYLMLVEVFESEYSRKKYYYVAGYLFPATVVGVSAAIDYKSYGTEKACWLHVDNYFIWSFIGPVTFIILLNIIFLVITLCKMVKHSNTLKPDSSRLENIKSWVLGAFALLCLLGLTWSFGLLFINEETIVMAYLFTIFNAFQGVFIFIFHCALQKKVRKEYGKCFRHSYCCGGLPTESPHSSVKASTTRTSARYSSGTQDIH

SEQ ID NO: 8822 - protein, 1177 aa, Homo sapiens
MVSSGCRMRSLWFIIVISFLPNTEGFSRAALPFGLVRRELSCEGYSIDLRCPGSDVIMIESANYGRTDDKICDADPFQMENTDCYLPDAFKIMTQRCNNRTQCIVVTGSDVFPDPCPGTYKYLEVQYECVPYIFVCPGTLKAIVDSPCIYEAEQKAGAWCKDPLQAADKIYFMPWTPYRTDTLIEYASLEDFQNSRQTTTYKLPNRVDGTGFVVYDGAVFFNKERTRNIVKFDLRTRIKSGEAIINYANYHDTSPYRWGGKTDIDLAVDENGLWVIYATEQNNGMIVISQLNPYTLRFEATWETVYDKRAASNAFMICGVLYVVRSVYQDNESETGKNSIDYIYNTRLNRGEYVDVPFPNQYQYIAAVDYNPRDNQLYVWNNNFILRYSLEFGPPDPAQVPTTAVTITSSAELFKTIISTTSTTSQKGPMSTTVAGSQEGSKGTKPPPAVSTTKIPPITNIFPLPERFCEALDSKGIKWPQTQRGMMVERPCPKGTRGTASYLCMISTGTWNPKGPDLSNCTSHWVNQLAQKIRSGENAASLANELAKHTKGPVFAGDVSSSVRLMEQLVDILDAQLQELKPSEKDSAGRSYNKAIVDTVDNLLRPEALESWKHMNSSEQAHTATMLLDTLEEGAFVLADNLLEPTRVSMPTENIVLEVAVLSTEGQIQDFKFPLGIKGAGSSIQLSANTVKQNSRNGLAKLVFIIYRSLGQFLSTENATIKLGADFIGRNSTIAVNSHVISVSINKESSRVYLTDPVLFTLPHIDPDNYFNANCSFWNYSERTMMGYWSTQGCKLVDTNKTRTTCACSHLTNFAILMAHREIAYKDGVHELLLTVITWVGIVISLVCLAICIFTFCFFRGLQSDRNTIHKNLCINLFIAEFIFLIGIDKTKYAIACPIFAGLLHFFFLAAFAWMCLEGVQLYLMLVEVFESEYSRKKYYYVAGYLFPATVVGVSAAIDYKSYGTEKACWLHVDNYFIWSFIGPVTFIILLNIIFLVITLCKMVKHSNTLKPDSSRLENIKSWVLGAFALLCLLGLTWSFGLLFINEETIVMAYLFTIFNAFQGVFIFIFHCALQKKVRKEYGKCFRHSYCCGGLPTESPHSSVKASTTRTSARYSSGTQSRIRRMWNDTVRKQSESSFISGDINSTSTLNQGLTSHGLRAHLQDLYHLELLLGQIA

SEQ ID NO: 8823 - protein, 1459 aa, Homo sapiens
MVSSGCRMRSLWFIIVISFLPNTEGFSRAALPFGLVRRELSCEGYSIDLRCPGSDVIMIESANYGRTDDKICDADPFQMENTDCYLPDAFKIMTQRCNNRTQCIVVTGSDVFPDPCPGTYKYLEVQYECVPYIFVCPGTLKAIVDSPCIYEAEQKAGAWCKDPLQAADKIYFMPWTPYRTDTLIEYASLEDFQNSRQTTTYKLPNRVDGTGFVVYDGAVFFNKERTRNIVKFDLRTRIKSGEAIINYANYHDTSPYRWGGKTDIDLAVDENGLWVIYATEQNNGMIVISQLNPYTLRFEATWETVYDKRAASNAFMICGVLYVVRSVYQDNESETGKNSIDYIYNTRLNRGEYVDVPFPNQYQYIAAVDYNPRDNQLYVWNNNFILRYSLEFGPPDPAQVPTTAVTITSSAELFKTIISTTSTTSQKGPMSTTVAGSQEGSKGTKPPPAVSTTKIPPITNIFPLPERFCEALDSKGIKWPQTQRGMMVERPCPKGTRGTASYLCMISTGTWNPKGPDLSNCTSHWVNQLAQKIRSGENAASLANELAKHTKGPVFAGDVSSSVRLMEQLVDILDAQLQELKPSEKDSAGRSYNKLQKREKTCRAYLKAIVDTVDNLLRPEALESWKHMNSSEQAHTATMLLDTLEEGAFVLADNLLEPTRVSMPTENIVLEVAVLSTEGQIQDFKFPLGIKGAGSSIQLSANTVKQNSRNGLAKLVFIIYRSLGQFLSTENATIKLGADFIGRNSTIAVNSHVISVSINKESSRVYLTDPVLFTLPHIDPDNYFNANCSFWNYSERTMMGYWSTQGCKLVDTNKTRTTCACSHLTNFAILMAHREIAYKDGVHELLLTVITWVGIVISLVCLAICIFTFCFFRGLQSDRNTIHKNLCINLFIAEFIFLIGIDKTKYAIACPIFAGLLHFFFLAAFAWMCLEGVQLYLMLVEVFESEYSRKKYYYVAGYLFPATVVGVSAAIDYKSYGTEKACWLHVDNYFIWSFIGPVTFIILLNIIFLVITLCKMVKHSNTLKPDSSRLENIKSWVLGAFALLCLLGLTWSFGLLFINEETIVMAYLFTIFNAFQGVFIFIFHCALQKKVRKEYGKCFRHSYCCGGLPTESPHSSVKASTTRTSARYSSGTQSRIRRMWNDTVRKQSESSFISGDINSTSTLNQGMTGNYLLTNPLLRPHGTNNPYNTLLAETVVCNAPSAPVFNSPGHSLNNARDTSAMDTLPLNGNFNNSYSLHKGDYNDSVQVVDCGLSLNDTAFEKMIISELVHNNLRGSSKTHNLELTLPVKPVIGGSSSEDDAIVADASSLMHSDNPGLELHHKELEAPLIPQRTHSLLYQPQKKVKSEGTDSYVSQLTAEAEDHLQSPNRDSLYTSMPNLRDSPYPESSPDMEEDLSPSRRSENEDIYYKSMPNLGAGHQLQMCYQISRGNSDGYIIPINKEGCIPEGDVREGQMQLVTSL

SEQ ID NO: 8824 - protein, 1384 aa, Homo sapiens
MVSSGCRMRSLWFIIVISFLPNTEGFSRAALPFGLVRRELSCEGYSIDLRCPGSDVIMIESANYGRTDDKICDADPFQMENTDCYLPDAFKIMTQRCNNRTQCIVVTGSDVFPDPCPGTYKYLEVQYECVPYMEQKVFVCPGTLKAIVDSPCIYEAEQKAGAWCKDPLQAADKIYFMPWTPYRTDTLIEYASLEDFQNSRQTTTYKLPNRVDGTGFVVYDGAVFFNKERTRNIVKFDLRTRIKSGEAIINYANYHDTSPYRWGGKTDIDLAVDENGLWVIYATEQNNGMIVISQLNPYTLRFEATWETVYDKRAASNAFMICGVLYVVRSVYQDNESETGKNSIDYIYNTRLNRGEYVDVPFPNQYQYIAAVDYNPRDNQLYVWNNNFILRYSLEFGPPDPAQERFCEALDSKGIKWPQTQRGMMVERPCPKGTRGTASYLCMISTGTWNPKGPDLSNCTSHWVNQLAQKIRSGENAASLANELAKHTKGPVFAGDVSSSVRLMEQLVDILDAQLQELKPSEKDSAGRSYNKAIVDTVDNLLRPEALESWKHMNSSEQAHTATMLLDTLEEGAFVLADNLLEPTRVSMPTENIVLEVAVLSTEGQIQDFKFPLGIKGAGSSIQLSANTVKQNSRNGLAKLVFIIYRSLGQFLSTENATIKLGADFIGRNSTIAVNSHVISVSINKESSRVYLTDPVLFTLPHIDPDNYFNANCSFWNYSERTMMGYWSTQGCKLVDTNKTRTTCACSHLTNFAILMAHREIAYKDGVHELLLTVITWVGIVISLVCLAICIFTFCFFRGLQSDRNTIHKNLCINLFIAEFIFLIGIDKTKYAIACPIFAGLLHFFFLAAFAWMCLEGVQLYLMLVEVFESEYSRKKYYYVAGYLFPATVVGVSAAIDYKSYGTEKACWLHVDNYFIWSFIGPVTFIILLNIIFLVITLCKMVKHSNTLKPDSSRLENIKSWVLGAFALLCLLGLTWSFGLLFINEETIVMAYLFTIFNAFQGVFIFIFHCALQKKVRKEYGKCFRHSYCCGGLPTESPHSSVKASTTRTSARYSSGTQSRIRRMWNDTVRKQSESSFISGDINSTSTLNQGMTGNYLLTNPLLRPHGTNNPYNTLLAETVVCNAPSAPVFNSPGHSLNNARDTSAMDTLPLNGNFNNSYSLHKGDYNDSVQVVDCGLSLNDTAFEKMIISELVHNNLRGSSKTHNLELTLPVKPVIGGSSSEDDAIVADASSLMHSDNPGLELHHKELEAPLIPQRTHSLLYQPQKKVKSEGTDSYVSQLTAEAEDHLQSPNRDSLYTSMPNLRDSPYPESSPDMEEDLSPSRRSENEDIYYKSMPNLGAGHQLQMCYQISRGNSDGYIIPINKEGCIPEGDVREGQMQLVTSL

SEQ ID NO: 8825 - protein, 1461 aa, Homo sapiens
MVSSGCRMRSLWFIIVISFLPNTEGFSRAALPFGLVRRELSCEGYSIDLRCPGSDVIMIESANYGRTDDKICDADPFQMENTDCYLPDAFKIMTQRCNNRTQCIVVTGSDVFPDPCPGTYKYLEVQYECVPYIFVCPGTLKAIVDSPCIYEAEQKAGAWCKDPLQAADKIYFMPWTPYRTDTLIEYASLEDFQNSRQTTTYKLPNRVDGTGFVVYDGAVFFNKERTRNIVKFDLRTRIKSGEAIINYANYHDTSPYRWGGKTDIDLAVDENGLWVIYATEQNNGMIVISQLNPYTLRFEATWETVYDKRAASNAFMICGVLYVVRSVYQDNESETGKNSIDYIYNTRLNRGEYVDVPFPNQYQYIAAVDYNPRDNQLYVWNNNFILRYSLEFGPPDPAQVPTTAVTITSSAELFKTIISTTSTTSQKGPMSTTVAGSQEGSKGTKPPPAVSTTKIPPITNIFPLPERFCEALDSKGIKWPQTQRGMMVERPCPKGTRGTASYLCMISTGTWNPKGPDLSNCTSHWVNQLAQKIRSGENAASLANELAKHTKGPVFAGDVSSSVRLMEQLVDILDAQLQELKPSEKDSAGRSYNKAIVDTVDNLLRPEALESWKHMNSSEQAHTATMLLDTLEEGAFVLADNLLEPTRVSMPTENIVLEVAVLSTEGQIQDFKFPLGIKGAGSSIQLSANTVKQNSRNGLAKLVFIIYRSLGQFLSTENATIKLGADFIGRNSTIAVNSHVISVSINKESSRVYLTDPVLFTLPHIDPDNYFNANCSFWNYSERTMMGYWSTQGCKLVDTNKTRTTCACSHLTNFAILMAHREIAYKDGVHELLLTVITWVGIVISLVCLAICIFTFCFFRGLQSDRNTIHKNLCINLFIAEFIFLIGIDKTKYAIACPIFAGLLHFFFLAAFAWMCLEGVQLYLMLVEVFESEYSRKKYYYVAGYLFPATVVGVSAAIDYKSYGTEKACWLHVDNYFIWSFIGPVTFIILLNIIFLVITLCKMVKHSNTLKPDSSRLENINNYRVCDGYYNTDLPGSWVLGAFALLCLLGLTWSFGLLFINEETIVMAYLFTIFNAFQGVFIFIFHCALQKKVRKEYGKCFRHSYCCGGLPTESPHSSVKASTTRTSARYSSGTQSRIRRMWNDTVRKQSESSFISGDINSTSTLNQGMTGNYLLTNPLLRPHGTNNPYNTLLAETVVCNAPSAPVFNSPGHSLNNARDTSAMDTLPLNGNFNNSYSLHKGDYNDSVQVVDCGLSLNDTAFEKMIISELVHNNLRGSSKTHNLELTLPVKPVIGGSSSEDDAIVADASSLMHSDNPGLELHHKELEAPLIPQRTHSLLYQPQKKVKSEGTDSYVSQLTAEAEDHLQSPNRDSLYTSMPNLRDSPYPESSPDMEEDLSPSRRSENEDIYYKSMPNLGAGHQLQMCYQISRGNSDGYIIPINKEGCIPEGDVREGQMQLVTSL

SEQ ID NO: 8826 - protein, 1474 aa, Homo sapiens
MVSSGCRMRSLWFIIVISFLPNTEGFSRAALPFGLVRRELSCEGYSIDLRCPGSDVIMIESANYGRTDDKICDADPFQMENTDCYLPDAFKIMTQRCNNRTQCIVVTGSDVFPDPCPGTYKYLEVQYECVPYIFVCPGTLKAIVDSPCIYEAEQKAGAWCKDPLQAADKIYFMPWTPYRTDTLIEYASLEDFQNSRQTTTYKLPNRVDGTGFVVYDGAVFFNKERTRNIVKFDLRTRIKSGEAIINYANYHDTSPYRWGGKTDIDLAVDENGLWVIYATEQNNGMIVISQLNPYTLRFEATWETVYDKRAASNAFMICGVLYVVRSVYQDNESETGKNSIDYIYNTRLNRGEYVDVPFPNQYQYIAAVDYNPRDNQLYVWNNNFILRYSLEFGPPDPAQVPTTAVTITSSAELFKTIISTTSTTSQKGPMSTTVAGSQEGSKGTKPPPAVSTTKIPPITNIFPLPERFCEALDSKGIKWPQTQRGMMVERPCPKGTRGTASYLCMISTGTWNPKGPDLSNCTSHWVNQLAQKIRSGENAASLANELAKHTKGPVFAGDVSSSVRLMEQLVDILDAQLQELKPSEKDSAGRSYNKLQKREKTCRAYLKAIVDTVDNLLRPEALESWKHMNSSEQAHTATMLLDTLEEGAFVLADNLLEPTRVSMPTENIVLEVAVLSTEGQIQDFKFPLGIKGAGSSIQLSANTVKQNSRNGLAKLVFIIYRSLGQFLSTENATIKLGADFIGRNSTIAVNSHVISVSINKESSRVYLTDPVLFTLPHIDPDNYFNANCSFWNYSERTMMGYWSTQGCKLVDTNKTRTTCACSHLTNFAILMAHREIAYKDGVHELLLTVITWVGIVISLVCLAICIFTFCFFRGLQSDRNTIHKNLCINLFIAEFIFLIGIDKTKYAIACPIFAGLLHFFFLAAFAWMCLEGVQLYLMLVEVFESEYSRKKYYYVAGYLFPATVVGVSAAIDYKSYGTEKACWLHVDNYFIWSFIGPVTFIILLNIIFLVITLCKMVKHSNTLKPDSSRLENINNYRVCDGYYNTDLPGSWVLGAFALLCLLGLTWSFGLLFINEETIVMAYLFTIFNAFQGVFIFIFHCALQKKVRKEYGKCFRHSYCCGGLPTESPHSSVKASTTRTSARYSSGTQSRIRRMWNDTVRKQSESSFISGDINSTSTLNQGMTGNYLLTNPLLRPHGTNNPYNTLLAETVVCNAPSAPVFNSPGHSLNNARDTSAMDTLPLNGNFNNSYSLHKGDYNDSVQVVDCGLSLNDTAFEKMIISELVHNNLRGSSKTHNLELTLPVKPVIGGSSSEDDAIVADASSLMHSDNPGLELHHKELEAPLIPQRTHSLLYQPQKKVKSEGTDSYVSQLTAEAEDHLQSPNRDSLYTSMPNLRDSPYPESSPDMEEDLSPSRRSENEDIYYKSMPNLGAGHQLQMCYQISRGNSDGYIIPINKEGCIPEGDVREGQMQLVTSL

SEQ ID NO: 8827 - protein, 1431 aa, Homo sapiens
MVSSGCRMRSLWFIIVISFLPNTEGFSRAALPFGLVRRELSCEGYSIDLRCPGSDVIMIESANYGRTDDKICDADPFQMENTDCYLPDAFKIMTQRCNNRTQCIVVTGSDVFPDPCPGTYKYLEVQYECVPYIFVCPGTLKAIVDSPCIYEAEQKAGAWCKDPLQAADKIYFMPWTPYRTDTLIEYASLEDFQNSRQTTTYKLPNRVDGTGFVVYDGAVFFNKERTRNIVKFDLRTRIKSGEAIINYANYHDTSPYRWGGKTDIDLAVDENGLWVIYATEQNNGMIVISQLNPYTLRFEATWETVYDKRAASNAFMICGVLYVVRSVYQDNESETGKNSIDYIYNTRLNRGEYVDVPFPNQYQYIAAVDYNPRDNQLYVWNNNFILRYSLEFGPPDPAQVPTTAVTITSSAELFKTIISTTSTTSQKGPMSTTVAGSQEGSKGTKPPPAVSTTKIPPITNIFPLPERFCEALDSKGIKWPQTQRGMMVERPCPKGTRGTASYLCMISTGTWNPKGPDLSNCTSHWVNQLAQKIRSGENAASLANELAKHTKGPVFAGDVSSSVRLMEQLVDILDAQLQELKPSEKDSAGRSYNKLQKREKTCRAYLKAIVDTVDNLLRPEALESWKHMNSSEQAHTATMLLDTLEEGAFVLADNLLEPTRVSMPTENIVLEVAVLSTEGQIQDFKFPLGIKGAGSSIQLSANTVKQNSRNGLAKLVFIIYRSLGQFLSTENATIKLGADFIGRNSTIAVNSHVISVSINKESSRVYLTDPVLFTLPHIDPDNYFNANCSFWNYSERTMMGYWSTQGCKLVDTNKTRTTCACSHLTNFAILMAHREIAYKDGVHELLLTVITWVGIVISLVCLAICIFTFCFFRGLQSDRNTIHKNLCINLFIAEFIFLIGIDKTKYAIACPIFAGLLHFFFLAAFAWMCLEGVQLYLMLVEVFESEYSRKKYYYVAGYLFPATVVGVSAAIDYKSYGTEKACWLHVDNYFIWSFIGPVTFIILLNIIFLVITLCKMVKHSNTLKPDSSRLENINNYRVCDGYYNTDLPGSWVLGAFALLCLLGLTWSFGLLFINEETIVMAYLFTIFNAFQGVFIFIFHCALQKKVRKEYGKCFRHSYCCGGLPTESPHSSVKASTTRTSARYSSGTQSRIRRMWNDTVRKQSESSFISGDINSTSTLNQGHSLNNARDTSAMDTLPLNGNFNNSYSLHKGDYNDSVQVVDCGLSLNDTAFEKMIISELVHNNLRGSSKTHNLELTLPVKPVIGGSSSEDDAIVADASSLMHSDNPGLELHHKELEAPLIPQRTHSLLYQPQKKVKSEGTDSYVSQLTAEAEDHLQSPNRDSLYTSMPNLRDSPYPESSPDMEEDLSPSRRSENEDIYYKSMPNLGAGHQLQMCYQISRGNSDGYIIPINKEGCIPEGDVREGQMQLVTSL

SEQ ID NO: 8828 - protein, 1416 aa, Homo sapiens
MVSSGCRMRSLWFIIVISFLPNTEGFSRAALPFGLVRRELSCEGYSIDLRCPGSDVIMIESANYGRTDDKICDADPFQMENTDCYLPDAFKIMTQRCNNRTQCIVVTGSDVFPDPCPGTYKYLEVQYECVPYIFVCPGTLKAIVDSPCIYEAEQKAGAWCKDPLQAADKIYFMPWTPYRTDTLIEYASLEDFQNSRQTTTYKLPNRVDGTGFVVYDGAVFFNKERTRNIVKFDLRTRIKSGEAIINYANYHDTSPYRWGGKTDIDLAVDENGLWVIYATEQNNGMIVISQLNPYTLRFEATWETVYDKRAASNAFMICGVLYVVRSVYQDNESETGKNSIDYIYNTRLNRGEYVDVPFPNQYQYIAAVDYNPRDNQLYVWNNNFILRYSLEFGPPDPAQVPTTAVTITSSAELFKTIISTTSTTSQKGPMSTTVAGSQEGSKGTKPPPAVSTTKIPPITNIFPLPERFCEALDSKGIKWPQTQRGMMVERPCPKGTRGTASYLCMISTGTWNPKGPDLSNCTSHWVNQLAQKIRSGENAASLANELAKHTKGPVFAGDVSSSVRLMEQLVDILDAQLQELKPSEKDSAGRSYNKLQKREKTCRAYLKAIVDTVDNLLRPEALESWKHMNSSEQAHTATMLLDTLEEGAFVLADNLLEPTRVSMPTENIVLEVAVLSTEGQIQDFKFPLGIKGAGSSIQLSANTVKQNSRNGLAKLVFIIYRSLGQFLSTENATIKLGADFIGRNSTIAVNSHVISVSINKESSRVYLTDPVLFTLPHIDPDNYFNANCSFWNYSERTMMGYWSTQGCKLVDTNKTRTTCACSHLTNFAILMAHREIAYKDGVHELLLTVITWVGIVISLVCLAICIFTFCFFRGLQSDRNTIHKNLCINLFIAEFIFLIGIDKTKYAIACPIFAGLLHFFFLAAFAWMCLEGVQLYLMLVEVFESEYSRKKYYYVAGYLFPATVVGVSAAIDYKSYGTEKACWLHVDNYFIWSFIGPVTFIILLNIIFLVITLCKMVKHSNTLKPDSSRLENIKSWVLGAFALLCLLGLTWSFGLLFINEETIVMAYLFTIFNAFQGVFIFIFHCALQKKVRKEYGKCFRHSYCCGGLPTESPHSSVKASTTRTSARYSSGTQSRIRRMWNDTVRKQSESSFISGDINSTSTLNQGHSLNNARDTSAMDTLPLNGNFNNSYSLHKGDYNDSVQVVDCGLSLNDTAFEKMIISELVHNNLRGSSKTHNLELTLPVKPVIGGSSSEDDAIVADASSLMHSDNPGLELHHKELEAPLIPQRTHSLLYQPQKKVKSEGTDSYVSQLTAEAEDHLQSPNRDSLYTSMPNLRDSPYPESSPDMEEDLSPSRRSENEDIYYKSMPNLGAGHQLQMCYQISRGNSDGYIIPINKEGCIPEGDVREGQMQLVTSL

SEQ ID NO: 8829 - protein, 690 aa, Homo sapiens
MKRLPLLVVFSTLLNCSYTQNCTKTPCLPNAKCEIRNGIEACYCNMGFSGNGVTICEDDNECGNLTQSCGENANCTNTEGSYYCMCVPGFRSSSNQDRFITNDGTVCIENVNANCHLDNVCIAANINKTLTKIRSIKEPVALLQEVYRNSVTDLSPTDIITYIEILAESSSLLGYKNNTISAKDTLSNSTLTEFVKTVNNFVQRDTFVVWDKLSVNHRRTHLTKLMHTVEQATLRISQSFQKTTEFDTNSTDIALKVFFFDSYNMKHIHPHMNMDGDYINIFPKRKAAYDSNGNVAVAFVYYKSIGPLLSSSDNFLLKPQNYDNSEEEERVISSVISVSMSSNPPTLYELEKITFTLSHRKVTDRYRSLCAFWNYSPDTMNGSWSSEGCELTYSNETHTSCRCNHLTHFAILMSSGPSIGIKDYNILTRITQLGIIISLICLAICIFTFWFFSEIQSTRTTIHKNLCCSLFLAELVFLVGINTNTNKLFCSIIAGLLHYFFLAAFAWMCIEGIHLYLIVVGVIYNKGFLHKNFYIFGYLSPAVVVGFSAALGYRYYGTTKVCWLSTENNFIWSFIGPACLIILVNLLAFGVIIYKVFRHTAGLKPEVSCFENIRSCARGALALLFLLGTTWIFGVLHVVHASVVTAYLFTVSNAFQGMFIFLFLCVLSRKIQEEYYRLFKNVPCCFGCLR

SEQ ID NO: 8830 - protein, 452 aa, Homo sapiens
MEVTTRLTWNDENHLRKLLGNVSLSLLYKSSVHGGSIEDMVERCSRQGCTITMAYIDYNMIVAFMLGNYINLHESSTEPNDSLWFSLQKKNDTTEIETLLLNTAPKIIDEQLVCRLSKTDIFIICRDNKIYLDKMITRNLKLRFYGHRQYLECEVFRVEGIKDNLDDIKRIIKAREHRNRLLADIRDYRPYADLVSEIRILLVGPVGSGKSSFFNSVKSIFHGHVTGQAVVGSDITSITERYRIYSVKDGKNGKSLPFMLCDTMGLDGAEGAGLCMDDIPHILKGCMPDRYQFNSRKPITPEHSTFITSPSLKDRIHCVAYVLDINSIDNLYSKMLAKVKQVHKEVLNCGIAYVALLTKVDDCSEVLQDNFLNMSRSMTSQSRVMNVHKMLGIPISNILMVGNYASDLELDPMKDILILSALRQMLRAADDFLEDLPLEETGAIERALQPCI

SEQ ID NO: 8831 - protein, 861 aa, Homo sapiens
MPILLFLIDTSASMNQRTDLGTSYLDIAKGAVELFLKLRARDPASRGDRYMLVTYDEPPYCIKAGWKENHATFMSELKNLQASGLTTLGQALRSSFDLLNLNRLISGIDNYGQGRNPFFLEPSILITITDGNKLTSTAGVQEELHLPLNSPLPGSELTKEPFRWDQRLFALVLRLPGVASTEPEQLGSVPTDESAITQMCEVTGGRSYCVRTQRMLNQCLESLVQKVQSGVVINFEKTGPDPLPIGEDGLMDSSRPSNSFAAQPWHSCHKLIYVRPNSKTGVPVGHWPIPESFWPDQNLPSLPPRTSHPVVRFSCVDCEPMVIDKLPFDKYELEPSPLTQYILERKSPHTCWQVFVTSSGKYNELGYPFGYLKASTTLTCVNLFVMPYNYPVLLPLLDDLFKVHKLKPNLKWRQAFDSYLKTLPPYYLLTKLESERILASVGKKPPQEIGIKVKNHSGGGMSLTHNKNFRKLLKEITGETALRLTELNTKEFAGFQIGLLNKDLKPQTYRNAYDIPRRGLLDQLTRMRSNLLKTHKFIVGQDEDSLHSVPVAQMGNYQEYLKTLASPLREIDPDQPKRLHTFGNPFKQDKKGMMIDEADEFVAGPQNKVKRPGEPNSPMSSKRRRSMSLLLRKPQTPPTVTNHVGGKGPPSASWFPSYPNLIKPTLVHTDATIIHDGHEEKMENGQITPDGFLSKSAPSELINMTGDLMPPNQVDSLSDDFTSLSKDGLIQKPGSNAFVGGAKNCSLSVDDQKDPVASTLGAMPNTLQITPAMAQGINADIKHQLMKEVRKFGRKYERIFILLEEVQGPLEMKKQFVEFTIKEAARFKRRVLIQYLEKVLEKINSHHLHNNISHINSRSSC

SEQ ID NO: 8832 - protein, 297 aa, Homo sapiens
MSMNNSKQLVSPAAALLSNTTCQTENRLSVFFSVIFMTVGILSNSLAIAILMKAYQRFRQKSKASFLLLASGLVITDFFGHLINGAIAVFVYASDKEWIRFDQSNVLCSIFGICMVFSGLCPLLLGSVMAIERCIGVTKPIFHSTKITSKHVKMMLSGVCLFAVFIALLPILGHRDYKIQASRTWCFYNTEDIKDWEDRFYLLLFSFLGLLALGVSLLCNAITGITLLRVKFKSQQHRQGRSHHLEMVIQLLAIMCVSCICWSPFLGYRIILNGKEKYKVYEEQSDFLHRLQWPTLE

SEQ ID NO: 8833 - protein, 359 aa, Homo sapiens
MSMNNSKQLVSPAAALLSNTTCQTENRLSVFFSVIFMTVGILSNSLAIAILMKAYQRFRQKSKASFLLLASGLVITDFFGHLINGAIAVFVYASDKEWIRFDQSNVLCSIFGICMVFSGLCPLLLGSVMAIERCIGVTKPIFHSTKITSKHVKMMLSGVCLFAVFIALLPILGHRDYKIQASRTWCFYNTEDIKDWEDRFYLLLFSFLGLLALGVSLLCNAITGITLLRVKFKSQQHRQGRSHHLEMVIQLLAIMCVSCICWSPFLVTMANIGINGNHSLETCETTLFALRMATWNQILDPWVYILLRKAVLKNLYKLASQCCGVHVISLHIWELSSIKNSLKVAAISESPVAEKSAST

SEQ ID NO: 8834 - protein, 315 aa, Homo sapiens
MPLKLRGKKKAKSKETAGLVEGEPTGAGGGSLSASRAPARRLVFHAQLAHGSATGRVEGFSSIQELYAQIAGAFEISPSEILYCTLNTPKIDMERLLGGQLGLEDFIFAHVKGIEKEVNVYKSEDSLGLTITDNGVGYAFIKRIKDGGVIDSVKTICVGDHIESINGENIVGWRHYDVAKKLKELKKEELFTMKLIEPKKAFEIELRSKAGKSSGEKIGCGRATLRLRSKGPATVEEMPSETKAKAIEKIDDVLELYMGIRDIDLATTMFEAGKDKVNPDEFAVALDETLGDFAFPDEFVFDVWGVIGDAKRRGL

SEQ ID NO: 8835 - protein, 164 aa, Homo sapiens
MAVALGCAIQASLNQGSVFQEYDTDCEVFRQRFRQFQYREAAGPHEAFNKLWELCCQWLKPKMRSKEQILELLVLEQFLTILPTEIETWVREHCPENRERVVSLIEDLQRELEIPEQQVRKECGIFVIGPKEVAEAAGTRPHICLYVIPQPQDFSRVLFLFLFC

SEQ ID NO: 8836 - protein, 337 aa, Homo sapiens
MGKDYYCILGIEKGASDEDIKKAYRKQALKFHPDKNKSPQAEEKFKEVAEAYEVLSDPKKREIYDQFGEEGLKGGAGGTDGQGGTFRYTFHGDPHATFAAFFGGSNPFEIFFGRRMGGGRDSEEMEIDGDPFSAFGFSMNGYPRDRNSVGPSRLKQDPPVIHELRVSLEEIYSGCTKRMKISRKRLNADGRSYRSEDKILTIEIKKGWKEGTKITFPREGDETPNSIPADIVFIIKDKDHPKFKRDGSNIIYTAKISLREALCGCSINVPTLDGRNIPMSVNDIVKPGMRRRIIGYGLPFPKNPDQRGDLLIEFEVSFPDTISSSSKEVLRKHLPAS

SEQ ID NO: 8837 - protein, 644 aa, Homo sapiens
MADYSTVPPPSSGSAGGGGGGGGGGGVNDAFKDALQRARQIAAKIGGDAGTSLNSNDYGYGGQKRPLEDGDQPDAKKVAPQNDSFGTQLPPMHQQQSRSVMTEEYKVPDGMVGFIIGRGGEQISRIQQESGCKIQIAPDSGGLPERSCMLTGTPESVQSAKRLLDQIVEKGRPAPGFHHGDGPGNAVQEIMIPASKAGLVIGKGGETIKQLQERAGVKMVMIQDGPQNTGADKPLRITGDPYKVQQAKEMVLELIRDQGGFREVRNEYGSRIGGNEGIDVPIPRFAVGIVIGRNGEMIKKIQNDAGVRIQFKPDDGTTPERIAQITGPPDRCQHAAEIITDLLRSVQAGNPGGPGPGGRGRGRGQGNWNMGPPGGLQEFNFIVPTGKTGLIIGKGGETIKSISQQSGARIELQRNPPPNADPNMKLFTIRGTPQQIDYARQLIEEKIGGPVNPLGPPVPHGPHGVPGPHGPPGPPGPGTPMGPYNPAPYNPGPPGPAPHGPPAPYAPQGWGNAYPHWQQQAPPDPAKAGTDPNSAAWAAYYAHYYQQQAQPPPAAPAGAPTTTQTNGQGDQQNPAPAGQVDYTKAWEEYYKKMGQAVPAPTGAPPGGQPDYSAAWAEYYRQQAAYYAQTSPQGMPQHPPAPQGQ

SEQ ID NO: 8838 - protein, 159 aa, Homo sapiens
MHQQKRQPELVEGNLPVFVFPTELIFYADDQSTHKQVLTLYNPYEFALKFKVLCTTPNKYVVVDAAGAVKPQCCVDIVIRHRDVRSCHYGVIDKFRLQVSEQSQRKALGRKEVVATLLPSAKEQQKEEEEKRLKEHLTESLFFEQSFQPGLITMAILRT

SEQ ID NO: 8839 - protein, 1030 aa, Homo sapiens
MAAAAAVEAAAPMGALWGLVHDFVVGQQEGPADQVAADVKSGNYTVLQVVEALGSSLENPEPRTRARAIQLLSQVLLHCHTLLLEKEVVHLILFYENRLKDHHLVIPSVLQGLKALSLCVALPPGLAVSVLKAIFQEVHVQSLPQVDRHTVYNIITNFMRTREEELKSLGADFTFGFIQVMDGEKDPRNLLVAFRIVHDLISRDYSLGPFVEELFEVTSCYFPIDFTPPPNDPHGIQREDLILSLRAVLASTPRFAEFLLPLLIEKVDSEVLSAKLDSLQTLNACCAVYGQKELKDFLPSLWASIRREVFQTASERVEAEGLAALHSLTACLSRSVLRADAEDLLDSFLSNILQDCRHHLCEPDMKLVWPSAKLLQAAAGASARACDSVTSNVLPLLLEQFHKHSQSSQRRTILEMLLGFLKLQQKWSYEDKDQRPLNGFKDQLCSLVFMALTDPSTQLQLVGIRTLTVLGAQPDLLSYEDLELAVGHLYRLSFLKEDSQSCRVAALEASGTLAALYPVAFSSHLVPKLAEELRVGESNLTNGDEPTQCSRHLCCLQALSAVSTHPSIVKETLPLLLQHLWQVNRGNMVAQSSDVIAVCQSLRQMAEKCQQDPESCWYFHQTAIPCLLALAVQASMPEKEPSVLRKVLLEDEVLAAMVSVIGTATTHLSPELAAQSVTHIVPLFLDGNVSFLPENSFPSRFQPFQDGSSGQRRLIALLMAFVCSLPRNVEIPQLNQLMRELLELSCCHSCPFSSTAAAKCFAGLLNKHPAGQQLDEFLQLAVDKVEAGLGSGPCRSQAFTLLLWVTKALVLRYHPLSSCLTARLMGLLSDPELGPAAADGFSLLMSDCTDVLTRAGHAEVRIMFRQRFFTDNVPALVQGFHAAPQDVKPNYLKGLSHVLNRLPKPVLLPELPTLLSLLLEALSCPDCVVQLSTLSCLQPLLLEAPQVMSLHVDTLVTKFLNLSSSPSMAVRIAALQCMHALTRLPTPVLLPYKPQVIRALAKPLDDKKRLVRKEAVSARGEWFLLGSPGS

SEQ ID NO: 8840 - protein, 213 aa, Homo sapiens
MHQQKRQPELVEGNLPVFVFPTELIFYADDQSTHKQVLTLYNPYEFALKFKVLCTTPNKYVVVDAAGAVKPQCCVDIVIRHRDVRSCHYGVIDKFRLQVSEQSQRKALGRKEVVATLLPSAKEQQKEEEEKRLKEHLTESLFFEQSFQPENRAVSSGPSLLTVFLGVVCIAALMLPTLGDVESLVPLYLHLSVNQKLVAAYILGLITMAILRT

SEQ ID NO: 8841 - protein, 247 aa, Homo sapiens
MAQEKMELDLEPDTSYGGTLRRSSSAPLIHGLSDLSQVFQPYTLRTRRNSTTIMSRHSLEEGLDMVNRETAHEREMQTAMQISQSWDESLSLSDSDFDKPEKLYSPKRIDFTPVSPAPSPTRGFGKMFVSSSGLPPSPVPSPRRFSRRSQSPVKCIRPSVLGPLKRKGEMETESQPKRLFQGTTNMLSPDAAQLSDLSSCSDILDGSSSSSGLSSDPLAKGSATAESPVACSNSCSSFILMDDLSPK

SEQ ID NO: 8842 - protein, 828 aa, Homo sapiens
MTGSNSHITILTLKVLPHFESLGKQEKIPNKMSAFRNHCPHLDSVGEITKEDLIQKSLGTCQDCKVQGPNLWACLENRCSYVGCGESQVDHSTIHSQETKHYLTVNLTTLRVWCYACSKEVFLDRKLGTQPSLPHVRQPHQIQENSVQDFKIPSNTTLKTPLVAVFDDLDIEADEEDELRARGLTGLKNIGNTCYMNAALQALSNCPPLTQFFLDCGGLARTDKKPAICKSYLKLMTELWHKSRPGSVVPTTLFQGIKTVNPTFRGYSQQDAQEFLRCLMDLLHEELKEQVMEVEEDPQTITTEETMEEDKSQSDVDFQSCESCSNSDRAENENGSRCFSEDNNETTMLIQDDENNSEMSKDWQKEKMCNKINKVNSEGEFDKDRDSISETVDLNNQETVKVQIHSRASEYITDVHSNDLSTPQILPSNEGVNPRLSASPPKSGNLWPGLAPPHKKAQSASPKRKKQHKKYRSVISDIFDGTIISSVQCLTCDRVSVTLETFQDLSLPIPGKEDLAKLHSSSHPTSIVKAGSCGEAYAPQGWIAFFMEYVKSWFWGPVVTLQDCLAAFFARDELKGDNMYSCEKCKKLRNGVKFCKVQNFPEILCIHLKRFRHELMFSTKISTHVSFPLEGLDLQPFLAKDSPAQIVTYDLLSVICHHGTASSGHYIAYCRNNLNNLWYEFDDQSVTEVSESTVQNAEAYVLFYRKSSEEAQKERRRISNLLNIMEPSLLQFYISRQWLNKFKTFAEPGPISNNDFLCIHGGVPPRKAGYIEDLVLMLPQNIWDNLYSRYGGGPAVNHLYICHTCQIEAEKIEKRRKTELEIFIRVKK

SEQ ID NO: 8843 - protein, 911 aa, Homo sapiens
MSAFRNHCPHLDSVGEITKEDLIQKSLGTCQDCKVQGPNLWACLENRCSYVGCGESQVDHSTIHSQETKHYLTVNLTTLRVWCYACSKEVFLDRKLGTQPSLPHVRQPHQIQENSVQDFKIPSNTTLKTPLVAVFDDLDIEADEEDELRARGLTGLKNIGNTCYMNAALQALSNCPPLTQFFLDCGGLARTDKKPAICKSYLKLMTELWHKSRPGSVVPTTLFQGIKTVNPTFRGYSQQDAQEFLRCLMDLLHEELKEQVMEVEEDPQTITTEETMEEDKSQSDVDFQSCESCSNSDRAENENGSRCFSEDNNETTMLIQDDENNSEMSKDWQKEKMCNKINKVNSEGEFDKDRDSISETVDLNNQETVKVQIHSRASEYITDVHSNDLSTPQILPSNEGVNPRLSASPPKSGNLWPGLAPPHKKAQSASPKRKKQHKKYRSVISDIFDGTIISSVQCLTCDRVSVTLETFQDLSLPIPGKEDLAKLHSSSHPTSIVKAGSCGEAYAPQGWIAFFMEYVKRFVVSCVPSWFWGPVVTLQDCLAAFFARDELKGDNMYSCEKCKKLRNGVKFCKVQNFPEILCIHLKRFRHELMFSTKISTHVSFPLEGLDLQPFLAKDSPAQIVTYDLLSVICHHGTASSGHYIAYCRNNLNNLWYEFDDQSVTEVSESTVQNAEAYVLFYRKSSEEAQKERRRISNLLNIMEPSLLQFYISRQWLNKFKTFAEPGPISNNDFLCIHGGVPPRKAGYIEDLVLMLPQNIWDNLYSRYGGGPAVNHLYICHTCQIEAEKIEKRRKTELEIFIRLNRAFQKEDSPATFYCISMQWFREWESFVKGKDGDPPGPIDNTKIAVTKCGNVMLRQGADSGQISEETWNFLQSIYGGGPEVILRPPVVHVDPDILQAEEKIEVETRSL

SEQ ID NO: 8844 - protein, 409 aa, Homo sapiens
MIDLWLYSYQRLLQTIAVLEAQRSQAVQDLESLGRHQREALKNPIGFVEKLQKKADIGLPYPQRVVQLPEIVWDQYTHSLGNFEREFKNRKRHTRRVKLVFDKVGLPARPKSPLDPKKDGESLSYSMLPLSDGPEGSSSRPQMIRGRLCDDTKPETFNQLWTVEEQKKLEQLLIKYPPEEVESRRWQKIADELGNRTAKQVASRVQKYFIKLTKAGIPVPGRTPNLYIYSKKSSTSRRQHPLNKHLFKPSTFMTSHEPPVYMDEDDDRSCFHSHMNTAVEDASDDESIPIMYRNLPEYKELLQFKKLKKQKLQQMQAESGFVQHVGFKCDNCGIEPIQGVRWHCQDCPPEMSLDFCDSCSDCLHETDIHKEDHQLEPIYRSETFLDRDYCVSQGTSYNYLDPNYFPANR

SEQ ID NO: 8845 - protein, 903 aa, Homo sapiens
MAASRSTRVTRSTVGLNGLDESFCGRTLRNRSIAHPEEISSNSQVRSRSPKKRPEPVPIQKGNNNGRTTDLKQQSTRESWVSPRKRGLSSSEKDNIERQAIENCERRQTEPVSPVLKRIKRCLRSEAPNSSEEDSPIKSDKESVEQRSTVVDNDADFQGTKRACRCLILDDCEKREIKKVNVSEEGPLNSAVVEEITGYLAVNGVDDSDSAVINCDDCQPDGNTKQNSIGSYVLQEKSVAENGDTDTQTSMFLDSRKEDSYIDHKVPCTDSQVQVKLEDHKIVTACLPVEHVNQLTTEPATGPFSETQSSLRDSEEEVDVVGDSSASKEQCKENTNNELDTSLESMPASGEPEPSPVLDCVSAQMMSLSEPQEHRYTLRTSPRRAAPTRGSPTKNSSPYRENGQFEENNLSPNETNATVSDNVSQSPTNPGEISQNEKGICCDSQNNGSEGVSKPPSEARLNIGHLPSAKESASQHITEEEDDDPDVYYFESDHVALKHNKDYQRLLQTIAVLEAQRSQAVQDLESLGRHQREALKNPIGFVEKLQKKADIGLPYPQRVVQLPEIVWDQYTHSLGNFEREFKNRKRHTRRVKLVFDKVGLPARPKSPLDPKKDGESLSYSMLPLSDGPEGSSSRPQMIRGRLCDDTKPETFNQLWTVEEQKKLEQLLIKYPPEEVESRRWQKIADELGNRTAKQVASRVQKYFIKLTKAGIPVPGRTPNLYIYSKKSSTSRRQHPLNKHLFKPSTFMTSHEPPVYMDEDDDRSCFHSHMNTAVEDASDDESIPIMYRNLPEYKELLQFKKLKKQKLQQMQAESGFVQHVGFKCDNCGIEPIQGVRWHCQDCPPEMSLDFCDSCSDCLHETDIHKEDHQLEPIYRSETFLDRDYCVSQGTSYNYLDPNYFPANR

SEQ ID NO: 8846 - protein, 395 aa, Homo sapiens
MAVTDSLSRAATVLATVLLLSFGSVAASHIEDQAEQFFRSGHTNNWAVLVCTSRFWFNYRHVANTLSVYRSVKRLGIPDSHIVLMLADDMACNPRNPKPATVFSHKNMELNVYGDDVEVDYRSYEVTVENFLRVLTGRIPPSTPRSKRLLSDDRSNILIYMTGHGGNGFLKFQDSEEITNIELADAFEQMWQKRRYNELLFIIDTCQGASMYERFYSPNIMALASSQVGEDSLSHQPDPAIGVHLMDRYTFYVLEFLEEINPASQTNMNDLFQVCPKSLCVSTPGHRTDLFQRDPKNVLITDFFGSVRKVEITTETIKLQQDSEIMESSYKEDQMDEKLMEPLKYAEQLPVAQIIHQKPKLKDWHPPGGFILGLWALIIMVFFKTYGIKHMKFIF

SEQ ID NO: 8847 - protein, 136 aa, Homo sapiens
MAHYITFLCMVLVLLLQNSVLAEDGEVRSSCRTAPTDLVFILDGSYSVGPENFEIVKKWLVNITKNFDIGPKFIQVGVVQYSDYPVLEIPLGSYDSGEHLTAAVESILYLGGNTKTGKAIQFALDYLFAKSSRFLT

SEQ ID NO: 8848 - protein, 580 aa, Homo sapiens
MAGTVRTACLVVAMLLSLDFPGQAQPPPPPPDATCHQVRSFFQRLQPGLKWVPETPVPGSDLQVCLPKGPTCCSRKMEEKYQLTARLNMEQLLQSASMELKFLIIQNAAVFQEAFEIVVRHAKNYTNAMFKNNYPSLTPQAFEFVGEFFTDVSLYILGSDINVDDMVNELFDSLFPVIYTQLMNPGLPDSALDINECLRGARRDLKVFGNFPKLIMTQVSKSLQVTRIFLQALNLGIEVINTTDHLKFSKDCGRMLTRMWYCSYCQGLMMVKPCGGYCNVVMQGCMAGVVEIDKYWREYILSLEELVNGMYRIYDMENVLLGLFSTIHDSIQYVQKNAGKLTTTIGKLCAHSQQRQYRSAYYPEDLFIDKKVLKVAHVEHEETLSSRRRELIQKLKSFISFYSALPGYICSHSPVAENDTLCWNGQELVERYSQKAARNGMKNQFNLHELKMKGPEPVVSQIIDKLKHINQLLRTMSMPKGRVLDKNLDEEGFESGDCGDDEDECIGGSGDGMIKVKNQLRFLAELAYDLDVDDAPGNSQQATPKDNEISTFHNLGNVHSPLKLLTSMAISVVCFFFLVH

SEQ ID NO: 8849 - protein, 954 aa, Homo sapiens
MAHYITFLCMVLVLLLQNSVLAEDGEVRSSCRTAPTDLVFILDGSYSVGPENFEIVKKWLVNITKNFDIGPKFIQVGVVQYSDYPVLEIPLGSYDSGEHLTAAVESILYLGGNTKTGKAIQFALDYLFAKSSRFLTKIAVVLTDGKSQDDVKDAAQAARDSKITLFAIGVGSETEDAELRAIANKPSSTYVFYVEDYIAISKIREVMKQKLCEESVCPTRIPVAARDERGFDILLGLDVNKKVKKRIQLSPKKIKGYEVTSKVDLSELTSNVFPEGLPPSYVFVSTQRFKVKKIWDLWRILTIDGRPQIAVTLNGVDKILLFTTTSVINGSQVVTFANPQVKTLFDEGWHQIRLLVTEQDVTLYIDDQQIENKPLHPVLGILINGQTQIGKYSGKEETVQFDVQKLRIYCDPEQNNRETACEIPGFCLNGPSDVGSTPAPCICPPGKPGLQGPKGDPGLPGNPGYPGQPGQDGKPGYQGIAGTPGVPGSPGIQGARGLPGYKGEPGRDGDKGDRGLPGFPGLHGMPGSKGEMGAKGDKGSPGFYGKKGAKGEKGNAGFPGLPGPAGEPGRHGKDGLMGSPGFKGEAGSPGAPGQDGTRGEPGIPGFPGNRGLMGQKGEIGPPGQQGKKGAPGMPGLMGSNGSPGQPGTPGSKGSKGEPGIQGMPGASGLKGEPGATGSPGEPGYMGLPGIQGKKGDKGNQGEKGIQGQKGENGRQGIPGQQGIQGHHGAKGERGEKGEPGVRGAIGSKGESGVDGLMGPAGPKGQPGDPGPQGPPGLDGKPGREFSEQFIRQVCTDVIRAQLPVLLQSGRIRNCDHCLSQHGSPGIPGPPGPIGPEGPRGLPGLPGRDGVPGLVGVPGRPGVRGLKGLPGRNGEKGSQGFGYPGEQGPPGPPGPEGPPGISKEGPPGDPGLPGKDGDHGKPGIQGQPGPPGICDPSLCFSVIARRDPFRKGPNY

SEQ ID NO: 8850 - protein, 152 aa, Homo sapiens
MGTPQKDVIIKSDAPDTLLLEKHADYIASYGSKKDDYEYCMSEYLRMSGIYWGLTVMDLMGQLHRMNREEILAFIKSCQHECGGISASIGHDPHLLYTLSAVQILTLYDSINVIDVNKVVEYVKGLQKEDGSFAGDIWGNVRFSPFYPKYQY

SEQ ID NO: 8851 - protein, 556 aa, Homo sapiens
MARFGLPALLCTLAVLSAALLAAELKSKSCSEVRRLYVSKGFNKNDAPLHEINGDHLKICPQGSTCCSQEMEEKYSLQSKDDFKSVVSEQCNHLQAVFASRYKKFDEFFKELLENAEKSLNDMFVKTYGHLYMQNSELFKDLFVELKRYYVVGNVNLEEMLNDFWARLLERMFRLVNSQYHFTDEYLECVSKYTEQLKPFGDVPRKLKLQVTRAFVAARTFAQGLAVAGDVVSKVSVVNPTAQCTHALLKMIYCSHCRGLVTVKPCYNYCSNIMRGCLANQGDLDFEWNNFIDAMLMVAERLEGPFNIESVMDPIDVKISDAIMNMQDNSVQVSQKVFQGCGPPKPLPAGRISRSISESAFSARFRPHHPEERPTTAAGTSLDRLVTDVKEKLKQAKKFWSSLPSNVCNDERMAAGNGNEDDCWNGKGKSRYLFAVTGNGLANQGNNPEVQVDTSKPDILILRQIMALRVMTSKMKNAYNGNDVDFFDISDESSGEGSGSGCEYQQCPSEFDYNATDHAGKSANEKADSAGVRPGAQAYLLTVFCILFLVMQREWR

SEQ ID NO: 8852 - protein, 454 aa, Homo sapiens
MHLTVFLLKGIVGFLWSCWVLVGYAKGGLGDNHVHSSFIYRRLRNHERREIQREILSILGLPHRPRPFSPGKQASSAPLFMLDLYNAMTNEENPEESEYSVRASLAEETRGARKGYPASPNGYPRRIQLSRTTPLTTQSPPLASLHDTNFLNDADMVMSFVNLVERDKDFSHQRRHYKEFRFDLTQIPHGEAVTAAEFRIYKDRSNNRFENETIKISIYQIIKEYTNRDADLFLLDTRKAQALDVGWLVFDITVTSNHWVINPQNNLGLQLCAETGDGRSINVKSAGLVGRQGPQSKQPFMVAFFKASEVLLRSVRAANKRKNQNRNKSSSHQDSSRMSSVGDYNTSEQKQACKKHELYVSFRDLGWQDWIIAPEGYAAFYCDGECSFPLNAHMNATNHAIVQTLVHLMFPDHVPKPCCAPTKLNAISVLYFDDSSNVILKKYRNMVVRSCGCH

SEQ ID NO: 8853 - protein, 421 aa, Homo sapiens
MAAGFGRCCRVLRSISRFHWRSQHTKANRQREPGLGFSFEFTEQQKEFQATARKFAREEIIPVAAEYDKTGEYPVPLIRRAWELGLMNTHIPENCGGLGLGTFDACLISEELAYGCTGVQTAIEGNSLGQMPIIIAGNDQQKKKYLGRMTEEPLMCAYCVTEPGAGSDVAGIKTKAEKKGDEYIINGQKMWITNGGKANWYFLLARSDPDPKAPANKAFTGFIVEADTPGIQIGRKELNMGQRCSDTRGIVFEDVKVPKENVLIGDGAGFKVAMGAFDKTRPVVAAGAVGLAQRALDEATKYALERKTFGKLLVEHQAISFMLAEMAMKVELARMSYQRAAWEVDSGRRNTYYASIAKAFAGDIANQLATDAVQILGGNGFNTEYPVEKLMRDAKIYQIYEGTSQIQRLIVAREHIDKYKN

SEQ ID NO: 8854 - protein, 377 aa, Homo sapiens
MRGQRSLLLGPARLCLRLLLLLGYRRRCPPLLRGLVQRWRYGKVCLRSLLYNSFGGSDTAVDAAFEPVYWLVDNVIRWFGVVFVVLVIVLTGSIVAIAYLCVLPLILRTYSVPRLCWHFFYSHWNLILIVFHYYQAITTPPGYPPQGRNDIATVSICKKCIYPKPARTHHCSICNRCVLKMDHHCPWLNNCVGHYNHRYFFSFCFFMTLGCVYCSYGSWDLFREAYAAIEKMKQLDKNKLQAVANQTYHQTPPPTFSFRERMTHKSLVYLWFLCSSVALALGALTVWHAVLISRGETSIERHINKKERRRLQAKGRVFRNPYNYGCLDNWKVFLGVDTGRHWLTRVLLPSSHLPHGNGMSWEPPPWVTAHSASVMAV

SEQ ID NO: 8855 - protein, 178 aa, Homo sapiens
MAFAGLTADARIVINRARVECQSHRLTVEDPVTVEYITRYIASLKQRYTQSNGRRPFGISALIVGFDFDGTPRLYQTDPSGTYHAWKANAIGRGAKSVREFLEKNYTDEAIETDDLTIKLVIKALLEVVQSGGKNIELAVMRRDQSLKILNPEEIEKYVAEIEKEKEENEKKKQKKAS

SEQ ID NO: 8856 - protein, 295 aa, Homo sapiens
MATGQKLMRAVRVFEFGGPEVLKLRSDIAVPIPKDHQVLIKVHACGVNPVETYIRSGTYSRKPLLPYTPGSDVAGVIEAVGDNASAFKKGDRVFTSSTISGGYAEYALAADHTVYKLPEKLDFKQGAAIGIPYFTAYRALIHSACVKAGESVLVHGASGGVGLAACQIARAYGLKILGTAGTEEGQKIVLQNGAHEVFNHREVNYIDKIKVVGSRGTIEINPRDTMAKESSIIGVTLFSSTKEEFQQYAAALQAGMEIGWLKPVIGSQYPLEKVAEAHENIIHGSGATGKMILLL

SEQ ID NO: 8857 - protein, 248 aa, Homo sapiens
MSYDRAITVFSPDGHLFQVEYAQEAVKKGSTAVGVRGRDIVVLGVEKKSVAKLQDERTVRKICALDDNVCMAFAGLTADARIVINRARVECQSHRLTVEDPVTVEYITRYIASLKQRYTQSNGRRPFGISALIVGFDFDGTPRLYQTDPSGTYHAWKANAIGRGAKSVREFLEKNYTDEAIETDDLTIKLVIKALLEVVQSGGKNIELAVMRRDQSLKILNPEEIEKYVAEIEKEKEENEKKKQKKAS

SEQ ID NO: 8858 - protein, 170 aa, Homo sapiens
MAPPVRYCIPGERLCNLEEGSPGSGTYTRHGYIFSSLAGCLMKSSENGAVSSINSRFAKVHILYVGSMPLKNSFRGTIRKEDVRATEKDKVEIYKSFRPGDIVLAKVISLGDAQSNYLLTTAENELGVVVAHSESGIQMVPISWCEMQCPKTHTKEFRKVARVQPEFLQT

SEQ ID NO: 8859 - protein, 195 aa, Homo sapiens
MAPPVRYCIPGERLCNLEEGSPGSGTYTRHGYIFSSLAGCLMKSSENGALPVVSVVRETESQLLPDVGAIVTCKVSSINSRFAKVHILYVGSMPLKNSFRGTIRKEDVRATEKDKVEIYKSFRPGDIVLAKVISLGDAQSNYLLTTAENELGVVVAHSESGIQMVPISWCEMQCPKTHTKEFRKVARVQPEFLQT

SEQ ID NO: 8860 - protein, 221 aa, Homo sapiens
MSGSSGTPYLGSKISLISKAQIRYEGILYTIDTDNSTVALAKVRSFGTEDRPTDRPAPPREEIYEYIIFRGSDIKDITVCEPPKAQHTLPQDPAIVQSSLGSASASPFQPHVPYSPFRGMAPYGPLAASSLLSQQYAASLGLEKLVSPPASAAASSPSSSPSPQPVSELDLSSEPQQLTAKGNSSLGELHAVLQTILRARGKAADRMTVAVADHLPSPCSR

SEQ ID NO: 8861 - protein, 326 aa, Homo sapiens
MEHFDASLSTYFKALLGPRDTRVKGWFLLDNYIPTFICSVIYLLIVWLGPKYMRNKQPFSCRGILVVYNLGLTLLSLYMFCESKREQPRRSACASRTDPSTQQQLPENRLVTGVWEGKYNFFCQGTRTAGESDMKIIRVLWWYYFSKLIEFMDTFFFILRKNNHQITVLHVYHHASMLNIWWFVMNWVPCGHSYFGATLNSFIHVLMYSYYGLSSVPSMRPYLWWKKYITQGQLLQFVLTIIQTSCGVIWPCTFPLGWLYFQIGYMISLIALFTNFYIQTYNKKGASRRKDHLKDHQNGSMAAVNGHTNSFSPLENNVKPRKLRKD

SEQ ID NO: 8862 - protein, 330 aa, Homo sapiens
MSTKNFRVSDGDWICPDKKCGNVNFARRTSCNRCGREKTTEAKMMKAGGTEIGKTLAEKSRGLFSANDWQCKTCSNVNWARRSECNMCNTPKYAKLEERTGYGGGFNERENVEYIEREESDGEYDEFGRKKKKYRGKAVGPASILKEVEDKESEGEEEDEDEDLSKYKLDEDEDEDDADLSKYNLDASEEEDSNKKKSNRRSRSKSRSSHSRSSSRSSSPSSSRSRSRSRSRSSSSSQSRSRSSSRERSRSRGSKSRSSSRSHRGSSSPRKRSYSSSSSSPERNRKRSRSRSSSSGDRKKRRTRSRSPERRHRSSSGSSHSGSRSSSKKK

SEQ ID NO: 8863 - protein, 388 aa, Homo sapiens
MKETRGYGGDAPFCTRLNHSYTGMWAPERSAEARGNLTRPPGSGEDCGSVSVAFPITMLLTGFVGNALAMLLVSRSYRRRESKRKKSFLLCIGWLALTDLVGQLLTTPVVIVVYLSKQRWEHIDPSGRLCTFFGLTMTVFGLSSLFIASAMAVERALAIRAPHWYASHMKTRATRAVLLGVWLAVLAFALLPVLGVGQYTVQWPGTWCFISTGRGGNGTSSSHNWGNLFFASAFAFLGLLALTVTFSCNLATIKALVSRCRAKATASQSSAQWGRITTETAIQLMGIMCVLSVCWSPLLIMMLKMIFNQTSVEHCKTHTEKQKECNFFLIAVRLASLNQILDPWVYLLLRKILLRKFCQVANAVSSCSNDGQKGQPISLSNEIIQTEA

SEQ ID NO: 8864 - protein, 581 aa, Homo sapiens
MTLPMSDPTAWATAMNNLGMAPLGIAGQPILPDFDPALGMMTGIPPITPMMPGLGIVPPPIPPDMPVVKEIIHCKSCTLFPPNPNLPPPATRERPPGCKTVFVGGLPENGTEQIIVEVFEQCGEIIAIRKSKKNFCHIRFAEEYMVDKALYLSGYRIRLGSSTDKKDTGRLHVDFAQARDDLYEWECKQRMLAREERHRRRMEEERLRPPSPPPVVHYSDHECSIVAEKLKDDSKFSEAVQTLLTWIERGEVNRRSANNFYSMIQSANSHVRRLVNEKAAHEKDMEEAKEKFKQALSGILIQFEQIVAVYHSASKQKAWDHFTKAQRKNISVWCKQAEEIRNIHNDELMGIRREEEMEMSDDEIEEMTETKETEESALVSQAEALKEENDSLRWQLDAYRNEVELLKQEQGKVHREDDPNKEQQLKLLQQALQGMQQHLLKVQEEYKKKEAELEKLKDDKLQVEKMLENLKEKESCASRLCASNQDSEYPLEKTMNSSPIKSEREALLVGIISTFLHVHPFGASIEYICSYLHRLDNKICTSDVECLMGRLQHTFKQEMTGVGASLEKRWKFCGFEGLKLT

SEQ ID NO: 8865 - protein, 405 aa, Homo sapiens
MQEKDASSQGFLPHFQHFATQAIHVGQDPEQWTSRAVVPPISLSTTFKQGAPGQHSGFEYSRSGNPTRNCLEKAVAALDGAKYCLAFASGLAATVTITHLLKAGDQIICMDDVYGGTNRYFRQVASEFGLKISFVDCSKIKLLEAAITPETKLVWIETPTNPTQKVIDIEGCAHIVHKHGDIILVVDNTFMSPYFQRPLALGADISMYSATKYMNGHSDVVMGLVSVNCESLHNRLRFLQNSLGAVPSPIDCYLCNRGLKTLHVRMEKHFKNGMAVAQFLESNPWVEKVIYPGLPSHPQHELVKRQCTGCTGMVTFYIKGTLQHAEIFLKNLKLFTLAESLGGFESLAELPAIMTHASVLKNDRDVLGISDTLIRLSVGLEDEEDLLEDLDQALKAAHPPSGSHS

SEQ ID NO: 8866 - protein, 403 aa, Homo sapiens
MFRAQWMFELAPGVSSSNLENRPCRAARGSLQKTSADTKGKQEQAKEEKARELFLKAVEEEQNGALYEAIKFYRRAMQLVPDIEFKITYTRSPDGDGVGNSYIEDNDDDSKMADLLSYFQQQLTFQESVLKLCQPELESSQIHISVLPMEVLMYIFRWVVSSDLDLRSLEQLSLVCRGFYICARDPEIWRLACLKVWGRSCIKLVPYTSWREMFLERPRVRFDGVYISKTTYIRQGEQSLDGFYRAWHQVEYYRYIRFFPDGHVMMLTTPEEPQSIVPRLRTRNTRTDAILLGHYRLSQDTDNQTKVFAVITKKKEEKPLDYKYRYFRRVPVQEADQSFHVGLQLCSSGHQRFNKLIWIHHSCHITYKSTGETAVSAFEIDKMYTPLFFARVRSYTAFSERPL

SEQ ID NO: 8867 - protein, 484 aa, Homo sapiens
MSNTTVVPSTAGPGPSGGPGGGGGGGGGGGGTEVIQVTNVSPSASSEQMRTLFGFLGKIDELRLFPPDDSPLPVSSRVCFVKFHDPDSAVVAQHLTNTVFVDRALIVVPYAEGVIPDEAKALSLLAPANAVAGLLPGGGLLPTPNPLTQIGAVPLAALGAPTLDPALAALGLPGANLNSQSLAADQLLKLMSTVDPKLNHVAAGLVSPSLKSDTSSKEIEEAMKRVREAQSLISAAIEPDKKEEKRRHSRSRSRSRRRRTPSSSRHRRSRSRSRRRSHSKSRSRRRSKSPRRRRSHSRERGRRSRSTSKTRDKKKEDKEKKRSKTPPKSYSTARRSRSASRERRRRRSRSGTRSPKKPRSPKRKLSRSPSPRRHKKEKKKDKDKERSRDERERSTSKKKKSKDKEKDRERKSESDKDVKQVTRDYDEEEQGYDSEKEKKEEKKPIETGSPKTKECSVEKGTGDSLRESKVNGDDHHEEDMDMSD

SEQ ID NO: 8868 - protein, 483 aa, Homo sapiens
MSNTTVVPSTAGPGPSGGPGGGGGGGGGGGGTEVIQVTNVSPSASSEQMRTLFGFLGKIDELRLFPPDDSPLPVSSRVCFVKFHDPDSAVVAQHLTNTVFVDRALIVVPYAEGVIPDEAKALSLLAPANAVAGLLPGGGLLPTPNPLTQIGAVPLAALGAPTLDPALAALGLPGANLNSQSLAADQLLKLMSTVDPKLNHVAAGLVSPSLKSDTSSKEIEEAMKRVREAQSLISAAIEPDKKEEKRRHSRSRSRSRRRRTPSSSRHRRSRSRSRRRSHSKSRSRRRSKSPRRRRSHSRERGRRSRSTSKTRDKKKEDKEKKRSKTPPKSYSTARRSRSASRERRRRRSRSGTRSPKKPRSPKRKLSRSPSPRRHKKEKKKDKDKERSRDERERSTSKKKKSKDKEKDRERKSESDKDVKVTRDYDEEEQGYDSEKEKKEEKKPIETGSPKTKECSVEKGTGDSLRESKVNGDDHHEEDMDMSD

SEQ ID NO: 8869 - protein, 602 aa, Homo sapiens
MSRLKRIAGQDLRAGFKAGGRDCGTSVPQGLLKAARKSGQLNLSGRNLSEVPQCVWRINVDIPEEANQNLSFGATERWWEQTDLTKLIISNNKLQSLTDDLRLLPALTVLDIHDNQLTSLPSAIRELENLQKLNVSHNKLKILPEEITNLRNLKCLYLQHNELTCISEGFEQLSNLEDLDLSNNHLTTVPASFSSLSSLVRLNLSSNELKSLPAEINRMKRLKHLDCNSNLLETIPPELAGMESLELLYLRRNKLRFLPEFPSCSLLKELHVGENQIEMLEAEHLKHLNSILVLDLRDNKLKSVPDEIILLRSLERLDLSNNDISSLPYSLGNLHLKFLALEGNPLRTIRREIISKGTQEVLKYLRSKIKDDGPSQSESATETAMTLPSESRVNIHAIITLKILDYSDKQATLIPDEVFDAVKSNIVTSINFSKNQLCEIPKRMVELKEMVSDVDLSFNKLSFISLELCVLQKLTFLDLRNNFLNSLPEEMESLVRLQTINLSFNRFKMLPEVLYRIFTLETILISNNQVGSVDPQKMKMMENLTTLDLQNNDLLQIPPELGNCVNLRTLLLDGNPFRVPRAAILMKGTAAILEYLRDRIPT

SEQ ID NO: 8870 - protein, 254 aa, Homo sapiens
MAAYKLVLIRHGESAWNLENRFSGWYDADLSPAGHEEAKRGGQALRDAGYEFDICFTSVQKRAIRTLWTVLDAIDQMWLPVVRTWRLNERHYGGLTGLNKAETAAKHGEAQVKIWRRSYDVPPPPMEPDHPFYSNISKDRRYADLTEDQLPSCESLKDTIARALPFWNEEIVPQIKEGKRVLIAAHGNSLRGIVKHLEGLSEEAIMELNLPTGIPIVYELDKNLKPIKPMQFLGDEETVRKAMEAVAAQGKAKK

SEQ ID NO: 8871 - protein, 222 aa, Homo sapiens
MAARPKLHYPNGRGRMESVRWVLAAAGVEFDEEFLETKEQLYKLQDGNHLLFQQVPMVEIDGMKLVQTRSILHYIADKHNLFGKNLKERTLIDMYVEGTLDLLELLIMHPFLKPDDQQKEVVNMAQKAIIRYFPVFEKILRGHGQSFLVGNQLSLADVILLQTILALEEKIPNILSAFPFLQEYTVKLSNIPTIKRFLEPGSKKKPPPDEIYVRTVYNIFRP

SEQ ID NO: 8872 - protein, 737 aa, Homo sapiens
MDDDKPFQPKNISKMAELFMECEEEELEPWQKKVEETQDEDDDELIFVGEISSSKPAISNILNRGHSSSSSKGIKSEPHSPGIPEIFRTASQRCRDPPSNPVAASPRFHLVSKSSQSSVTVENASKPDFTKNSQVGSDNSSILLFDSTQESLPPSQDIPAIFREGMKNTSYVLKHPSTSKVNSVTPKKPKTSEDVPQINPSTSLPLIGSPPVTSSQVMLSKGTNTSSPYDAGADYLRACPKCNVQFNLLDPLKYHMKHCCPDMITKFLGVIVKSERPCDEDKTDSETGKLIMLVNEFYYGRHEGVTEKEPKTYTTFKCFSCSKVLKNNIRFMNHMKHHLELEKQNNESWENHTTCQHCYRQYPTPFQLQCHIESTHTPHEFSTICKICELSFETEHILLQHMKDTHKPGEMPYVCQVCQFRSSTFSDVEAHFRAAHENTKNLLCPFCLKVSKMATPYMNHYMKHQKKGVHRCPKCRLQFLTSKEKAEHKAQHRTFIKPKELEGLPPGAKVTIRASLGPLQSKLPTAPFGCAPGTSFLQVTPPTSQNTTARNPRKSNASRSKTSKLHATTSTASKVNTSKPRGRIAKSKAKPSYKQKRQRNRKNKMSLALKNIRCRRGIHKCIECHSKIKDFASHFSIYIHCSFCKYNTNCNKAFVNHMMSSHSNHPGKRFCIFKKHSGTLRGITLVCLKCDFLADSSGLDRMAKHLSQRKTHTCQVIIENVSKSTSTSEPTTGCSLK

SEQ ID NO: 8873 - protein, 229 aa, Homo sapiens
MGNASFGSKEQKLLKRLRLLPALLILRAFKPHRKIRDYRVVVVGTAGVGKSTLLHKWASGNFRHEYLPTIENTYCQLLGCSHGVLSLHITDSKSGDGNRALQRHVIARGHAFVLVYSVTKKETLEELKAFYELICKIKGNNLHKFPIVLVGNKSDDTHREVALNDGATCAMEWNCAFMEISAKTDVNVQELFHMLLNYKKKPTTGLQEPEKKSQMPNTTEKLLDKCIIM

SEQ ID NO: 8874 - protein, 72 aa, Homo sapiens
MSSKTASTNNIAQARRTVQQLRLEASIERIKVSKASADLMSYCEEHARSDPLLIGIPTSENPFKDKKTCIIL

SEQ ID NO: 8875 - protein, 165 aa, Homo sapiens
MTLEEFSAGEQKTERMDKVGDALEEVLSKALSQRTITVGVYEAAKLLNVDPDNVVLCLLAADEDDDRDVALQIHFTLIQAFCCENDINILRVSNPGRLAELLLLETDAGPAASEGAEQPPDLHCVLVTNPHSSQWKDPALSQLICFCRESRYMDQWVPVINLPER

SEQ ID NO: 8876 - protein, 1297 aa, Homo sapiens
MGRSGKLPSGVSAKLKRWKKGHSSDSNPAICRHRQAARSRFFSRPSGRSDLTVDAVKLHNELQSGSLRLGKSEAPETPMEEEAELVLTEKSSGTFLSGLSDCTNVTFSKVQRFWESNSAAHKEICAVLAAVTEVIRSQGGKETETEYFAALMTTMEAVESPESLAAVAYLLNLVLKRVPSPVLIKKFSDTSKAFMDIMSAQASSGSTSVLRWVLSCLATLLRKQDLEAWGYPVTLQVYHGLLSFTVHPKPKIRKAAQHGVCSVLKGSEFMFEKAPAHHPAAISTAKFCIQEIEKSGGSKEATTTLHMLTLLKDLLPCFPEGLVKSCSETLLRVMTLSHVLVTACAMQAFHSLFHARPGLSTLSAELNAQIITALYDYVPSENDLQPLLAWLKVMEKAHINLVRLQWDLGLGHLPRFFGTAVTCLLSPHSQVLTAATQSLKEILKECVAPHMADIGSVTSSASGPAQSVAKMFRAVEEGLTYKFHAAWSSVLQLLCVFFEACGRQAHPVMRKCLQSLCDLRLSPHFPHTAALDQAVGAAVTSMGPEVVLQAVPLEIDGSEETLDFPRSWLLPVIRDHVQETRLGFFTTYFLPLANTLKSKAMDLAQAGSTVESKIYDTLQWQMWTLLPGFCTRPTDVAISFKGLARTLGMAISERPDLRVTVCQALRTLITKGCQAEADRAEVSRFAKNFLPILFNLYGQPVAAGDTPAPRRAVLETIRTYLTITDTQLVNSLLEKASEKVLDPASSDFTRLSVLDLVVALAPCADEAAISKLYSTIRPYLESKAHGVQKKAYRVLEEVCASPQGPGALFVQSHLEDLKKTLLDSLRSTSSPAKRPRLKCLLHIVRKLSAEHKEFITALIPEVILCTKEVSVGARKNAFALLVEMGHAFLRFGSNQEEALQCYLVLIYPGLVGAVTMVSCSILALTHLLFEFKGLMGTSTVEQLLENVCLLLASRTRDVVKSALGFIKVAVTVMDVAHLAKHVQLVMEAIGKLSDDMRRHFRMKLRNLFTKFIRKFGFELVKRLLPEEYHRVLVNIRKAEARAKRHRALSQAAVEEEEEEEEEEEPAQGKGDSIEEILADSEDEEDNEEEERSRGKEQRKLARQRSRAWLKEGGGDEPLNFLDPKVAQRVLATQPGPGRGRKKDHGFKVSADGRLIIREEADGNKMEEEEGAKGEDEEMADPMEDVIIRNKKHQKLKHQKEAEEEELEIPPQYQAGGSGIHRPVAKKAMPGAEYKAKKAKGDVKKKGRPDPYAYIPLNRSKLNRRKKMKLQGQFKGLVKAARRGSQVGHKNRRKDRRP

SEQ ID NO: 8877 - protein, 408 aa, Homo sapiens
MPGHLQEGFGCVVTNRFDQLFDDESDPFEVLKAAENKKKEAGGGGVGGPGAKSAAQAAAQTNSNAAGKQLRKESQKDRKNPLPPSVGVVDKKEETQPPVALKKEGIRRVGRRPDQQLQGEGKIIDRRPERRPPRERRFEKPLEEKGEGGEFSVDRPIIDRPIRGRGGLGRGRGGRGRGMGRGDGFDSRGKREFDRHSGSDRSSFSHYSGLKHEDKRGGSGSHNWGTVKDELTESPKYIQKQISYNYSDLDQSNVTEETPEGEEHHPVADTENKENEVEEVKEEGPKEMTLDEWKAIQNKDRAKVEFNIRKPNEGADGQWKKGFVLHKSKSEEAHAEDSVMDHHFRKPANDITSQLEINFGDLGRPGRGGRGGRGGRGRGGRPNRGSRTDKSSASAPDVDDPEAFPALA

SEQ ID NO: 8878 - protein, 81 aa, Homo sapiens
MFMFNWFTDCLWTLFLSNYQPSVESSSPGGSATSDDHEFDPSADMLVHDFDDERTLEEEEMMEGETNFSSEIEDLARVNNM

SEQ ID NO: 8879 - protein, 450 aa, Homo sapiens
MFMFNWFTDCLWTLFLSNYQPSVESSSPGGSATSDDHEFDPSADMLVHDFDDERTLEEEEMMEGETNFSSEIEDLAREGDMPIHELLSLYGYGSTVRLPEEDEEEEEEEEEGEDDEDADNDDNSGCSGENKEENIKDSSGQEDETQSSNDDPSQSVASQDAQEIIRPRRCKYFDTNSEVEEESEEDEDYIPSEDWKKEIMVGSMFQAEIPVGICRYKENEKVYENDDQLLWDPEYLPEDKVIIFLKDASRRTGDEKGVEAIPEGSHIKDNEQALYELVKCNFDTEEALRRLRFNVKAAREELSVWTEEECRNFEQGLKAYGKDFHLIQANKVRTRSVGECVAFYYMWKKSERYDFFAQQTRFGKKKYNLHPGVTDYMDRLLDESESAASSRAPSPPPTASNSSNSQSEKEDGTVSTANQNGVSSNGPGILQMLLPVHFSAISSRANAFLK

SEQ ID NO: 8880 - protein, 470 aa, Homo sapiens
MFMFNWFTDCLWTLFLSNYQPSVESSSPGGSATSDDHEFDPSADMLVHDFDDERTLEEEEMMEGETNFSSEIEDLAREGDMPIHELLSLYGYGSTVRLPEEDEEEEEEEEEGEDDEDADNDDNSGCSGENKEENIKDSSGQEDETQSSNDDPSQSVASQDAQEIIRPRRCKYFDTNSEVEEESEEDEDYIPSEDWKKEIMVGSMFQAEIPVGICRYKENEKVYENDDQLLWDPEYLPEDKVIIFLKDASRRTGDEKGVEAIPEGSHIKDNEQALYELVKCNFDTEEALRRLRFNVKAAREELSVWTEEECRNFEQGLKAYGKDFHLIQANKVRTRSVGECVAFYYMWKKSERYDFFAQQTRFGKKKYNLHPGVTDYMDRLLDESESAASSRAPSPPPTASNSSNSQSEKEDGTVSTANQNGVSSNGPGEILNKEEVKVEGLHINGPTGILQMLLPVHFSAISSRANAFLK

SEQ ID NO: 8881 - protein, 545 aa, Homo sapiens
MTPGKHSGASARAANGGAWGYRDFRGGQKKGWCTTPQLVATMPVSPAGSHKQQNFGLNNATQPKKSISFFATMKATSVKGYTGANQSRMAVSKTVLIPPELKTVEKPNPNIKTTQVFDINGTDVTPRPLYHPDPLTGTAKPSKLLTSQEGSLGSEFISSYSLYQNTINPSTLGQFTRSVLGSSTVSKSSVSASESIAEDLEEPSYKRERLTSFTDLQVIRAAPEKIVTKEDLEKNIEIILTETETLRFFDLPTVMVSVESEEAEKVTQRNKNYEVLCRNRLGNDLYVERMMQTFNGAPKNKDVQCDKIIMEDKGIMSTAWDLYDSYNAMELVSLSVKQSVVESSSKANVLPKDQDQRLPGSTTEKNSETSSLMDIENVILAKIHEDEEDHSDAILKSDKFHQDLFFMERVLMENIFQPKLAAYRQLPVLKEPEPEEPEDVLESAKHEEVEEESKKEEEEEIHAEESTIPANLERLWSFSCDLTKGLNVSSLAWNKTNPDLLAVGYGHFGFKEQKRGLACCWSIKNPMVTQTRIRSIFIWLLTKFS

SEQ ID NO: 8882 - protein, 192 aa, Homo sapiens
MEPGLWLLFGLTVTSAAGFVPCSQSGDAGRRGVSQAPTAARSEGDCEETVAGPGEETVAGPGEGTVAPTALQGPSPGSPGQEQAAEGAPEHHRSRRCTCFTYKDKECVYYCHLDIIWINTPEQTVPYGLSNYRGSFRGKRSAGPLPGNLQLSHRPHLRCACVGRYDKACLHFCTQTLDVSRLKSRTNKASRL

SEQ ID NO: 8883 - protein, 848 aa, Homo sapiens
MTPGKHSGASARAANGGAWGYRDFRGGQKKGWCTTPQLVATMPVSPAGSHKQQNFGLNNATQPKKSISFFATMKATSVKGYTGANQSRMAVSKTVLIPPELKTVEKPNPNIKTTQVFDINGTDVTPRPLYHPDPLTGTAKPSKLLTSQEGSLGSEFISSYSLYQNTINPSTLGQFTRSVLGSSTVSKSSVSASESIAEDLEEPSYKRERLTSFTDLQVIRAAPEKIVTKEDLEKNIEIILTETETLRFFDLPTVMVSVESEEAEKVTQRNKNYEVLCRNRLGNDLYVERMMQTFNGAPKNKDVQCDKIIMEDKGIMSTAWDLYDSYNAMELVSLSVKQSVVESSSKANVLPKDQDQRLPGSTTEKNSETSSLMDIENVILAKIHEDEEDHSDAILKSDKFHQDLFFMERVLMENIFQPKLAAYRQLPVLKEPEPEEPEDVLESAKHEEVEEESKKEEEEEIHAEESTIPANLERLWSFSCDLTKGLNVSSLAWNKTNPDLLAVGYGHFGFKEQKRGLACCWSIKNPMWPERIYQSPYGVTAVDFSIGAPNLLAVGYHNGTIAIYNVRSNSNVPVLDSSESPQKHLGPVWQLQWIEQDRGTTGDGKREILVSISADGRISKWVIRKGLDCYDLMRLKRTTAASNKKGGEKEKKDEALISRQAPGMCFAFHPKDTNIYLAGTEEGHIHKCSCSYNEQYLDTYRGHKGPVYKVTWNPFCHDVFLSCSADWGVIIWQQENVKPSLSFYPATSVVYDVAWSPKSSYIFAAANENRVEIWDLHISTLDPLIVNTANPGIKFTTILFAKQTDCLLVGDSDGQVSVYELRNMPTVLETGRGDIMDTLLGSKSNQSA

SEQ ID NO: 8884 - protein, 409 aa, Homo sapiens
MALTPGWGSSAGPVRPELWLLLWAAAWRLGASACPALCTCTGTTVDCHGTGLQAIPKNIPRNTERLELNGNNITRIHKNDFAGLKQLRVLQLMENQIGAVERGAFDDMKELERLRLNRNQLHMLPELLFQNNQALSRLDLSENAIQAIPRKAFRGATDLKNLQLDKNQISCIEEGAFRALRGLEVLTLNNNNITTIPVSSFNHMPKLRTFRLHSNHLFCDCHLAWLSQWLRQRPTIGLFTQCSGPASLRGLNVAEVQKSEFSCSGQGEAGRVPTCTLSSGSCPAMCTCSNGIVDCRGKGLTAIPANLPETMTEIRLELNGIKSIPPGAFSPYRKLRRIDLSNNQIAEIAPDAFQGLRSLNSLHTGPVTCPHTTGTHSSHCRAFAVAVPHSRNDLEAMFEEEVPRIFYSA

SEQ ID NO: 8885 - protein, 564 aa, Homo sapiens
MKEHGGTFSSTGISGGSGDSAMDSLQPLQPNYMPVCLFAEESYQKLAMETLEELDWCLDQLETIQTYRSVSEMASNKFKRMLNRELTHLSEMSRSGNQVSEYISNTFLDKQNDVEIPSPTQKDREKKKKQQLMTQISGVKKLMHSSSLNNTSISRFGVNTENEDHLAKELEDLNKWGLNIFNVAGYSHNRPLTCIMYAIFQERDLLKTFRISSDTFITYMMTLEDHYHSDVAYHNSLHAADVAQSTHVLLSTPALDAVFTDLEILAAIFAAAIHDVDHPGVSNQFLINTNSELALMYNDESVLENHHLAVGFKLLQEEHCDIFMNLTKKQRQTLRKMVIDMVLATDMSKHMSLLADLKTMVETKKVTSSGVLLLDNYTDRIQVLRNMVHCADLSNPTKSLELYRQWTDRIMEEFFQQGDKERERGMEISPMCDKHTASVEKSQVGFIDYIVHPLWETWADLVQPDAQDILDTLEDNRNWYQSMIPQSPSPPLDEQNRDCQGLMEKFQFELTLDEEDSEGPEKEGEGHSYFSSTKTLCVIDPENRDSLGETDIDIATEDKSPVDT

SEQ ID NO: 8886 - protein, 958 aa, Homo sapiens
MICQKFCVVLLHWEFIYVITAFNLSYPITPWRFKLSCMPPNSTYDYFLLPAGLSKNTSNSNGHYETAVEPKFNSSGTHFSNLSKTTFHCCFRSEQDRNCSLCADNIEGKTFVSTVNSLVFQQIDANWNIQCWLKGDLKLFICYVESLFKNLFRNYNYKVHLLYVLPEVLEDSPLVPQKGSFQMVHCNCSVHECCECLVPVPTAKLNDTLLMCLKITSGGVIFQSPLMSVQPINMVKPDPPLGLHMEITDDGNLKISWSSPPLVPFPLQYQVKYSENSTTVIREADKIVSATSLLVDSILPGSSYEVQVRGKRLDGPGIWSDWSTPRVFTTQDVIYFPPKILTSVGSNVSFHCIYKKENKIVPSKEIVWWMNLAEKIPQSQYDVVSDHVSKVTFFNLNETKPRGKFTYDAVYCCNEHECHHRYAELYVIDVNINISCETDGYLTKMTCRWSTSTIQSLAESTLQLRYHRSSLYCSDIPSIHPISEPKDCYLQSDGFYECIFQPIFLLSGYTMWIRINHSLGSLDSPPTCVLPDSVVKPLPPSSVKAEITINIGLLKISWEKPVFPENNLQFQIRYGLSGKEVQWKMYEVYDAKSKSVSLPVPDLCAVYAVQVRCKRLDGLGYWSNWSNPAYTVVMDIKVPMRGPEFWRIINGDTMKKEKNVTLLWKPLMKNDSLCSVQRYVINHHTSCNGTWSEDVGNHTKFTFLWTEQAHTVTVLAINSIGASVANFNLTFSWPMSKVNIVQSLSAYPLNSSCVIVSWILSPSDYKLMYFIIEWKNLNEDGEIKWLRISSSVKKYYIHDHFIPIEKYQFSLYPIFMEGVGKPKIINSFTQDDIEKHQSDAGLYVIVPVIISSSILLLGTLLISHQRMKKLFWEDVPNPKNCSWAQGLNFQKMLEGSMFVKSHHHSLISSTQGHKHCGRPQGPLHRKTRDLCSLVYLLTLPPLLSYDPAKSPSVRNTQE

SEQ ID NO: 8887 - protein, 896 aa, Homo sapiens
MICQKFCVVLLHWEFIYVITAFNLSYPITPWRFKLSCMPPNSTYDYFLLPAGLSKNTSNSNGHYETAVEPKFNSSGTHFSNLSKTTFHCCFRSEQDRNCSLCADNIEGKTFVSTVNSLVFQQIDANWNIQCWLKGDLKLFICYVESLFKNLFRNYNYKVHLLYVLPEVLEDSPLVPQKGSFQMVHCNCSVHECCECLVPVPTAKLNDTLLMCLKITSGGVIFQSPLMSVQPINMVKPDPPLGLHMEITDDGNLKISWSSPPLVPFPLQYQVKYSENSTTVIREADKIVSATSLLVDSILPGSSYEVQVRGKRLDGPGIWSDWSTPRVFTTQDVIYFPPKILTSVGSNVSFHCIYKKENKIVPSKEIVWWMNLAEKIPQSQYDVVSDHVSKVTFFNLNETKPRGKFTYDAVYCCNEHECHHRYAELYVIDVNINISCETDGYLTKMTCRWSTSTIQSLAESTLQLRYHRSSLYCSDIPSIHPISEPKDCYLQSDGFYECIFQPIFLLSGYTMWIRINHSLGSLDSPPTCVLPDSVVKPLPPSSVKAEITINIGLLKISWEKPVFPENNLQFQIRYGLSGKEVQWKMYEVYDAKSKSVSLPVPDLCAVYAVQVRCKRLDGLGYWSNWSNPAYTVVMDIKVPMRGPEFWRIINGDTMKKEKNVTLLWKPLMKNDSLCSVQRYVINHHTSCNGTWSEDVGNHTKFTFLWTEQAHTVTVLAINSIGASVANFNLTFSWPMSKVNIVQSLSAYPLNSSCVIVSWILSPSDYKLMYFIIEWKNLNEDGEIKWLRISSSVKKYYIHDHFIPIEKYQFSLYPIFMEGVGKPKIINSFTQDDIEKHQSDAGLYVIVPVIISSSILLLGTLLISHQRMKKLFWEDVPNPKNCSWAQGLNFQKRTDIL

SEQ ID NO: 8888 - protein, 131 aa, Homo sapiens
MAGVKALVALSFSGAIGLTFLMLGCALEDYGVYWPLFVLIFHAISPIPHFIAKRVTYDSDATSSACRELAYFFTTGIVVSAFGFPVILARVAVIKWGACGLVLAGNAVIFLTIQGFFLIFGRGDDFSWEQW

SEQ ID NO: 8889 - protein, 1461 aa, Homo sapiens
MALTPGWGSSAGPVRPELWLLLWAAAWRLGASACPALCTCTGTTVDCHGTGLQAIPKNIPRNTERLELNGNNITRIHKNDFAGLKQLRVLQLMENQIGAVERGAFDDMKELERLRLNRNQLHMLPELLFQNNQALSRLDLSENAIQAIPRKAFRGATDLKNLQLDKNQISCIEEGAFRALRGLEVLTLNNNNITTIPVSSFNHMPKLRTFRLHSNHLFCDCHLAWLSQWLRQRPTIGLFTQCSGPASLRGLNVAEVQKSEFSCSGQGEAGRVPTCTLSSGSCPAMCTCSNGIVDCRGKGLTAIPANLPETMTEIRLELNGIKSIPPGAFSPYRKLRRIDLSNNQIAEIAPDAFQGLRSLNSLVLYGNKITDLPRGVFGGLYTLQLLLLNANKINCIRPDAFQDLQNLSLLSLYDNKIQSLAKGTFTSLRAIQTLHLAQNPFICDCNLKWLADFLRTNPIETSGARCASPRRLANKRIGQIKSKKFRCSAKEQYFIPGTEDYQLNSECNSDVVCPHKCRCEANVVECSSLKLTKIPERIPQSTAELRLNNNEISILEATGMFKKLTHLKKINLSNNKVSEIEDGAFEGAASVSELHLTANQLESIRSGMFRGLDGLRTLMLRNNRISCIHNDSFTGLRNVRLLSLYDNQITTVSPGAFDTLQSLSTLNLLANPFNCNCQLAWLGGWLRKRKIVTGNPRCQNPDFLRQIPLQDVAFPDFRCEEGQEEGGCLPRPQCPQECACLDTVVRCSNKHLRALPKGIPKNVTELYLDGNQFTLVPGQLSTFKYLQLVDLSNNKISSLSNSSFTNMSQLTTLILSYNALQCIPPLAFQGLRSLRLLSLHGNDISTLQEGIFADVTSLSHLAIGANPLYCDCHLRWLSSWVKTGYKEPGIARCAGPQDMEGKLLLTTPAKKFECQGPPTLAVQAKCDLCLSSPCQNQGTCHNDPLEVYRCACPSGYKGRDCEVSLDSCSSGPCENGGTCHAQEGEDAPFTCSCPTGFEGPTCGVNTDDCVDHACANGGVCVDGVGNYTCQCPLQYEGKACEQLVDLCSPDLNPCQHEAQCVGTPDGPRCECMPGYAGDNCSENQDDCRDHRCQNGAQCMDEVNSYSCLCAEGYSGQLCEIPPHLPAPKSPCEGTECQNGANCVDQGNRPVCQCLPGFGGPECEKLLSVNFVDRDTYLQFTDLQNWPRANITLQVSTAEDNGILLYNGDNDHIAVELYQGHVRVSYDPGSYPSSAIYSAETINDGQFHTVELVAFDQMVNLSIDGGSPMTMDNFGKHYTLNSEAPLYVGGMPVDVNSAAFRLWQILNGTGFHGCIRNLYINNELQDFTKTQMKPGVVPGCEPCRKLYCLHGICQPNATPGPMCHCEAGWVGLHCDQPADGPCHGHKCVHGQCVPLDALSYSCQCQDGYSGALCNQSPSAGGTLSGTFTRSRGAMPSARPRAPCHGWSAGARAQARAAARAFG

SEQ ID NO: 8890 - protein, 937 aa, Homo sapiens
MHRPRRRGTRPPLLALLAALLLAARGAAAQETELSVSAELVPTSSWNISSELNKDSYLTLDEPMNNITTSLGQTAELHCKVSGNPPPTIRWFKNDAPVVQEPRRLSFRSTIYGSRLRIRNLDTTDTGYFQCVATNGKEVVSSTGVLFVKFGPPPTASPGYSDEYEEDGFCQPYRGIACARFIGNRTVYMESLHMQGEIENQITAAFTMIGTSSHLSDKCSQFAIPSLCHYAFPYCDETSSVPKPRDLCRDECEILENVLCQTEYIFARSNPMILMRLKLPNCEDLPQPESPEAANCIRIGIPMADPINKNHKCYNSTGVDYRGTVSVTKSGRQCQPWNSQYPHTHTFTALRFPELNGGHSYCRNPGNQKEAPWCFTLDENFKSDLCDIPACDSKDSKEKNKMEILYILVPSVAIPLAIALLFFFICVCRNNQKSSSAPVQRQPKHVRGQNVEMSMLNAYKPKSKAKELPLSAVRFMEELGECAFGKIYKGHLYLPGMDHAQLVAIKTLKDYNNPQQWTEFQQEASLMAELHHPNIVCLLGAVTQEQPVCMLFEYINQGDLHEFLIMRSPHSDVGCSSDEDGTVKSSLDHGDFLHIAIQIAAGMEYLSSHFFVHKDLAARNILIGEQLHVKISDLGLSREIYSADYYRVQSKSLLPIRWMPPEAIMYGKFSSDSDIWSFGVVLWEIFSFGLQPYYGFSNQEVIEMVRKRQLLPCSEDCPPRMYSLMTECWNEIPSRRPRFKDIHVRLRSWEGLSSHTSSTTPSGGNATTQTTSLSASPVSNLSNPRYPNYMFPSQGITPQGQIAGFIGPPIPQNQRFIPINGYPIPPGYAAFPAAHYQPTGPPRVIQHCPPPKSRSPSSASGSTSTGHVTSLPSSGSNQEANIPLLPHMSIPNHPGGMGITVFGNKSQKPYKIDSKQASLLGDANIHGHTESMISAEL

SEQ ID NO: 8891 - protein, 393 aa, Homo sapiens
MHRPRRRGTRPPLLALLAALLLAARGAAAQETELSVSAELVPTSSWNISSELNKDSYLTLDEPMNNITTSLGQTAELHCKVSGNPPPTIRWFKNDAPVVQEPRRLSFRSTIYGSRLRIRNLDTTDTGYFQCVATNGKEVVSSTGVLFVKFGPPPTASPGYSDEYEEDGFCQPYRGIACARFIGNRTVYMESLHMQGEIENQITAAFTMIGTSSHLSDKCSQFAIPSLCHYAFPYCDETSSVPKPRDLCRDECEILENVLCQTEYIFARSNPMILMRLKLPNCEDLPQPESPEAANCIRIGIPMADPINKNHKCYNSTGVDYRGTVSVTKSGRQCQPWNSQYPHTHTFTALRFPELNGGHSYCRNPGNQKEAPWCFTLDENFKSDLCDIPACGK

SEQ ID NO: 8892 - protein, 562 aa, Homo sapiens
MVKIVTVKTQAYQDQKPGTSGLRKRVKVFQSSANYAENFIQSIISTVEPAQRQEATLVVGGDGRFYMKEAIQLIARIAAANGIGRLVIGQNGILSTPAVSCIIRKIKAIGGIILTASHNPGGPNGDFGIKFNISNGGPAPEAITDKIFQISKTIEEYAVCPDLKVDLGVLGKQQFDLENKFKPFTVEIVDSVEAYATMLRSIFDFSALKELLSGPNRLKIRIDAMHGVVGPYVKKILCEELGAPANSAVNCVPLEDFGGHHPDPNLTYAADLVETMKSGEHDFGAAFDGDGDRNMILGKHGFFVNPSDSVAVIAANIFSIPYFQQTGVRGFARSMPTSGALDRVASATKIALYETPTGWKFFGNLMDASKLSLCGEESFGTGSDHIREKDGLWAVLAWLSILATRKQSVEDILKDHWQKYGRNFFTRYDYEEVEAEGANKMMKDLEALMFDRSFVGKQFSANDKVYTVEKADNFEYSDPVDGSISRNQGLRLIFTDGSRIVFRLSGTGSAGATIRLYIDSYEKDVAKINQDPQVMLAPLISIALKVSQLQERTGRTAPTVIT

SEQ ID NO: 8893 - protein, 394 aa, Homo sapiens
MGCLGNSKTEDQRNEEKAQREANKKIEKQLQKDKQVYRATHRLLLLGAGESGKSTIVKQMRILHVNGFNGEGGEEDPQAARSNSDGEKATKVQDIKNNLKEAIETIVAAMSNLVPPVELANPENQFRVDYILSVMNVPDFDFPPEFYEHAKALWEDEGVRACYERSNEYQLIDCAQYFLDKIDVIKQADYVPSDQDLLRCRVLTSGIFETKFQVDKVNFHMFDVGGQRDERRKWIQCFNDVTAIIFVVASSSYNMVIREDNQTNRLQEALNLFKSIWNNRWLRTISVILFLNKQDLLAEKVLAGKSKIEDYFPEFARYTTPEDATPEPGEDPRVTRAKYFIRDEFLRISTASGDGRHYCYPHFTCAVDTENIRRVFNDCRDIIQRMHLRQYELL

SEQ ID NO: 8894 - protein, 629 aa, Homo sapiens
MAISPRSDATFSSQKSTPSESPRTKKFPLTEEEIFYMNCRAAYLTVFKSSLENIISKDQLYLALQHAGRNPSQKTINKYWTPQTAKLNFDDFCIILRKEKPTSKAELLKSFKQLDVNDDGCILHTDLYKFLTKRGEKMTREEVNAIINLADVNADGKFDYIKFCKLYMTTNEQCLKTTLEKLEVDSKLMRHQFGNHIEGSPERDPSPVPKPSPKITRKTDPETFLNKGDTRSSLLSATRKFKTSVSFTVTMGANGNRNSKLMEPNLIKDWQHMQSKGCFFLEEDGEIISHQYRMQIAQRSMVYLTIKPLNLSQVEGKPSPWLSVDTALYILKENESQANLQLVCFTELRNREVFGWTGELGPGIYWLIPSTTGCRLRKKIKPVTDEAQLVYRDETGELFLTKEFKSTLSDIFEVIDLDGNGLLSLEEYNFFELRTSGEKCDEDAWAVCRENFDTKRNELTRQGFMDLNLMEANDREGDPCDLWVTLHSMGYNKALELTEACPFVIDIYAEKCKPKIKAVHMEACSGQLEKAICKSVLSNGDAKVMDGYENIIVHTYSCDTWITSVIENKSDEKVIIHISNELSKNCINNRGLNIFAVEVGPKSTMVCQHVMPLNERQEWIYYCIYSLIS

SEQ ID NO: 8895 - protein, 380 aa, Homo sapiens
MGCLGNSKTEDQRNEEKAQREANKKIEKQLQKDKQVYRATHRLLLLGAGESGKSTIVKQMRILHVNGFNGDSEKATKVQDIKNNLKEAIETIVAAMSNLVPPVELANPENQFRVDYILSVMNVPDFDFPPEFYEHAKALWEDEGVRACYERSNEYQLIDCAQYFLDKIDVIKQADYVPSDQDLLRCRVLTSGIFETKFQVDKVNFHMFDVGGQRDERRKWIQCFNDVTAIIFVVASSSYNMVIREDNQTNRLQEALNLFKSIWNNRWLRTISVILFLNKQDLLAEKVLAGKSKIEDYFPEFARYTTPEDATPEPGEDPRVTRAKYFIRDEFLRISTASGDGRHYCYPHFTCAVDTENIRRVFNDCRDIIQRMHLRQYELL

SEQ ID NO: 8896 - protein, 183 aa, Homo sapiens
MARAHWGCCPWLVLLCACAWGHTKPVDLGGQDVRNCSTNPPYLPVTVVNTTMSLTALRQQMQTQNLSAYIIPGTDAHMNEYIGQHDERRAWITGFTGSAGTAVVTMKKAAVWTDSRYWTQAERQMDCNWELHKEVGTTPIVTWLLTEIPAGGRVGFDPFLLSIGMLFLQSLNLSMLTRVTQLP

SEQ ID NO: 8897 - protein, 674 aa, Homo sapiens
MARAHWGCCPWLVLLCACAWGHTKPVDLGGQDVRNCSTNPPYLPVTVVNTTMSLTALRQQMQTQNLSAYIIPGTDAHMNEYIGQHDERRAWITGFTGSAGTAVVTMKKAAVWTDSRYWTQAERQMDCNWELHKEVGTTPIVTWLLTEIPAGGRVGFDPFLLSIDTWESYDLALQGSNRQLVSITTNLVDLVWGSERPPVPNQPIYALQEAFTGSTWQEKVSGVRSQMQKHQKVPTAVLLSALEETAWLFNLRASDIPYNPFFYSYTLLTDSSIRLFANKSRFSSETLSYLNSSCTGPMCVQIEDYSQVRDSIQAYSLGDVRIWIGTSYTMYGIYEMIPKEKLVTDTYSPVMMTKAVKNSKEQALLKASHVRDAVAVIRYLVWLEKNVPKGTVDEFSGAEIVDKFRGEEQFSSGPSFETISASGLNAALAHYSPTKELNRKLSSDEMYLLDSGGQYWDGTTDITRTVHWGTPSAFQKEAYTRVLIGNIDLSRLIFPAATSGRMVEAFARRALWDAGLNYGHGTGHGIGNFLCVHEWPVGFQSNNIAMAKGMFTSIEPGYYKDGEFGIRLEDVALVVEAKTKYPGSYLTFEVVSFVPYDRNLIDVSLLSPEHLQYLNRYYQTIREKVGPELQRRQLLEEFEWLQQHTEPLAARAPDTASWASVLVVSTLAILGWSV

SEQ ID NO: 8898 - protein, 901 aa, Homo sapiens
MEPPLPVGAQPLATVEGMEMKGPLREPCALTLAQRNGQYELIIQLHEKEQHVQDIIPINSHFRCVQEAEETLLIDIASNSGCKIRVQGDWIRERRFEIPDEEHCLKFLSAVLAAQKAQSQLLVPEQKDSSSWYQKLDTKDKPSVFSGLLGFEDNFSSMNLDKKINSQNQPTGIHREPPPPPFSVNKMLPREKEASNKEQPKVTNTMRKLFVPNTQSGQREGLIKHILAKREKEYVNIQTFRFFVGTWNVNGQSPDSGLEPWLNCDPNPPDIYCIGFQELDLSTEAFFYFESVKEQEWSMAVERGLHSKAKYKKVQLVRLVGMMLLIFARKDQCRYIRDIATETVGTGIMGKMGNKGGVAVRFVFHNTTFCIVNSHLAAHVEDFERRNQDYKDICARMSFVVPNQTLPQLNIMKHEVVIWLGDLNYRLCMPDANEVKSLINKKDLQRLLKFDQLNIQRTQKKAFVDFNEGEIKFIPTYKYDSKTDRWDSSGKCRVPAWCDRILWRGTNVNQLNYRSHMELKTSDHKPVSALFHIGVKVVDERRYRKVFEDSVRIMDRMENDFLPSLELSRREFVFENVKFRQLQKEKFQISNNGQVPCHFSFIPKLNDSQYCKPWLRAEPFEGYLEPNETVDISLDVYVSKDSVTILNSGEDKIEDILVLHLDRGKDYFLTISGNYLPSCFGTSLEALCRMKRPIREVPVTKLIDLEEDSFLEKEKSLLQMVPLDEGASERPLQVPKEIWLLVDHLFKYACHQEDLFQTPGMQEELQQIIDCLDTSIPETIPGSNHSVAEALLIFLEALPEPVICYELYQRCLDSAYDPRICRQVISQLPRCHRNVFRYLMAFLRELLKFSEYNSVNANMIATLFTSLLLRPPPNLMARQTPSDRQRAIQFLLGFLLGSEED

SEQ ID NO: 8899 - protein, 4074 aa, Homo sapiens
MTAWLISLMSIEVLLLAVRHLSLHIEPEEGSLAGGTWITVIFDGLELGVLYPNNGSQLEIHLVNVNMVVPALRSVPCDVFPVFLDLPVVTCRTRSVLSEAHEGLYFLEAYFGGQLVSSPNPGPRDSCTFKFSKAQTPIVHQVYPPSGVPGKLIHVYGWIITGRLETFDFDAEYIDSPVILEAQGDKWVTPCSLINRQMGSCYPIQEDHGLGTLQCHVEGDYIGSQNVSFSVFNKGKSMVHKKAWLISAKQDLFLYQTHSEILSVFPETGSLGGRTNITITGDFFDNSAQVTIAGIPCDIRHVSPRKIECTTRAPGKDVRLTTPQPGNRGLLFEVGDAVEGLELTEATPGYRWQIVPNASSPFGFWSQEGQPFRARLSGFFVAPETNNYTFWIQADSQASLHFSWSEEPRTKVKVASISVGTADWFDSWEQNRDEGTWQQKTPKLELLGGAMYYLEAEHHGIAPSRGMRIGVQIHNTWLNPDVVTTYLREKHQIRVRAQRLPEVQVLNVSGRGNFFLTWDNVSSQPIPANATAHLIQTTIEELLAVKCKLEPLWSNILLRLGFERGPEVSNSDGDLTSGTEPFCGRFSLRQPRHLVLTPPAAQKGYRLDQYTHLCLAYKGHMNKILKMIVSFTIGFQNMVKNTTCDWSLTRTSPESWQFDCTDLWETCVRCFGDLQPPPANSPVLVHQINLLPLAQETGLFYVDEIIIADTNVTVSQADSGTARPGGNLVESVSVVGSPPVYSVTSWLAGCGTELPLITARSVPTEGTEEGSGLVLVTTQRRQRTSPPLGGHFRIQLPNTVISDVPVQISAHHLHQLLQNNADDFTSRYLNASDFTVKEDLYTCYEHVWTLSWSTQIGDLPNFIRVSDENLTGVNPAAATRVVYDGGVFLGPIFGDMLATANQHTQVVVRVNDVPAHCPGSCSFQYLQGSTPCVHSVWYSIDGDINLMIYITGTGFSGDSQFLQVTVNKTSCKVIFSNQTNVVCQTDLLPVGMHRILMLVRPSGLAISATGEDLFLNVKPRLDMVEPSRAADIGGLWATIRGSSLEGVSLILFGSYSCAINVATSNSSRIQCKVPPRGKDGRIVNVTVIRGDYSAVLPRAFTYVSSLNPVIVTLSRNISNIAGGETLVIGVARLMNYTDLDVEVHVQDALAPVHTQSAWGLEVALPPLPAGLHRISVSINGVSIHSQGVDLHIQYLTEVFSIEPCCGSLLGGTILSISGIGFSRDPALVWVLVGNRSCDIVNLTEASIWCETLPAPQIPDAGAPTVPAAVEVWAGNRFFARGPSPSLVGKGFTFMYEAAATPVVTAMQGEITNSSLSLHVGGSNLSNSVILLGNLNCDVETQSFQGNVSLSGCSIPLHSLEAGIYPLQVRQKQMGFANMSVVLQQFAVMPRIMAIFPSQGSACGGTILTVRGLLLNSRRRSVRVDLSGPFTCVILSLGDHTILCQVSLEGDPLPGASFSLNVTVLVNGLTSECQGNCTLFIREEASPVMDALSTNTSGSLTTVLIRGQRLATTADEPMVFVDDQLPCNVTFFNASHVVCQTRDLAPGPHYLSVFYTRNGYACSGNVSRHFYIMPQVFHYFPKNFSLHGGSLLTIEGTGLRGQNTTSVYIDQQTCLTVNIGAELIRCIVPTGNGSVALEIEVDGLWYHIGVIGYNKAFTPELISISQSDDILTFAVAQISGAANIDIFIGMSPCVGVSGNHTVLQCVVPSLPAGEYHVRGYDCIRGWASSALVFTSRVIITAVTENFGCLGGRLVHVFGAGFSPGNVSAAVCGAPCRVLANATVSAFSCLVLPLDVSLAFLCGLKREEDSCEAARHTYVQCDLTVAMATEQLLESWPYLYICEESSQCLFVPDHWAESMFPSFSGLFISPKLERDEVLIYNSSCNITMETEAEMECETPNQPITVKITEIRKRWGQNTQGNFSLQFCRRWSRTHSWFPERLPQDGDNVTVENGQLLLLDTNTSILNLLHIKGGKLIFMAPGPIELRAHAILVSDGGELRIGSEDKPFQGRAQITLYGSSYSTPFFPYGVKFLAVRNGTLSLHGSLPEVIVTCLRATAHALDTVLALEDAVDWNPGDEVVIISGTGVKGAKPMEEIVTVETVQDTDLYLKSPLRYSHNFTENWVAGEHHILKATVALLSRSITIQGNLTNEREKLLVSCQEANAPEGNLQHCLYSMSEKMLGSRDMGARVIVQSFPEEPSQVQLKGVQFQVLGQAFHKHLSSLTLVGAMRESFIQGCTVRNSFSRGLSMCGTLGLKVDSNVFYNILGHALLVGTCTEMRYISWEAIHGRKDDWSGHGNIIRNNVIIQVSGAEGLSNPEMLTPSGIYICSPTNVIEGNRVCGAGYGYFFHLMTNQTSQAPLLSFTQNIAHSCTRYGLFVYPKFQPPWDNVTGTTLFQSFTVWESAGGAQIFRSSNLRLKNFKVYSCRDFGIDVLESDANTSVTDSLLLGHFAHKGSLCMSSGIKTPKRWELMVSNTTFVNFDLINCVAIRTCSDCSQGQGGFTVKTSQLKFTNSSNLVAFPFPHAAILEDLDGSLSGKNRSHILASMETLSASCLVNSSFGRVVHGSACGGGVLFHRMSIGLANTPEVSYDLTMTDSRNKTTTVNYVRDTLSNPRGWMALLLDQETYSLQSENLWINRSLQYSATFDNFAPGNYLLLVHTDLPPYPDILLRCGSRVGLSFPFLPSPGQNQGCDWFFNSQLRQLTYLVSGEGQVQVILRVKEGMPPTISASTSAPESALKWSLPETWQGVEEGWGGYNNTIPGPGDDVLILPNRTVLVDTDLPFFKGLYVMGTLDFPVDRSNVLSVACMVIAGGELKVGTLENPLEKEQKLLILLRASEGVFCDRMNGIHIDPGTIGVYGKVHLYSAYPKNSWTHLGADIASGNERIIVEDAVDWRPHDKIVLSSSSYEPHEAEVLTVKEVKGHHVRIYERLKHRHIGSVHVTEDGRHIRLAAEVGLLTRNIQIQPDVSCRGRLFVGSFRKSSREEFSGVLQLLNVEIQNFGSPLYSSVEFSNVSAGSWIISSTLHQSCGGGIHAAASHGVLLNDNIVFGTAGHGIDLEGQAYTVTNNLVVLMTQPAWSTIWVAGIKVNQVKDINLHGNVVAGSERLGFHIRGHKCSSCELLWSDNVAHSSLHGLHLYKESGLDNCTRISGFLAFKNFDYGAMLHVENSVEIENITLVDNTIGLLAVVYVFSAPQNSVKKVQIVLRNSVIVATSSSFDCIQDKVKPHSANLTSTDRAPSNPRGGRIGILWPVFTSEPNQWPQEPWHKVRNDHSISGIMKLQDVTFSSFVKSCYSDDLDVCILPNAENSGIMHPITAERTRMLKIKDKNKFYFPSLQPRKDLGKVVCPELDCASPRKYLFKDLDGRALGLPPPVSVFPKTEAEWTASFFNAGTFREEQKCTYQFLMQGFICKQTDQVVLILDSADAIWAIQKLYPVVSVTSGFVDVFSSVNANIPCSTSGSVSTFYSILPIRQITKVCFMDQTPQVLRFFLLGNKSTSKLLLAVFYHELQSPHVFLGESFIPPTLVQSASLLLNESIGANYFNIMDNLLYVVLQGEEPIEIRSGVSIHLALTVMVSVLEKGWEIVILERLTNFLQIGQNQIRFIHEMPGHEETLKAIADSRAKRKRNCPTVTCTSHYRRVGQRRPLMMEMNSHRASPPMTVETISKVIVIEIGDSPTVRSTGMISSLSSNKLQNLAHRVITAQQTGVLENVLNMTIGALLVTQSKGVIGYGNTSSFKTGNLIYIRPYALSILVQPSDGEVGNELPVQPQLVFLDEQNRRVESLGPPSEPWTISASLEGASDSVLKGCTQAETQDGYVSFYNLAVLISGSNWHFIFTVTSPPGVNFTARSKPFAVLPVTRKEKSTIILAASLSSVASWLALSCLVCCWLKRSKSRKTKPEEIPESQTNNQNIHIHISSKRRESQGPKKEDTVVGEDMRMKVMLGKVNQCPHQLMNGVSRRKVSRHIVREEEAAVPAPGTTGITSHGHICAPGAPAQQVYLQETGNWKEGQEQLLRYQLAGQNQLLLLCPDFRQERQQLPGQSRLSKQSGSLGLSQEKKASCGATEAFCLHSVHPETIQEQL

SEQ ID NO: 8900 - protein, 1070 aa, Homo sapiens
MEQDTAAVAATVAAADATATIVVIEDEQPGPSTSQEEGAAAAATEATAATEKGEKKKEKNVSSFQLKLAAKAPKSEKEMDPEYEEKMKADRAKRFEFLLKQTELFAHFIQPSAQKSPTSPLNMKLGRPRIKKDEKQSLISAGDYRHRRTEQEEDEELLSESRKTSNVCIRFEVSPSYVKGGPLRDYQIRGLNWLISLYENGVNGILADEMGLGKTLQTIALLGYLKHYRNIPGPHMVLVPKSTLHNWMNEFKRWVPSLRVICFVGDKDARAAFIRDEMMPGEWDVCVTSYEMVIKEKSVFKKFHWRYLVIDEAHRIKNEKSKLSEIVREFKSTNRLLLTGTPLQNNLHELWALLNFLLPDVFNSADDFDSWFDTKNCLGDQKLVERLHAVLKPFLLRRIKTDVEKSLPPKKEIKIYLGLSKMQREWYTKILMKDIDVLNSSGKMDKMRLLNILMQLRKCCNHPYLFDGAEPGPPYTTDEHIVSNSGKMVVLDKLLAKLKEQGSRVLIFSQMTRLLDILEDYCMWRGYEYCRLDGQTPHEEREDKFLEVEFLGQREAIEAFNAPNSSKFIFMLSTRAGGLGINLASADVVILYDSDWNPQVDLQAMDRAHRIGQKKPVRVFRLITDNTVEERIVERAEIKLRLDSIVIQQGRLIDQQSNKLAKEEMLQMIRHGATHVFASKESELTDEDITTILERGEKKTAEMNERLQKMGESSLRNFRMDIEQSLYKFEGEDYREKQKLGMVEWIEPPKRERKANYAVDAYFREALRVSEPKIPKAPRPPKQPNVQDFQFFPPRLFELLEKEILYYRKTIGYKVPRNPDIPNPALAQREEQKKIDGAEPLTPEETEEKEKLLTQGFTNWTKRDFNQFIKANEKYGRDDIDNIAREVEGKSPEEVMEYSAVFWERCNELQDIEKIMAQIERGEARIQRRISIKKALDAKIARYKAPFHQLRIQYGTSKGKNYTEEEDRFLICMLHKMGFDRENVYEELRQCVRNAPQFRFDWFIKSRTAMEFQRRCNTLISLIEKENMEIEERERAEKKKRATKTPMSQKRKAESATESSGKKDVKKVKS

SEQ ID NO: 8901 - protein, 1054 aa, Homo sapiens
MEQDTAAVAATVAAADATATIVVIEDEQPGPSTSQEEGAAAAATEATAATEKGEKKKEKNVSSFQLKLAAKAPKSEKEMDPEYEEKMKADRAKRFEFLLKQTELFAHFIQPSAQKSPTSPLNMKLGRPRIKKDEKQSLISAGDYRHRRTEQEEDEELLSESRKTSNVCIRFEVSPSYVKGGPLRDYQIRGLNWLISLYENGVNGILADEMGLGKTLQTIALLGYLKHYRNIPGPHMVLVPKSTLHNWMNEFKRWVPSLRVICFVGDKDARAAFIRDEMMPGEWDVCVTSYEMVIKEKSVFKKFHWRYLVIDEAHRIKNEKSKLSEIVREFKSTNRLLLTGTPLQNNLHELWALLNFLLPDVFNSADDFDSWFDTKNCLGDQKLVERLHAVLKPFLLRRIKTDVEKSLPPKKEIKIYLGLSKMQREWYTKILMKDIDVLNSSGKMDKMRLLNILMQLRKCCNHPYLFDGAEPGPPYTTDEHIVSNSGKMVVLDKLLAKLKEQGSRVLIFSQMTRLLDILEDYCMWRGYEYCRLDGQTPHEEREDKFLEVEFLGQREAIEAFNAPNSSKFIFMLSTRAGGLGINLASADVVILYDSDWNPQVDLQAMDRAHRIGQKKPVRVFRLITDNTVEERIVERAEIKLRLDSIVIQQGRLIDQQSNKLAKEEMLQMIRHGATHVFASKESELTDEDITTILERGEKKTAEMNERLQKMGESSLRNFRMDIEQSLYKFEGEDYREKQKLGMVEWIEPPKRERKANYAVDAYFREALRVSEPKIPKAPRPPKQPNVQDFQFFPPRLFELLEKEILYYRKTIGYKVPRNPDIPNPALAQREEQKKIDGAEPLTPEETEEKEKLLTQGFTNWTKRDFNQFIKANEKYGRDDIDNIAREVEGKSPEEVMEYSAVFWERCNELQDIEKIMAQIERGEARIQRRISIKKALDAKIARYKAPFHQLRIQYGTSKGKNYTEEEDRFLICMLHKMGFDRENVYEELRQCVRNAPQFRFDWFIKSRTAMEFQRRCNTLISLIEKENMEIEERERAEKKKRATKTPMVKFSAFS

SEQ ID NO: 8902 - protein, 1058 aa, Homo sapiens
MEQDTAAVAATVAAADATATIVVIEDEQPGPSTSQEEGAAAAATEATAATEKGEKKKEKNVSSFQLKLAAKAPKSEKEMDPEYEEKMKADRAKRFEFLLKQTELFAHFIQPSAQKSPTSPLNMKLGRPRIKKDEKQSLISAGDYRHRRTEQEEDEELLSESRKTSNVCIRFEVSPSYVKGGPLRDYQIRGLNWLISLYENGVNGILADEMGLGKTLQTIALLGYLKHYRNIPGPHMVLVPKSTLHNWMNEFKRWVPSLRVICFVGDKDARAAFIRDEMMPGEWDVCVTSYEMVIKEKSVFKKFHWRYLVIDEAHRIKNEKSKLSEIVREFKSTNRLLLTGTPLQNNLHELWALLNFLLPDVFNSADDFDSWFDTKNCLGDQKLVERLHAVLKPFLLRRIKTDVEKSLPPKKEIKIYLGLSKMQREWYTKILMKDIDVLNSSGKMDKMRLLNILMQLRKCCNHPYLFDGAEPGPPYTTDEHIVSNSGKMVVLDKLLAKLKEQGSRVLIFSQMTRLLDILEDYCMWRGYEYCRLDGQTPHEEREEAIEAFNAPNSSKFIFMLSTRAGGLGINLASADVVILYDSDWNPQVDLQAMDRAHRIGQKKPVRVFRLITDNTVEERIVERAEIKLRLDSIVIQQGRLIDQQSNKLAKEEMLQMIRHGATHVFASKESELTDEDITTILERGEKKTAEMNERLQKMGESSLRNFRMDIEQSLYKFEGEDYREKQKLGMVEWIEPPKRERKANYAVDAYFREALRVSEPKIPKAPRPPKQPNVQDFQFFPPRLFELLEKEILYYRKTIGYKVPRNPDIPNPALAQREEQKKIDGAEPLTPEETEEKEKLLTQGFTNWTKRDFNQFIKANEKYGRDDIDNIAREVEGKSPEEVMEYSAVFWERCNELQDIEKIMAQIERGEARIQRRISIKKALDAKIARYKAPFHQLRIQYGTSKGKNYTEEEDRFLICMLHKMGFDRENVYEELRQCVRNAPQFRFDWFIKSRTAMEFQRRCNTLISLIEKENMEIEERERAEKKKRATKTPMSQKRKAESATESSGKKDVKKVKS

SEQ ID NO: 8903 - protein, 460 aa, Homo sapiens
MFTIKLLLFIVPLVISSRIDQDNSSFDSLSPEPKSRFAMLDDVKILANGLLQLGHGLKDFVHKTKGQINDIFQKLNIFDQSFYDLSLQTSEIKEEEKELRRTTYKLQVKNEEVKNMSLELNSKLESLLEEKILLQQKVKYLEEQLTNLIQNQPETPEHPEVTSLKTFVEKQDNSIKDLLQTVEDQYKQLNQQHSQIKEIENQLRRTSIQEPTEISLSSKPRAPRTTPFLQLNEIRNVKHDGIPAECTTIYNRGEHTSGMYAIRPSNSQVFHVYCDVISGSPWTLIQHRIDGSQNFNETWENYKYGFGRLDGEFWLGLEKIYSIVKQSNYVLRIELEDWKDNKHYIEYSFYLGNHETNYTLHLVAITGNVPNAIPENKDLVFSTWDHKAKGHFNCPEGYSGGWWWHDECGENNLNGKYNKPRAKSKPERRRGLSWKSQNGRLYSIKSTKMLIHPTDSESFE

SEQ ID NO: 8904 - protein, 304 aa, Homo sapiens
MATRRLTDAFLLLRNNSIQNRQLLAEQLADDRMALVSGISLDPEAAIGVTKRPPPKWVDGVDEIQYDVGRIKQKMKELASLHDKHLNRPTLDDSSEEEHAIEITTQEITQLFHRCQRAVQALPSRARACSEQEGRLLGNVVASLAQALQELSTSFRHAQSGYLKRMKNREERSQHFFDTSVPLMDDGDDNTLYHRGFTEDQLVLVEQNTLMVEEREREIRQIVQSISDLNEIFRDLGAMIVEQGTVLDRIDYNVEQSCIKTEDGLKQLHKAEQYQKKNRKMLVILILFVIIIVLIVVLVGVKSR

SEQ ID NO: 8905 - protein, 325 aa, Homo sapiens
MATRRLTDAFLLLRNNSIQNRQLLAEQVSSHITSSPLHSRSIAAELDELADDRMALVSGISLDPEAAIGVTKRPPPKWVDGVDEIQYDVGRIKQKMKELASLHDKHLNRPTLDDSSEEEHAIEITTQEITQLFHRCQRAVQALPSRARACSEQEGRLLGNVVASLAQALQELSTSFRHAQSGYLKRMKNREERSQHFFDTSVPLMDDGDDNTLYHRGFTEDQLVLVEQNTLMVEEREREIRQIVQSISDLNEIFRDLGAMIVEQGTVLDRIDYNVEQSCIKTEDGLKQLHKAEQYQKKNRKMLVILILFVIIIVLIVVLVGVKSR

SEQ ID NO: 8906 - protein, 589 aa, Homo sapiens
MRPLPGALGVAAAAALWLLLLLLPRTRADEHEHTYQDKEEVVLWMNTVGPYHNRQETYKYFSLPFCVGSKKSISHYHETLGEALQGVELEFSGLDIKFKDDVMPATYCEIDLDKEKRDAFVYAIKNHYWYQMYIDDLPIWGIVGEADENGEDYYLWTYKKLEIGFNGNRIVDVNLTSEGKVKLVPNTKIQMSYSVKWKKSDVKFEDRFDKYLDPSFFQHRIHWFSIFNSFMMVIFLVGLVSMILMRTLRKDYARYSKEEEMDDMDRDLGDEYGWKQVHGDVFRPSSHPLIFSSLIGSGCQIFAVSLIVIIVAMIEDLYTERGSMLSTAIFVYAATSPVNGYFGGSLYARQGGRRWIKQMFIGAFLIPAMVCGTAFFINFIAIYYHASRAIPFGTMVAVCCICFFVILPLNLVGTILGRNLSGQPNFPCRVNAVPRPIPEKKWFMEPAVIVCLGGILPFGSIFIEMYFIFTSFWAYKIYYVYGFMMLVLVILCIVTVCVTIVCTYFLLNAEDYRWQWTSFLSAASTAIYVYMYSFYYYFFKTKMYGLFQTSFYFGYMAVFSTALGIMCGAIGYMGTSAFVRKIYTNVKID

SEQ ID NO: 8907 - protein, 67 aa, Homo sapiens
MKIQLFFFILHFWVTILPAKKKYPEYGSLDLRRECRIGNGQCKNQCHENEIRIAYCIRPGTHCCLQQ

SEQ ID NO: 8908 - protein, 501 aa, Homo sapiens
MPAAMLPYACVLVLLGAHTAPAAGEAGGSCLRWEPHCQQPLPDRVPSTAILPPRLNGPWISTGCEVRPGPEFLTRAYTFYPSRLFRAHQFYYEDPFCGEPAHSLLVKGKVRLRRASWVTRGATEADYHLHKVGIVFHSRRALVDVTGRLNQTRAGRDCARRLPPARAWLPGALYELRSARAQGDCLEALGLTMHELSLVRVQRRLQPQPRASPRLVEELYLGDIHTDPAERRHYRPTGYQRPLQSALHHVQPCPACGLIARSDVHHPPVLPPPLALPLHLGGWWVSSGCEVRPAVLFLTRLFTFHGHSRSWEGYYHHFSDPACRQPTFTVYAAGRYTRGTPSTRVRGGTELVFEVTRAHVTPMDQVTTAMLNFSEPSSCGGAGAWSMGTERDVTATNGCLPLGIRLPHVEYELFKMEQDPLGQSLLFIGQRPTDGSSPDTPEKRPTSYQAPLVLCHGEAPDFSRPPQHRPSLQKHPSTGGLHIAPFPLLPLVLGLAFLHWL

SEQ ID NO: 8909 - protein, 498 aa, Homo sapiens
MYSPLCLTQDEFHPFIEALLPHVRAFAYTWFNLQARKRKYFKKHEKRMSKEEERAVKDELLSEKPEVKQKWASRLLAKLRKDIRPEYREDFVLTVTGKKPPCCVLSNPDQKGKMRRIDCLRQADKVWRLDLVMVILFKGIPLESTDGERLVKSPQCSNPGLCVQPHHIGVSVKELDLYLAYFVHAADSSQSESPSQPSDADIKDQPENGHLGFQDSFVTSGVFSVTELVRVSQTPIAAGTGPNFSLSDLESSSYYSMSPGAMRRSLPSTSSTSSTKRLKSVEDEMDSPGEEPFYTGQGRSPGSGSQSSGWHEVEPGMPSPTTLKKSEKSGFSSPSPSQTSSLGTAFTQHHRPVITGPRASPHATPSTLHFPTSPIIQQPGPYFSHPAIRYHPQETLKEFVQLVCPDAGQQAGQVGFLNPNGSSQGKVHNPFLPTPMLPPPPPPPMARPVPLPVPDTKPPTTSTEGGAASPTSPILVPGIKVAASHHPPDRPPDPFSTL

SEQ ID NO: 8910 - protein, 443 aa, Homo sapiens
MRTPQLALLQVFFLVFPDGVRPQPSSSPSGAVPTSLELQRGTDGGTLQSPSEATATRPAVPGLPTVVPTLVTPSAPGNRTVDLFPVLPICVCDLTPGACDINCCCDRDCYLLHPRTVFSFCLPGSVRSSSWVCVDNSVIFRSNSPFPSRVFMDSNGIRQFCVHVNNSNLNYFQKLQKVNATNFQALAAEFGGESFTSTFQTQSPPSFYRAGDPILTYFPKWSVISLLRQPAGVGAGGLCAESNPAGFLESKSTTCTRFFKNLASSCTLDSALNAASYYNFTVLKVPRSMTDPQNMEFQVPVILTSQANAPLLAGNTCQNVVSQVTYEIETNGTFGIQKVSVSLGQTNLTVEPGASLQQHFILRFRAFQQSTAASLTSPRSGNPGYIVGKPLLALTDDISYSVSFLELGGLLQPNEKSCKGFQTYVRLAKGEEFFVHYNEVLIY

SEQ ID NO: 8911 - protein, 607 aa, Homo sapiens
MRTPQLALLQVFFLVFPDGVRPQPSSSPSGAVPTSLELQRGTDGGTLQSPSEATATRPAVPGLPTVVPTLVTPSAPGNRTVDLFPVLPICVCDLTPGACDINCCCDRDCYLLHPRTVFSFCLPGSVRSSSWVCVDNSVIFRSNSPFPSRVFMDSNGIRQFCVHVNNSNLNYFQKLQKVNATNFQALAAEFGGESFTSTFQTQSPPSFYRAGDPILTYFPKWSVISLLRQPAGVGAGGLCAESNPAGFLESKSTTCTRFFKNLASSCTLDSALNAASYYNFTVLKVPRSMTDPQNMEFQVPVILTSQANAPLLAGNTCQNVVSQVTYEIETNGTFGIQKVSVSLGQTNLTVEPGASLQQHFILRFRAFQQSTAASLTSPRSGNPGYIVGKPLLALTDDISYSMTLLQSQGNGSCSVKRHEVQFGVNAISGCKLRLKKADCSHLQQEIYQTLHGRPRPEYVAIFGNADPAQKGGWTRILNRHCSISAINCTSCCLIPVSLEIQVLWAYVGLLSNPQAHVSGVRFLYQCQSIQDSQQVTEVSLTTLVNFVDITQKPQPPRGQPKMDWKWPFDFFPFKVAFSRGVFSQKCSVSPILILCLLLLGVLNLETM

SEQ ID NO: 8912 - protein, 793 aa, Homo sapiens
MLSQVYRCGFQPFNQHLLPWVKCTTVFRSHCIQPSVIRHVRSWSNIPFITVPLSRTHGKSFAHRSELKHAKRIVVKLGSAVVTRGDECGLALGRLASIVEQVSVLQNQGREMMLVTSGAVAFGKQRLRHEILLSQSVRQALHSGQNQLKEMAIPVLEARACAAAGQSGLMALYEAMFTQYSICAAQILVTNLDFHDEQKRRNLNGTLHELLRMNIVPIVNTNDAVVPPAEPNSDLQGVISVKDNDSLAARLAVEMKTDLLIVLSDVEGLFDSPPGSDDAKLIDIFYPGDQQSVTFGTKSRVGMGGMEAKVKAALWALQGGTSVVIANGTHPKVSGHVITDIVEGKKVGTFFSEVKPAGPTVEQQGEMARSGGRMLATLEPEQRAEIIHHLADLLTDQRDEILLANKKDLEEAEGRLAAPLLKRLSLSTSKLNSLAIGLRQIAASSQDSVGRVLRRTRIAKNLELEQVTVPIGVLLVIFESRPDCLPQVAALAIASGNGLLLKGGKEAAHSNRILHLLTQEALSIHGVKEAVQLVNTREEVEDLCRLDKMIDLIIPRGSSQLVRDIQKAAKGIPVMGHSEGICHMYVDSEASVDKVTRLVRDSKCEYPAACNALETLLIHRDLLRTPLFDQIIDMLRVEQVKIHAGPKFASYLTFSPSEVKSLRTEYGDLELCIEVVDNVQDAIDHIHKYGSSHTDVIVTEDENTAEFFLQHVDSACVFWNASTRFSDGYRFGLGAEVGISTSRIHARGPVGLEGLLTTKWLLRGKDHVVSDFSEHGSLKYLHENLPIPQRNTN

SEQ ID NO: 8913 - protein, 331 aa, Homo sapiens
MTAKMETTFYDDALNASFLPSESGPYGYSNPKILKQSMTLNLADPVGSLKPHLRAKNSDLLTSPDVGLLKLASPELERLIIQSSNGHITTTPTPTQFLCPKNVTDEQEGFAEGFVRALAELHSQNTLPSVTSAAQPVNGAGMVAPAVASVAGGSGSGGFSASLHSEPPVYANLSNFNPGALSSGGGAPSYGAAGLAFPAQPQQQQQPPHHLPQQMPVQHPRLQALKEEPQTVPEMPGETPPLSPIDMESQERIKAERKRMRNRIAASKCRKRKLERIARLEEKVKTLKAQNSELASTANMLREQVAQLKQKVMNHVNSGCQLMLTQQLQTF

SEQ ID NO: 8914 - protein, 795 aa, Homo sapiens [sequence omitted]

SEQ ID NO: 8915 - protein, 323 aa, Homo sapiens
MARGPGLAPPPLRLPLLLLVLAAVTGHTAAQDNCTCPTNKMTVCSPDGPGGRCQCRALGSGMAVDCSTLTSKCLLLKARMSAPKNARTLVRPSEHALVDNDGLYDPDCDPEGRFKARQCNQTSVCWCVNSVGVRRTDKGDLSLRCDELVRTHHILIDLRHRPTAGAFNHSDLDAELRRLFRERYRLHPKFVAAVHYEQPTIQIELRQNTSQKAAGDVDIGDAAYYFERDIKGESLFQGRGGLDLRVRGEPLQVERTLIYYLDEIPPKFSMKRLTAGLIAVIVVVVVALVAGMAVLVITNRRKSGKYKKVEIKELGELRKEPSL

SEQ ID NO: 8916 - protein, 591 aa, Homo sapiens
MKNSRTWAWRAPVELFLLCAALGCLSLPGSRGERPHSFGSNAVNKSFAKSRQMRSVDVTLMPIDCELSSWSSWTTCDPCQKKRYRYAYLLQPSQFHGEPCNFSDKEVEDCVTNRPCGSQVRCEGFVCAQTGRCVNRRLLCNGDNDCGDQSDEANCRRIYKKCQHEMDQYWGIGSLASGINLFTNSFEGPVLDHRYYAGGCSPHYILNTRFRKPYNVESYTPQTQGKYEFILKEYESYSDFERNVTEKMASKSGFSFGFKIPGIFELGISSQSDRGKHYIRRTKRFSHTKSVFLHARSDLEVAHYKLKPRSLMLHYEFLQRVKRLPLEYSYGEYRDLFRDFGTHYITEAVLGGIYEYTLVMNKEAMERGDYTLNNVHACAKNDFKIGGAIEEVYVSLGVSVGKCRGILNEIKDRNKRDTMVEDLVVLVRGGASEHITTLAYQELPTADLMQEWGDAVQYNPAIIKVKVEPLYELVTATDFAYSSTVRQNMKQALEEFQKEVSSCHCAPCQGNGVPVLKGSRCDCICPVGSQGLACEVSYRKNTPIDGKWNCWSNWSSCSGRRKTRQRQCNNPPPQNGGSPCSGPASETLDCS

SEQ ID NO: 8917 - protein, 368 aa, Homo sapiens
MSLFGTTSGFGTSGTSMFGSATTDNHNPMKDIEVTSSPDDSIGCLSFSPPTLPGNFLIAGSWANDVRCWEVQDSGQTIPKAQQMHTGPVLDVCWSDDGSKVFTASCDKTAKMWDLSSNQAIQIAQHDAPVKTIHWIKAPNYSCVMTGSWDKTLKFWDTRSSNPMMVLQLPERCYCADVIYPMAVVATAERGLIVYQLENQPSEFRRIESPLKHQHRCVAIFKDKQNKPTGFALGSIEGRVAIHYINPPNPAKDNFTFKCHRSNGTNTSAPQDIYAVNGIAFHPVHGTLATVGSDGRFSFWDKDARTKLKTSEQLDQPISACCFNHNGNIFAYASSYDWSKGHEFYNPQKKNYIFLRNAAEELKPRNKK

SEQ ID NO: 8918 - protein, 218 aa, Homo sapiens
MKVGVLWLISFFTFTDGHGGFLGKNDGIKTKKELIVNKKKHLGPVEEYQLLLQVTYRDSKEKRDLRNFLKLLKPPLLWSHGLIRIIRAKATTDCNSLNGVLQCTCEDSYTWFPPSCLDPQNCYLHTAGALPSCECHLNNLSQSVNFCERTKIWGTFKINERFTNDLLNSSSAIYSKYANGIEIQLKKAYERIQGFESVQVTQFRMSLLSPKLECNGTI

SEQ ID NO: 8919 - protein, 184 aa, Homo sapiens
MQSGCVLELRNAGLVACLALITVFVAECCYGDSCQTQNVQLNKEMTLASNRSLAEGNLLYQPQLDTLKARLTQKYQELQVLFEAYQIKKTKLDRQSSSASLETLLALLQAEGAKIEEDTENMAEKFLDGELPLDSFIDVYQSKRKLAHMRRVKIEKLQEMVLKGQRLPQALAPLPPRLPELAPT

SEQ ID NO: 8920 - protein, 311 aa, Homo sapiens
MQNYKYDKAIVPESKNGGSPALNNNPRRSGSKRVLLICLDLFCLFMAGLPFLIIETSTIKPYHRGFYCNDESIKYPLKTGETINDAVLCAVGIVIAILAIITGEFYRIYYLKKSRSTIQNPYVAALYKQVGCFLFGCAISQSFTDIAKVSIGRLRPHFLSVCNPDFSQINCSEGYIQNYRCRGDDSKVQEARKSFFSGHASFSMYTMLYLVLYLQARFTWRGARLLRPLLQFTLIMMAFYTGLSRVSDHKHHPSDVLAGFAQGALVACCIVFFVSDLFKTKTTLSLPAPAIRKEILSPVDIIDRNNHHNMM

SEQ ID NO: 8921 - protein, 910 aa, Homo sapiens
MKVGVLWLISFFTFTDGHGGFLGKNDGIKTKKELIVNKKKHLGPVEEYQLLLQVTYRDSKEKRDLRNFLKLLKPPLLWSHGLIRIIRAKATTDCNSLNGVLQCTCEDSYTWFPPSCLDPQNCYLHTAGALPSCECHLNNLSQSVNFCERTKIWGTFKINERFTNDLLNSSSAIYSKYANGIEIQLKKAYERIQGFESVQVTQFRNGSIVAGYEVVGSSSASELLSAIEHVAEKAKTALHKLFPLEDGSFRVFGKAQCNDIVFGFGSKDDEYTLPCSSGYRGNITAKCESSGWQVIRETCVLSLLEELNKNFSMIVGNATEAAVSSFVQNLSVIIRQNPSTTVGNLASVVSILSNISSLSLASHFRVSNSTMEDVISIADNILNSASVTNWTVLLREEKYASSRLLETLENISTLVPPTALPLNFSRKFIDWKGIPVNKSQLKRGYSYQIKMCPQNTSIPIRGRVLIGSDQFQRSLPETIISMASLTLGNILPVSKNGNAQVNGPVISTVIQNYSINEVFLFFSKIESNLSQPHCVFWDFSHLQWNDAGCHLVNETQDIVTCQCTHLTSFSILMSPFVPSTIFPVVKWITYVGLGISIGSLILCLIIEALFWKQIKKSQTSHTRRICMVNIALSLLIADVWFIVGATVDTTVNPSGVCTAAVFFTHFFYLSLFFWMLMLGILLAYRIILVFHHMAQHLMMAVGFCLGYGCPLIISVITIAVTQPSNTYKRKDVCWLNWSNGSKPLLAFVVPALAIVAVNFVVVLLVLTKLWRPTVGERLSRDDKATIIRVGKSLLILTPLLGLTWGFGIGTIVDSQNLAWHVIFALLNAFQGFFILCFGILLDSKLRQLLFNKLSALSSWKQTEKQNSSDLSAKPKFSKPFNPLQNKGHYAFSHTGDSSDNIMLTQFVSNE

SEQ ID NO: 8922 - protein, 329 aa, Homo sapiens
MTTQQIDLQGPGPWGFRLVGGKDFEQPLAISRVTPGSKAALANLCIGDVITAIDGENTSNMTHLEAQNRIKGCTDNLTLTVARSEHKVWSPLVTEEGKRHPYKMNLASEPQEVLHIGSAHNRSAMPFTASPASSTTARVITNQYNNPAGLYSSENISNFNNALESKTAASGVEANSRPLDHAQPPSSLVIDKESEVYKMLQEKQELNEPPKQSTSFLVLQEILESEEKGDPNKPSGFRSVKAPVTKVAASIGNAQKLPMCDKCGTGIVGVFVKLRDRHRHPECYVCTDCGTNLKQKGHFFVEDQIYCEKHARERVTPPEGYEVVTVFPK

SEQ ID NO: 8923 - protein, 516 aa, Homo sapiens
MEPAVSLAVCALLFLLWVRLKGLEFVLIHQRWVFVCLFLLPLSLIFDIYYYVRAWVVFKLSSAPRLHEQRVRDIQKQVREWKEQGSKTFMCTGRPGWLTVSLRVGKYKKTHKNIMINLMDILEVDTKKQIVRVEPLVTMGQVTALLTSIGWTLPVLPELDDLTVGGLIMGTGIESSSHKYGLFQHICTAYELVLADGSFVRCTPSENSDLFYAVPWSCGTLGFLVAAEIRIIPAKKYVKLRFEPVRGLEAICAKFTHESQRQENHFVEGLLYSLDEAVIMTGVMTDEAEPSKLNSIGNYYKPWFFKHVENYLKTNREGLEYIPLRHYYHRHTRSIFWELQDIIPFGNNPIFRYLFGWMVPPKISLLKLTQGETLRKLYEQHHVVQDMLVPMKCLQQALHTFQNDIHVYPIWLCPFILPSQPGLVHPKGNEAELYIDIGAYGEPRVKHFEARSCMRQLEKFVRSVHGFQMLYADCYMNREEFWEMFDGSLYHKLREKLGCQDAFPEVYDKICKAARH

SEQ ID NO: 8924 - protein, 490 aa, Homo sapiens
MEPFVVLVLCLSFMLLFSLWRQSCRRRKLPPGPTPLPIIGNMLQIDVKDICKSFTNFSKVYGPVFTVYFGMNPIVVFHGYEAVKEALIDNGEEFSGRGNSPISQRITKGLGIISSNGKRWKEIRRFSLTTLRNFGMGKRSIEDRVQEEAHCLVEELRKTKASPCDPTFILGCAPCNVICSVVFQKRFDYKDQNFLTLMKRFNENFRILNSPWIQVCNNFPLLIDCFPGTHNKVLKNVALTRSYIREKVKEHQASLDVNNPRDFIDCFLIKMEQEKDNQKSEFNIENLVGTVADLFVAGTETTSTTLRYGLLLLLKHPEVTAKVQEEIDHVIGRHRSPCMQDRSHMPYTDAVVHEIQRYSDLVPTGVPHAVTTDTKFRNYLIPKGTTIMALLTSVLHDDKEFPNPNIFDPGHFLDKNGNFKKSDYFMPFSAGKRICAGEGLARMELFLFLTTILQNFNLKSVDDLKNLNTTAVTKGIVSLPPSYQICFIPV

SEQ ID NO: 8925 - protein, 387 aa, Homo sapiens
MEQPGQDPTSDDVMDSFLEKFQSQPYRGGFHEDQWEKEFEKVPLFMSRAPSEIDPRENPDLACLQSIIFDEERSPEEQAKTYKDEGNDYFKEKDYKKAVISYTEGLKKKCADPDLNAVLYTNRAAAQYYLGNFRSALNDVTAARKLKPCHLKAIIRGALCHLELKHFAEAVNWCDEGLQIDAKEKKLLEMRAKADKLKRIEQRDVRKANLKEKKERNQNEALLQAIKARNIRLSEAACEDEDSASEGLGELFLDGLSTENPHGARLSLDGQGRLSWPVLFLYPEYAQSDFISAFHEDSRFIDHLMVMFGETPSWDLEQKYCPDNLEVYFEDEDRAELYRVPAKSTLLQVLQHQRYFVKALTPAFLVCVGSSPFCKNFLRGRKVYQIR

SEQ ID NO: 8926 - protein, 182 aa, Homo sapiens
MGKGRFDEKENVSNCIQLKTSVIKGIKNQLIEQFPGIEPWLNQIMPKKDPVKIVRCHEHIEILTVNGELLFFRQREGPFYPTLRLLHKYPFILPHQQVDKGAIKFVLSGANIMCPGLTSPGAKLYPAAVDTIVAIMAEGKQHALCVGVMKMSAEDIEKVNKGIGIENIHYLNDGLWHMKTYK

SEQ ID NO: 8927 - protein, 181 aa, Homo sapiens
MFKKFDEKENVSNCIQLKTSVIKGIKNQLIEQFPGIEPWLNQIMPKKDPVKIVRCHEHIEILTVNGELLFFRQREGPFYPTLRLLHKYPFILPHQQVDKGAIKFVLSGANIMCPGLTSPGAKLYPAAVDTIVAIMAEGKQHALCVGVMKMSAEDIEKVNKGIGIENIHYLNDGLWHMKTYK

SEQ ID NO: 8928 - protein, 490 aa, Homo sapiens
MDPFVVLVLCLSCLLLLSIWRQSSGRGKLPPGPTPLPVIGNILQIDIKDVSKSLTNLSKIYGPVFTLYFGLERMVVLHGYEVVKEALIDLGEEFSGRGHFPLAERANRGFGIVFSNGKRWKEIRRFSLMTLRNFGMGKRSIEDRVQEEARCLVEELRKTKASPCDPTFILGCAPCNVICSIIFQKRFDYKDQQFLNLMEKLNENIRIVSTPWIQICNNFPTIIDYFPGTHNKLLKNLAFMESDILEKVKEHQESMDINNPRDFIDCFLIKMEKEKQNQQSEFTIENLVITAADLLGAGTETTSTTLRYALLLLLKHPEVTAKVQEEIERVIGRNRSPCMQDRGHMPYTDAVVHEVQRYIDLIPTSLPHAVTCDVKFRNYLIPKGTTILTSLTSVLHDNKEFPNPEMFDPRHFLDEGGNFKKSNYFMPFSAGKRICVGEGLARMELFLFLTFILQNFNLKSLIDPKDLDTTPVVNGFASVPPFYQLCFIPV

SEQ ID NO: 8929 - protein, 895 aa, Homo sapiens
MFPTGFSSPSPSAAAAAQEVRSATDGNTSTTPPTSAKKRKLNSSSSSSSNSSNEREDFDSTSSSSSTPPLQPRDSASPSTSSFCLGVSVAASSHVPIQKKLRFEDTLEFVGFDAKMAEESSSSSSSSSPTAATSQQQQLKNKSILISSVASVHHANGLAKSSTTVSSFANSKPGSAKKLVIKNFKDKPKLPENYTDETWQKLKEAVEAIQNSTSIKYNLEELYQAVENLCSYKISANLYKQLRQICEDHIKAQIHQFREDSLDSVLFLKKIDRCWQNHCRQMIMIRSIFLFLDRTYVLQNSMLPSIWDMGLELFRAHIISDQKVQNKTIDGILLLIERERNGEAIDRSLLRSLLSMLSDLQIYQDSFEQRFLEETNRLYAAEGQKLMQEREVPEYLHHVNKRLEEEADRLITYLDQTTQKSLIATVEKQLLGEHLTAILQKGLNNLLDENRIQDLSLLYQLFSRVRGGVQVLLQQWIEYIKAFGSTIVINPEKDKTMVQELLDFKDKVDHIIDICFLKNEKFINAMKEAFETFINKRPNKPAELIAKYVDSKLRAGNKEATDEELEKMLDKIMIIFRFIYGKDVFEAFYKKDLAKRLLVGKSASVDAEKSMLSKLKHECGAAFTSKLEGMFKDMELSKDIMIQFKQYMQNQNVPGNIELTVNILTMGYWPTYVPMEVHLPPEMVKLQEIFKTFYLGKHSGRKLQWQSTLGHCVLKAEFKEGKKELQVSLFQTLVLLMFNEGEEFSLEEIKQATGIEDGELRRTLQSLACGKARVLAKNPKGKDIEDGDKFICNDDFKHKLFRIKINQIQMKETVEEQASTTERVFQDRQYQIDAAIVRIMKMRKTLSHNLLVSEVYNQLKFPVKPADLKKRIESLIDRDYMERDKENPNQYNYIA

SEQ ID NO: 8930 - protein, 717 aa, Homo sapiens
MIDPDFADKPKLPENYTDETWQKLKEAVEAIQNSTSIKYNLEELYQAVENLCSYKISANLYKQLRQICEDHIKAQIHQFREDSLDSVLFLKKIDRCWQNHCRQMIMIRSIFLFLDRTYVLQNSMLPSIWDMGLELFRAHIISDQKVQNKTIDGILLLIERERNGEAIDRSLLRSLLSMLSDLQIYQDSFEQRFLEETNRLYAAEGQKLMQEREVPEYLHHVNKRLEEEADRLITYLDQTTQKSLIATVEKQLLGEHLTAILQKGLNNLLDENRIQDLSLLYQLFSRVRGGVQVLLQQWIEYIKAFGSTIVINPEKDKTMVQELLDFKDKVDHIIDICFLKNEKFINAMKEAFETFINKRPNKPAELIAKYVDSKLRAGNKEATDEELEKMLDKIMIIFRFIYGKDVFEAFYKKDLAKRLLVGKSASVDAEKSMLSKLKHECGAAFTSKLEGMFKDMELSKDIMIQFKQYMQNQNVPGNIELTVNILTMGYWPTYVPMEVHLPPEMVKLQEIFKTFYLGKHSGRKLQWQSTLGHCVLKAEFKEGKKELQVSLFQTLVLLMFNEGEEFSLEEIKQATGIEDGELRRTLQSLACGKARVLAKNPKGKDIEDGDKFICNDDFKHKLFRIKINQIQMKETVEEQASTTERVFQDRQYQIDAAIVRIMKMRKTLSHNLLVSEVYNQLKFPVKPADLKKRIESLIDRDYMERDKENPNQYNYIA

SEQ ID NO: 8931 - protein, 449 aa, Homo sapiens
MLAEWGACLLLAVALLGPGLQAQAMEGVKCGGVLSAPSGNFSSPNFPRLYPYNTECSWLIVVAEGSSVLLTFHAFDLEYHDTCSFDFLEIYNGASPDKGNLLGRFCGKVPPPPFTSSWHVMSVIFHSDKHVASHGFSAGYQKDVCGGVLTGLSGVLTSPEYPNNYPNSMECHWVIRAAGPAHVKLVFVDFQVEGNEECTYDYVAVLGGPGPTRGHHYCGSTRPPTLVSLGHELQVVFKSDFNIGGRGFKAYYFSGECQEVYMAMRGNFSSPQYPSSYPNNIRCHWTIRLPPGYQVKVFFLDLDLEEPNSLTKTCDFDHLAAFDGASEEAPLLGNWCGHHLPPPVTSSHNQLLLLLHTDRSTTRRGFSVAYIGGQLGCGSGSTEGEGEALQPQSLQSPSSIPPVCPAPPMNGLLQLLLHWLHPCPLSGPLRLDGTAPACFHYCRASFPSF

SEQ ID NO: 8932 - protein, 410 aa, Homo sapiens
MVCFRLFPVPGSGLVLVCLVLGAVRSYALELNLTDSENATCLYAKWQMNFTVRYETTNKTYKTVTISDHGTVTYNGSICGDDQNGPKIAVQFGPGFSWIANFTKAASTYSIDSVSFSYNTGDNTTFPDAEDKGILTVDELLAIRIPLNDLFRCNSLSTLEKNDVVQHYWDVLVQAFVQNGTVSTNEFLCDKDKTSTVAPTIHTTVPSPTTTPTPKEKPEAGTYSVNNGNDTCLLATMGLQLNITQDKVASVININPNTTHSTGSCRSHTALLRLNSSTIKYLDFVFAVKNENRFYLKEVNISMYLVNGSVFSIANNNLSYWDAPLGSSYMCNKEQTVSVSGAFQINTFDLRVQPFNVTQGKYSTAQECSLDDDTILIPIIVGAGLSGLIIVIVIAYVIGRRKSYAGYQTL

SEQ ID NO: 8933 - protein, 145 aa, Homo sapiens
MAAPKGSLWVRTQLGLPPLLLLTMALAGGSGTASAEAFDSVLGDTASCHRACQLTYPLHTYPKEEELYACQRGCRLFSICQFVDDGIDLNRTKLECESACTEAYSQSDEQYACHLGCQNQLPFAELRQEQVRNNTAFQTSLLRWH

SEQ ID NO: 8934 - protein, 800 aa, Homo sapiens
MKARRNKKQIPSFRKLIKTSKVKLENKLKNKQFKQQSTLKKYRKEQRKLRQAVKDAVSKKPIPLENPKEKRPGKRIEREEEEEEEALPLDMMDEDDLQLMKDLGQRVSFLTRDLSSSEPVHAKKRKHERIIDKYEKIPRTLQTAPEKELIHLLPIKDKSGIIPQTREKPVTDSNKDEEDQEEERELEEEIIEDPIQELTIEEHLIERKKKLQEKKMHIAALASAILSDPENNIKKLKELRSMLMEQDPDVAVTVRKLVIVSLMELFKDITPSYKIRPLTEAEKSTKTRKETQKLREFEEGLVSQYKFYLENLEQMVKDWKQRKLKKSNVVSLKAYKGLAEVAVKSLCELLVALPHFNFHNNIIVLIVPLMNDMSKLISEMCCEAVKKLFKQDKLGQASLGVIKVISGFVKGRNYEVRPEMLKTFLCLRIKEVEVKKDTEDINKPKKFMTFKEKRKSLSRMQRKWKKAEEKLERELREAEASESTEKKLKLHTETLNIVFVTYFRILKKAQRSPLLPAVLEGLAKFAHLINVEFFDDLLVVLHTLIESGDLSYQESLHCVQTAFHILSGQGDVLNIDPLKFYTHLYKTLFKLHAGATNEGVEIVLQCLDVMLTKRRKQVSQQRALAFIKRLCTLALHVLPNSSIGILATTRILMHTFPKTDLLLDSESQGSGVFLPELDEPEYCNAQNTALWELHALRRHYHPIVQRFAAHLIAGAPSEGSGALKPELSRRSATELFEAYSMAEMTFNPPVESSNPKIKGKFLQGDSFLNEDLNQLIKRYSSEVATESPLDFTKYLKTSLH

SEQ ID NO: 8935 - protein, 2302 aa, Homo sapiens
MTSEEMTASVLIPVTQRKVVSAQSAADESSEKVSDINISKAHTVRRSGETSHTISQLNKLKEEPSGSNLPKILSIAREKIVSDENSNEKCWEKIMPDSAKNLNINCNNILRNHQHGLPQRQFYEMYNSVAEEDLCLETGIPSPLERKVFPGIQLELDRPSMGISPLGNQSVIIETGRAHPDSRRAVFHFHYEVDRRMSDTFCTLSENLILDDCGNCVPLPGGEEKQKKNYVAYTCKLMELAKNCDNKNEQLQCDHCDTLNDKYFCFEGSCEKVDMVYSGDSFCRKDFTDSQAAKTFLSHFEDFPDNCDDVEEDAFKSKKERSTLLVRRFCKNDREVKKSVYTGTRAIVRTLPSGHIGLTAWSYIDQKRNGPLLPCGRVMEPPSTVEIRQDGSQRLSEAQWYPIYNAVRREETENTVGSLLHFLTKLPASETAHGRISVGPCLKQCVRDTVCEYRATLQRTSISQYITGSLLEATTSLGARSGLLSTFGGSTGRMMLKERQPGPSVANSNALPSSSAGISKELIDLQPLIQFPEEVASILMEQEQTIYRRVLPVDYLCFLTRDLGTPECQSSLPCLKASISASILTTQNGEHNALEDLVMRFNEVSSWVTWLILTAGSMEEKREVFSYLVHVAKCCWNMGNYNAVMEFLAGLRSRKVLKMWQFMDQSDIETMRSLKDAMAQHESSCEYRKVVTRALHIPGCKVVPFCGVFLKELCEVLDGASGLMKLCPRYNSQEETLEFVADYSGQDNFLQRVGQNGLKNSEKESTVNSIFQVIRSCNRSLETDEEDSPSEGNSSRKSSLKDKSRWQFIIGDLLDSDNDIFEQSKEYDSHGSEDSQKAFDHGTELIPWYVLSIQADVHQFLLQGATVIHYDQDTHLSARCFLQLQPDNSTLTWVKPTTASPASSKAKLGVLNNTAEPGKFPLLGNAGLSSLTEGVLDLFAVKAVYMGHPGIDIHTVCVQNKLGSMFLSETGVTLLYGLQTTDNRLLHFVAPKHTAKMLFSGLLELTRAVRKMRKFPDQRQQWLRKQYVSLYQEDGRYEGPTLAHAVELFGGRRWSARNPSPGTSAKNAEKPNMQRNNTLGISTTKKKKKILMRGESGEVTDDEMATRKAKMHKECRSRSGSDPQDINEQEESEVNAIANPPNPLPSRRAHSLTTAGSPNLAAGTSSPIRPVSSPVLSSSNKSPSSAWSSSSWHGRIKGGMKGFQSFMVSDSNMSFVEFVELFKSFSVRSRKDLKDLFDVYAVPCNRSGSESAPLYTNLTIDENTSDLQPDLDLLTRNVSDLGLFIKSKQQLSDNQRQISDAIAAASIVTNGTGIESTSLGIFGVGILQLNDFLVNCQGEHCTYDEILSIIQKFEPSISMCHQGLMSFEGFARFLMDKENFASKNDESQENIKELQLPLSYYYIESSHNTYLTGHQLKGESSVELYSQVLLQGCRSVELDCWDGDDGMPIIYHGHTLTTKIPFKEVVEAIDRSAFINSDLPIIISIENHCSLPQQRKMAEIFKTVFGEKLVTKFLFETDFSDDPMLPSPDQLRKKVLLKNKKLKAHQTPVDILKQKAHQLASMQVQAYNGGNANPRPANNEEEEDEEDEYDYDYESLSDDNILEDRPENKSCNDKLQFEYNEEIPKRIKKADNSACNKGKVYDMELGEEFYLDQNKKESRQIAPELSDLVIYCQAVKFPGLSTLNASGSSRGKERKSRKSIFGNNPGRMSPGETASFNKTSGKSSCEGIRQTWEESSSPLNPTTSLSAIIRTPKCYHISSLNENAAKRLCRRYSQKLTQHTACQLLRTYPAATRIDSSNPNPLMFWLHGIQLVALNYQTDDLPLHLNAAMFEANGGCGYVLKPPVLWDKNCPMYQKFSPLERDLDSMDPAVYSLTIVSGQNVCPSNSMGSPCIEVDVLGMPLDSCHFRTKPIHRNTLNPMWNEQFLFHVHFEDLVFLRFAVVENNSSAVTAQRIIPLKALKRGYRHLQLRNLHNEVLEISSLFINSRRMEENSSGNTMSASSMFNTEERKCLQTHRVTVHGVPGPEPFTVFTINGGTKAKQLLQQILTNEQDIKPVTTDYFLMEEKYFISKEKNECRKQPFQRAIGPEEEIMQILSSWFPEEGYMGRIVLKTQQENLEEKNIVQDDKEVILSSEEESFFVQVHDVSPEQPRTVIKAPRVSTAQDVIQQTLCKAKYSYSILSNPNPSDYVLLEEVVKDTTNKKTTTPKSSQRVLLDQECVFQAQSKWKGAGKFILKLKEQVQASREDKKKGISFASELKKLTKSTKQPRGLTSPSQLLTSESIQTKEEKPVGGLSSSDTMDYRQ

SEQ ID NO: 8936 - protein, 192 aa, Homo sapiens
MAGLLALLGPAGRVGARVRPRATWLLGATAPCAPPPLALALLPPRLDARLLRTARGDCRGHQDPSQATGTTGSSVSCTEEKKQSKSQQLKKIFQEYGTVGVSLHIGISLISLGIFYMVVSSGVDMPAILLKLGFKESLVQSKMAAGTSTFVVAYAIHKLFAPVRISITLVSVPLIVRYFRKVGFFKPPAAKP

SEQ ID NO: 8937 - protein, 123 aa, Homo sapiens
MWRNSKVMNIVSYSFLEIVCVYGYSLFIYIPTAILWIIPQKAVRWILVMIALGISGSLLAMTFWPAVREDNRRVALATIVTIVLLHMLLSVGCLAYFFDAPEMDHLPTTTATPNQTVAAAKSS

SEQ ID NO: 8938 - protein, 364 aa, Homo sapiens
MRPQDSTGVAELQEPGLPLTDDAPPGATEEPAAAEAAGAPDRGRCWLCLSSPCCSRTEPAKKKAPCPGLGLFYTLLSAFLFSVGSLFVKKVQDVHAVEISAFRCVFQMLVVIPCLIYRKTGFIGPKGQRIFLILRGVLGSTAMMLIYYAYQTMSLADATVITFSSPVFTSIFAWICLKEKYSPWDALFTVFTITGVILIVRPPFLFGSDTSGMEESYSGHLKGTFAAIGSAVFAASTLVILRKMGKSVDYFLSIWYYVVLGLVESVIILSVLGEWSLPYCGLDRLFLIFIGLFGLGGQIFITKALQIEKAGPVAIMKTMDVVFAFIFQIIFFNNVPTWWTVGGALCVVASNVGAAIRKWYQSSK

SEQ ID NO: 8939 - protein, 415 aa, Homo sapiens
MAPVSGSRSPDREASGSGGRRRSSSKSPKPSKSARSPRGRRSRSHSCSRSGDRNGLTHQLGGLSQGSRNQSYRSRSRSRSRERPSAPRGIPFASASSSVYYGSYSRPYGSDKPWPSLLDKEREESLRQKRLSERERIGELGAPEVWGLSPKNPEPDSDEHTPVEDEEPKKSTTSASTSEEEKKKKSSRSKERSKKRRKKKSSKRKHKKYSEDSDSDSDSETDSSDEDNKRRAKKAKKKEKKKKHRSKKYKKKRSKKSRKESSDSSSKESQEEFLENPWKDRTKAEEPSDLIGPEAPKTLTSQDDKPLNYGHALLPGEGAAMAEYVKAGKRIPRRGEIGLTSEEIASFECSGYVMSGSRHRRMEAVRLRKENQIYSADEKRALASFNQEERRKRENKILASFREMVYRKTKGKDDK

SEQ ID NO: 8940 - protein, 291 aa, Homo sapiens
MESERSKRMGNACIPLKRIAYFLCLLSALLLTEGKKPAKPKCPAVCTCTKDNALCENARSIPRTVPPDVISLSFVRSGFTEISEGSFLFTPSLQLLLFTSNSFDVISDDAFIGLPHLEYLFIENNNIKSISRHTFRGLKSLIHLSLANNNLQTLPKDIFKGLDSLTNVDLRGNSFNCDCKLKWLVEWLGHTNATVEDIYCEGPPEYKKRKINSLSSKDFDCIITEFAKSQDLPYQSLSIDTFSYLNDEYVVIAQPFTGKCIFLEWDHVEKTFRNYDNITVLREIHRFTNMS

SEQ ID NO: 8941 - protein, 557 aa, Homo sapiens
MESERSKRMGNACIPLKRIAYFLCLLSALLLTEGKKPAKPKCPAVCTCTKDNALCENARSIPRTVPPDVISLSFVRSGFTEISEGSFLFTPSLQLLLFTSNSFDVISDDAFIGLPHLEYLFIENNNIKSISRHTFRGLKSLIHLSLANNNLQTLPKDIFKGLDSLTNVDLRGNSFNCDCKLKWLVEWLGHTNATVEDIYCEGPPEYKKRKINSLSSKDFDCIITEFAKSQDLPYQSLSIDTFSYLNDEYVVIAQPFTGKCIFLEWDHVEKTFRNYDNITGTSTVVCKPIVIETQLYVIVAQLFGGSHIYKRDSFANKFIKIQDIEILKIRKPNDIETFKIENNWYFVVADSSKAGFTTIYKWNGNGFYSHQSLHAWYRDTDVEYLEIVRTPQTLRTPHLILSSSSQRPVIYQWNKATQLFTNQTDIPNMEDVYAVKHFSVKGDVYICLTRFIGDSKVMKWGGSSFQDIQRMPSRGSMVFQPLQINNYQYAILGSDYSFTQVYNWDAEKAKFVKFQELNVQAPRSFTHVSINKRNFLFASSFKGNTQIYKHVIVDLSA

SEQ ID NO: 8942 - protein, 134 aa, Homo sapiens
MAATMKKAAAEDVNVTFEDQQKINKFARNTSRITELKEEIEVKKKQLQNLEDACDDIMLADDDCLMIPYQIGDVFISHSQEETQEMLEEAKKNLQEEIDALESRVESIQRVLADLKVQLYAKFGSNINLEADES

SEQ ID NO: 8943 - protein, 433 aa, Homo sapiens
MGRVQLFEISLSHGRVVYSPGEPLAGTVRVRLGAPLPFRAIRVTCIGSCGVSNKANDTAWVVEEGYFNSSLSLADKGSLPAGEHSFPFQFLLPATAPTSFEGPFGKIVHQVRAAIHTPRFSKDHKCSLVFYILSPLNLNSIPDIEQPNVASATKKFSYKLVKTGSVVLTASTDLRGYVVGQALQLHADVENQSGKDTSPVVASLLQKVSYKAKRWIHDVRTIAEVEGAGVKAWRRAQWHEQILVPALPQSALPGCSLIHIDYYLQVSLKAPEATVTLPVFIGNIAVNHAPVSPRPGLGLPPGAPPLVVPSAPPQEEAEAEAAAGGPHFLDPVFLSTKSHSQRQPLLATLSSVPGAPEPCPQDGSPASHPLHPPLCISTGATVPYFAEGSGGPVPTTSTLILPPEYSSWGYPYEAPPSYEQSCGGVEPSLTPES

SEQ ID NO: 8944 - protein, 674 aa, Homo sapiens
MATAVSRPCAGRSRDILWRVLGWRIVASIVWSVLFLPICTTVFIIFSRIDLFHPIQWLSDSFSDLYSSYVIFYFLLLSVVIIIISIFNVEFYAVVPSIPCSRLALIGKIIHPQQLMHSFIHAAMGMVMAWCAAVITQGQYSFLVVPCTGTNSFGSPAAQTCLNEYHLFFLLTGAFMGYSYSLLYFVNNMNYLPFPIIQQYKFLRFRRSLLLLVKHSCVESLFLVRNFCILYYFLGYIPKAWISTAMNLHIDEQVHRPLDTVSGLLNLSLLYHVWLCGVFLLTTWYVSWILFKIYATEAHVFPVQPPFAEGSDECLPKVLNSNPPPIIKYLALQDLMLLSQYSPSRRQEVFSLSQPGGHPHNWTAISRECLNLLNGMTQKLILYQEAAATNGRVSSSYPVEPKKLNSPEETAFQTPKSSQMPRPSVPPLVKTSLFSSKLSTPDVVSPFGTPFGSSVMNRMAGIFDVNTCYGSPQSPQLIRRGPRLWTSASDQQMTEFSNPSPSTSISAEGKTMRQPSVIYSWIQNKREQIKNFLSKRVLIMYFFSKHPEASIQAVFSDAQMHIWALEGLSHLVAASFTEDRFGVVQTTLPAILNTLLTLQEAVDKYFKLPHASSKPPRISGSLVDTSYKTLRFAFRASLKTAIYRITTTFGEHLNAVQASAEHQKRLQQFLEFKE

SEQ ID NO: 8945 - protein, 70 aa, Homo sapiens
MWFEILPGLSVMGVCLLIPGLATAYIHRFTNGGKEKRVAHFGYHWSLMERDRRISGVDRYYVSKGLENID

SEQ ID NO: 8946 - protein, 343 aa, Homo sapiens
MAEQLSPGKAVDQVCTFLFKKPGRKGAAGRRKRPACDPEPGESGSSSDEGCTVVRPEKKRVTHNPMIQKTRDSGKQKAAYGDLSSEEEEENEPESLGVVYKSTRSAKPVGPEDMGATAVYELDTEKERDAQAIFERSQKIQEELRGKEDDKIYRGINNYQKYMKPKDTSMGNASSGMVRKGPIRAPEHLRATVRWDYQPDICKDYKETGFCGFGDSCKFLHDRSDYKHGWQIERELDEGRYGVYEDENYEVGSDDEEIPFKCFICRQSFQNPVVTKCRHYFCESCALQHFRTTPRCYVCDQQTNGVFNPAKELIAKLEKHRATGEGGASDLPEDPDEDAIPIT

SEQ ID NO: 8947 - protein, 137 aa, Homo sapiens [sequence omitted]

SEQ ID NO: 8948 - protein, 201 aa, Homo sapiens
MKWVWALLLLAALGSGRAERDCRVSSFRVKENFDKARFSGTWYAMAKKDPEGLFLQDNIVAEFSVDETGQMSATAKGRVRLLNNWDVCADMVGTFTDTEDPAKFKMKYWGVASFLQKGNDDHWIVDTDYDTYAVQYSCRLLNLDGTCADSYSFVFSRDPNGLPPEAQKIVRQRQEELCLARQYRLIVHNGYCDGRSERNLL

SEQ ID NO: 8949 - protein, 802 aa, Homo sapiens
MPRIMIKGGVWRNTEDEILKAAVMKYGKNQWSRIASLLHRKSAKQCKARWYEWLDPSIKKTEWSREEEEKLLHLAKLMPTQWRTIAPIIGRTAAQCLEHYEFLLDKAAQRDNEEETTDDPRKLKPGEIDPNPETKPARPDPIDMDEDELEMLSEARARLANTQGKKAKRKAREKQLEEARRLAALQKRRELRAAGIEIQKKRKRKRGVDYNAEIPFEKKPALGFYDTSEENYQALDADFRKLRQQDLDGELRSEKEGRDRKKDKQHLKRKKESDLPSAILQTSGVSEFTKKRSKLVLPAPQISDAELQEVVKVGQASEIARQTAEESGITNSASSTLLSEYNVTNNSVALRTPRTPASQDRILQEAQNLMALTNVDTPLKGGLNTPLHESDFSGVTPQRQVVQTPNTVLSTPFRTPSNGAEGLTPRSGTTPKPVINSTPGRTPLRDKLNINPEDGMADYSDPSYVKQMERESREHLRLGLLGLPAPKNDFEIVLPENAEKELEEREIDDTYIEDAADVDARKQAIRDAERVKEMKRMHKAVQKDLPRPSEVNETILRPLNVEPPLTDLQKSEELIKKEMITMLHYDLLHHPYEPSGNKKGKTVGFGTNNSEHITYLEHNPYEKFSKEELKKAQDVLVQEMEVVKQGMSHGELSSEAYNQVWEECYSQVLYLPGQSRYTRANLASKKDRIESLEKRLEINRGHMTTEAKRAAKMEKKMKILLGGYQSRAMGLMKQLNDLWDQIEQAHLELRTFEELKKHEDSAIPRRLECLKEDVQRQQEREKELQHRYADLLLEKETLKSKF

SEQ ID NO: 8950 - protein, 658 aa, Homo sapiens
MVPRLLLRAWPRGPAVGPGAPSRPLSAGSGPGQYLQRSIVPTMHYQDSLPRLPIPKLEDTIRRYLSAQKPLLNDGQFRKTEQFCKSFENGIGKELHEQLVALDKQNKHTSYISGPWFDMYLSARDSVVLNFNPFMAFNPDPKSEYNDQLTRATNMTVSAIRFLKTLRAGLLEPEVFHLNPAKSDTITFKRLIRFVPSSLSWYGAYLVNAYPLDMSQYFRLFNSTRLPKPSRDELFTDDKARHLLVLRKGNFYIFDVLDQDGNIVSPSEIQAHLKYILSDSSPAPEFPLAYLTSENRDIWAELRQKLMSSGNEESLRKVDSAVFCLCLDDFPIKDLVHLSHNMLHGDGTNRWFDKSFNLIIAKDGSTAVHFEHSWGDGVAVLRFFNEVFKDSTQTPAVTPQSQPATTDSTVTVQKLNFELTDALKTGITAAKEKFDATMKTLTIDCVQFQRGGKEFLKKQKLSPDAVAQLAFQMAFLRQYGQTVATYESCSTAAFKHGRTETIRPASVYTKRCSEAFVREPSRHSAGELQQMMVECSKYHGQLTKEAAMGQGFDRHLFALRHLAAAKGIILPELYLDPAYGQINHNVLSTSTLSSPAVNLGGFAPVVSDGFGVGYAVHDNWIGCNVSSYPGRNAREFLQCVEKALEDMFDALEGKSIKS

SEQ ID NO: 8951 - protein, 1034 aa, Homo sapiens
MPRRKQQAPKRAAGYAQEEQLKEEEEIKEEEEEEDSGSVAQLQGGNDTGTDEELETGPEQKGCFSYQNSPGSHLSNQDAENESLLSDASDQVSDIKSVCGRDASDKKAHTHVRLPNEAHNCMDKMTAVYANILSDSYWSGLGLGFKLSNSERRNCDTRNGSNKSDFDWHQDALSKSLQQNLPSRSVSKPSLFSSVQLYRQSSKMCGTVFTGASRFRCRQCSAAYDTLVELTVHMNETGHYQDDNRKKDKLRPTSYSKPRKRAFQDMDKEDAQKVLKCMFCGDSFDSLQDLSVHMIKTKHYQKVPLKEPVPTISSKMVTPAKKRVFDVNRPCSPDSTTGSFADSFSSQKNANLQLSSNNRYGYQNGASYTWQFEACKSQILKCMECGSSHDTLQQLTTHMMVTGHFLKVTSSASKKGKQLVLDPLAVEKMQSLSEAPNSDSLAPKPSSNSASDCTASTTELKKESKKERPEETSKDEKVVKSEDYEDPLQKPLDPTIKYQYLREEDLEDGSKGGGDILKSLENTVTTAINKAQNGAPSWSAYPSIHAAYQLSEGTKPPLPMGSQVLQIRPNLTNKLRPIAPKWKVMPLVSMPTHLAPYTQVKKESEDKDEAVKECGKESPHEEASSFSHSEGDSFRKSETPPEAKKTELGPLKEEEKLMKEGSEKEKPQPLEPTSALSNGCALANHAPALPCINPLSALQSVLNNHLGKATEPLRSPSCSSPSSSTISMFHKSNLNVMDKPVLSPASTRSASVSRRYLFENSDQPIDLTKSKSKKAESSQAQSCMSPPQKHALSDIADMVKVLPKATTPKPASSSRVPPMKLEMDVRRFEDVSSEVSTLHKRKGRQSNWNPQHLLILQAQFASSLFQTSEGKYLLSDLGPQERMQISKFTGLSMTTISHWLANVKYQLRKTGGTKFLKNMDKGHPIFYCSDCASQFRTPSTYISHLESHLGFQMKDMTRLSVDQQSKVEQEISRVSSAQRSPETIAAEEDTDSKFKCKLCCRTFVSKHAVKLHLSKTHSKSPEHHSQFVTDVDEE

SEQ ID NO: 8952 - protein, 642 aa, Homo sapiens
MEGEEAEQPAWFRQPWRPGASDSAPPAGTMAQSRVLLLLLLLPPQLHLGPVLAVRAPGFGRSGGHSLSPEENEFAEEEPVLVLSPEEPGPGPAAVSCPRDCACSQEGVVDCGGIDLREFPGDLPEHTNHLSLQNNQLEKIYPEELSRLHRLETLNLQNNRLTSRGLPEKAFEHLTNLNYLYLANNKLTLAPRFLPNALISVDFAANYLTKIYGLTFGQKPNLRSVYLHNNKLADAGLPDNMFNGSSNVEVLILSSNFLRHVPKHLPPALYKLHLKNNKLEKIPPGAFSELSSLRELYLQNNYLTDEGLDNETFWKLSSLEYLDLSSNNLSRVPAGLPRSLVLLHLEKNAIRSVDANVLTPIRSLEYLLLHSNQLREQGIHPLAFQGLKRLHTVHLYNNALERVPSGLPRRVRTLMILHNQITGIGREDFATTYFLEELNLSYNRITSPQVHRDAFRKLRLLRSLDLSGNRLHTLPPGLPRNVHVLKVKRNELAALARGALVGMAQLRELYLTSNRLRSRALGPRAWVDLAHLQLLDIAGNQLTEIPEGLPESLEYLYLQNNKISAVPANAFDSTPNLKGIFLRFNKLAVGSVVDSAFRRLKHLQVLDIEGNLEFGDISKDRGRLGKEKEEEEEEEEEEEETR

SEQ ID NO: 8953 - protein, 503 aa, Homo sapiens
MSSSPWEPATLRRVFVVGVGMTKFVKPGAENSRDYPDLAEEAGKKALADAQIPYSAVDQACVGYVFGVAECVLALGFEKMSKGSLGIKFSDRTIPTDKHVDLLINKYGLSAHPVAPQMFGYAGKEHMEKYGTKIEHFAKIGWKNHKHSVNNPYSQFQDEYSLDEVMASKEVFDFLTILQCCPTSDGAAAAILASEAFVQKYGLQSKAVEILAQEMMTDLPSSFEEKSIIKMVGFDMSKEAARKCYEKSGLTPNDIDVIELHDCFSTNELLTYEALGLCPEGQGATLVDRGDNTYGGKWVINPSGGLISKGHPLGATGLAQCAELCWQLRGEAGKRQVPGAKVALQHNLGIGGAVVVTLYKMGFPEAASSFRTHQIEAVPTSSASDGFKANLVFKEIEKKLEEEGEQFVKKIGGIFAFKVKDGPGGKEATWVVDVKNGKGSVLPNSDKKADCTITMADSDFLALMTGKMNPQSAFFQGKLKITGNMGLAMKLQNLQLQPGNAKL

SEQ ID NO: 8954 - protein, 547 aa, Homo sapiens
MSSSPWEPATLRRVFVVGVGMTKFVKPGAENSRDYPDLAEEAGKKALADAQIPYSAVDQACVGYVFGDSTCGQRAIYHSLGMTGIPIINVNNNCATGSTALFMARQLIQGGVAECVLALGFEKMSKGSLGIKFSDRTIPTDKHVDLLINKYGLSAHPVAPQMFGYAGKEHMEKYGTKIEHFAKIGWKNHKHSVNNPYSQFQDEYSLDEVMASKEVFDFLTILQCCPTSDGAAAAILASEAFVQKYGLQSKAVEILAQEMMTDLPSSFEEKSIIKMVGFDMSKEAARKCYEKSGLTPNDIDVIELHDCFSTNELLTYEALGLCPEGQGATLVDRGDNTYGGKWVINPSGGLISKGHPLGATGLAQCAELCWQLRGEAGKRQVPGAKVALQHNLGIGGAVVVTLYKMGFPEAASSFRTHQIEAVPTSSASDGFKANLVFKEIEKKLEEEGEQFVKKIGGIFAFKVKDGPGGKEATWVVDVKNGKGSVLPNSDKKADCTITMADSDFLALMTGKMNPQSAFFQGKLKITGNMGLAMKLQNLQLQPGNAKL

SEQ ID NO: 8955 - protein, 679 aa, Homo sapiens
MNASSEGESFAGSVQSGTTVLVELTPDIHICGICKQQFNNLDAFVAHKQSGCQLTGTSAAAPSTVQFVSEETVPATQTQTTTRTITSETQTITVSAPEFVFEHGYQTYLPTESNENQTATVISLPAKSRTKKPTTPPAQKRLNCCYPGCQFKTAYGMKDMERHLKIHTGDKPHKCEVCGKCFSRKDKLKTHMRCHTGVKPYKCKTCDYAAADSSSLNKHLRIHSDERPFKCQICPYASRNSSQLTVHLRSHTGDAPFQCWLCSAKFKISSDLKRHMRVHSGEKPFKCEFCNVRCTMKGNLKSHIRIKHSGNNFKCPHCDFLGDSKATLRKHSRVHQSEHPEKCSECSYSCSSKAALRIHERIHCTDRPFKCNYCSFDTKQPSNLSKHMKKFHGDMVKTEALERKDTGRQSSRQVAKLDAKKSFHCDICDASFMREDSLRSHKRQHSEYSESKNSDVTVLQFQIDPSKQPATPLTVGHLQVPLQPSQVPQFSEGRVKIIVGHQVPQANTIVQAAAAAVNIVPPALVAQNPEELPGNSRLQILRQVSLIAPPQSSRCPSEAGAMTQPAVLLTTHEQTDGATLHQTLIPTASGGPQEGSGNQTFITSSGITCTDFEGLNALIQEGTAEVTVVSDGGQNIAVATTAPPVFSSSSQQELPKQTYSIIQGAAHPALLCPADSIPD

SEQ ID NO: 8956 - protein, 606 aa, Homo sapiens
MPSPQLLVLFGSQTGTAQDVSERLGREARRRRLGCRVQALDSYPVVNLINEPLVIFVCATTGQGDPPDNMKNFWRFIFRKNLPSTALCQMDFAVLGLGDSSYAKFNFVAKKLHRRLLQLGGSALLPVCLGDDQHELGPDAAVDPWLRDLWDRVLGLYPPPPGLTEIPPGVPLPSKFTLLFLQEAPSTGSEGQRVAHPGSQEPPSESKPFLAPMISNQRVTGPSHFQDVRLIEFDILGSGISFAAGDVVLIQPSNSAAHVQRFCQVLGLDPDQLFMLQPREPDVSSPTRLPQPCSMRHLVSHYLDIASVPRRSFFELLACLSLHELEREKLLEFSSAQGQEELFEYCNRPRRTILEVLCDFPHTAAAIPPDYLLDLIPVIRPRAFSIASSLLTHPSRLQILVAVVQFQTRLKEPRRGLCSSWLASLDPGQGPVRVPLWVRPGSLAFPETPDTPVIMVGPGTGVAPFRAAIQERVAQGQTGNFLFFGCRWRDQDFYWEAEWQELEKRDCLTLIPAFSREQPPALFSALQEQKVYVQHRLRELGSLVWELLDRQGAYFYLAGNAKSMPADVSEALMSIFQEEGGLCSPDAAAYLARLQQTRRFQTETWA

SEQ ID NO: 8957 - protein, 292 aa, Homo sapiens
MLRVLCLLRPWRPLRARGCASDGAAGGSEIQVRALAGPDQGITEILMNRPSARNALGNVFVSELLETLAQLREDRQVRVLLFRSGVKGVFCAGADLKEREQMSEAEVGVFVQRLRGLMNDIAAFPAPTIAAMDGFALGGGLELALACDLRVAASSAVMGLIETTRGLLPGAGGTQRLPRCLGVALAKELIFTGRRLSGTEAHVLGLVNHAVAQNEEGDAAYQRARALAQEILPQAPIAVRLGKVAIDRGTEVDIASGMAIEGMCYAQNIPTRDRLEGMAAFREKRTPKFVGK

SEQ ID NO: 8958 - protein, 426 aa, Homo sapiens
MSRRKQAKPQHLNSEEPRPARRECAEVAPQVAGEPASELDDDVPKANCLSTESTDTPKAPVITLPSEAREQMATLGERTFNCCYPGCHFKTVHGMKDLDRHLRIHTGDKPHKCEFCDKCFSRKDNLTMHMRCHTSVKPHKCHLCDYAAVDSSSLKKHLRIHSDERPYKCQLCPYASRNSSQLTVHLRSHTGDTPFQCWLCSAKFKISSDLKRHMIVHSGEKPFKCEFCDVRCTMKANLKSHIRIKHTFKCLHCAFQGRDRADLLEHSRLHQADHPEKCPECSYSCSSAAALRVHSRVHCKDRPFKCDFCSFDTKRPSSLAKHVDKVHRDEAKTENRAPLGKEGLREGSSQHVAKIVTQRAFRCETCGASFVRDDSLRCHKKQHSDQSENKNSDLVTFPPESGASGQLSTLVSVGQLEAPLEPSQDL

SEQ ID NO: 8959 - protein, 231 aa, Homo sapiens
MAGMVDFQDEEQVKSFLENMEVECNYHCYHEKDPDGCYRLVDYLEGIRKNFDEAAKVLKFNCEENQHSDSCYKLGAYYVTGKGGLTQDLKAAARCFLMACEKPGKKSIAACHNVGLLAHDGQVNEDGQPDLGKARDYYTRACDGGYTSSCFNLSAMFLQGAPGFPKDMDLACKYSMKACDLGHIWACANASRMYKLGDGVDKDEAKAEVLKNRAQQLHKEQQKGVQPLTFG

SEQ ID NO: 8960 - protein, 334 aa, Homo sapiens
MRGPSWSRPRPLLLLLLLLSPWPVWAQVSATASPSGSLGAPDCPEVCTCVPGGLASCSALSLPAVPPGLSLRLRALLLDHNRVRALPPGAFAGAGALQRLDLRENGLHSVHVRAFWGLGALQLLDLSANQLEALAPGTFAPLRALRNLSLAGNRLARLEPAALGALPLLRSLSLQDNELAALAPGLLGRLPALDALHLRGNPWGCGCALRPLCAWLRRHPLPASEAETVLCVWPGRLTLSPLTAFSDAAFSHCAQPLALRDLAVVYTLGPASFLVSLASCLALGSGLTACRARRRRLRTAALRPPRPPDPNPDPDPHGCASPADPGSPAAAAQA

SEQ ID NO: 8961 - protein, 1644 aa, Homo sapiens
MEESKTLKSENHEPKKNVICEESKAVQVIGNQTLKARNDKSVKEIENSSPNRNSSKKNKQNDICIEKTEVKSCKVNAANLPGPKDLGLVLRDQSHCKAKKFPNSPVKAEKATISQAKSEKATSLQAKAEKSPKSPNSVKAEKASSYQMKSEKVPSSPAEAEKGPSLLLKDMRQKTELQQIGKKIPSSFTSVDKVNIEAVGGEKCALQNSPRSQKQQTCTDNTGDSDDSASGIEDVSDDLSKMKNDESNKENSSEMDYLENATVIDESALTPEQRLGLKQAEERLERDHIFRLEKRSPEYTNCRYLCKLCLIHIENIQGAHKHIKEKRHKKNILEKQEESELRSLPPPSPAHLAALSVAVIELAKEHGITDDDLRVRQEIVEEMSKVITTFLPECSLRLYGSSLTRFALKSSDVNIDIKFPPKMNHPDLLIKVLGILKKNVLYVDVESDFHAKVPVVVCRDRKSGLLCRVSAGNDMACLTTDLLTALGKIEPVFIPLVLAFRYWAKLCYIDSQTDGGIPSYCFALMVMFFLQQRKPPLLPCLLGSWIEGFDPKRMDDFQLKGIVEEKFVKWECNSSSATEKNSIAEENKAKADQPKDDTKKTETDNQSNAMKEKHGKSPLALETPNRVSLGQLWLELLKFYTLDFALEEYVICVRIQDILTRENKNWPKRRIAIEDPFSVKRNVARSLNSQLVYEYVVERFRAAYRYFACPQTKGGNKSTVDFKKREKGKISNKKPVKSNNMATNGCILLGETTEKINAEREQPVQCDEMDCTSQRCIIDNNNLLVNELDFADHGQDSSSLSTSKSSEIEPKLDKKQDDLAPSETCLKKELSQCNCIDLSKSPDPDKSTGTDCRSNLETESSHQSVCTDTSATSCNCKATEDASDLNDDDNLPTQELYYVFDKFILTSGKPPTIVCSICKKDGHSKNDCPEDFRKIDLKPLPPMTNRFREILDLVCKRCFDELSPPCSEQHNREQILIGLEKFIQKEYDEKARLCLFGSSKNGFGFRDSDLDICMTLEGHENAEKLNCKEIIENLAKILKRHPGLRNILPITTAKVPIVKFEHRRSGLEGDISLYNTLAQHNTRMLATYAAIDPRVQYLGYTMKVFAKRCDIGDASRGSLSSYAYILMVLYFLQQRKPPVIPVLQEIFDGKQIPQRMVDGWNAFFFDKTEELKKRLPSLGKNTESLGELWLGLLRFYTEEFDFKEYVISIRQKKLLTTFEKQWTSKCIAIEDPFDLNHNLGAGVSRKMTNFIMKAFINGRKLFGTPFYPLIGREAEYFFDSRVLTDGELAPNDRCCRVCGKIGHYMKDCPKRKSLLFRLKKKDSEEEKEGNEEEKDSRDVLDPRDLHDTRDFRDPRDLRCFICGDAGHVRRECPEVKLARQRNSSVAAAQLVRNLVNAQQVAGSAQQQGDQSIRTRQSSECSESPSYSPQPQPFPQNSSQSAAITQPSSQPGSQPKLGPPQQGAQPPHQVQMPLYNFPQSPPAQYSPMHNMGLLPMHPLQIPAPSWPIHGPVIHSAPGSAPSNIGLNDPSIIFAQPAARPVAIPNTSHDGHWPRTVAPNSLVNSGAVGNSEPGFRGLTPPIPWEHAPRPHFPLVPASWPYGLHQNFMHQGNARFQPNKPFYTQDRCATRRCRERCPHPPRGNVSE

SEQ ID NO: 8962 - protein, 959 aa, Homo sapiens
MSTMRLLTLALLFSCSVARAACDPKIVNIGAVLSTRKHEQMFREAVNQANKRHGSWKIQLNATSVTHKPNAIQMALSVCEDLISSQVYAILVSHPPTPNDHFTPTPVSYTAGFYRIPVLGLTTRMSIYSDKSIHLSFLRTVPPYSHQSSVWFEMMRVYSWNHIILLVSDDHEGRAAQKRLETLLEERESKSKKRNYENLDQLSYDNKRGPKAEKVLQFDPGTKNVTALLMEAKELEARVIILSASEDDAATVYRAAAMLNMTGSGYVWLVGEREISGNALRYAPDGILGLQLINGKNESAHISDAVGVVAQAVHELLEKENITDPPRGCVGNTNIWKTGPLFKRVLMSSKYADGVTGRVEFNEDGDRKFANYSIMNLQNRKLVQVGIYNGTHVIPNDRKIIWPGGETEKPRGYQMSTRLKIVTIHQEPFVYVKPTLSDGTCKEEFTVNGDPVKKVICTGPNDTSPGSPRHTVPQCCYGFCIDLLIKLARTMNFTYEVHLVADGKFGTQERVNNSNKKEWNGMMGELLSGQADMIVAPLTINNERAQYIEFSKPFKYQGLTILVKKEIPRSTLDSFMQPFQSTLWLLVGLSVHVVAVMLYLLDRFSPFGRFKVNSEEEEEDALTLSSAMWFSWGVLLNSGIGEGAPRSFSARILGMVWAGFAMIIVASYTANLAAFLVLDRPEERITGINDPRLRNPSDKFIYATVKQSSVDIYFRRQVELSTMYRHMEKHNYESAAEAIQAVRDNKLHAFIWDSAVLEFEASQKCDLVTTGELFFRSGFGIGMRKDSPWKQNVSLSILKSHENGFMEDLDKTWVRYQECDSRSNAPATLTFENMAGVFMLVAGGIVAGIFLIFIEIAYKRHKDARRKQMQLAFAAVNVWRKNLQDRKSGRAEPDPKKKATFRAITSTLASSFKRRRSSKDTSTGGGRGALQNQKDTVLPRRAIEREEGQLQLCSRHRES

SEQ ID NO: 8963 - protein, 901 aa, Homo sapiens
MSTMRLLTLALLFSCSVARAACDPKIVNIGAVLSTRKHEQMFREAVNQANKRHGSWKIQLNATSVTHKPNAIQMALSVCEDLISSQVYAILVSHPPTPNDHFTPTPVSYTAGFYRIPVLGLTTRMSIYSDKSIHLSFLRTVPPYSHQSSVWFEMMRVYSWNHIILLVSDDHEGRAAQKRLETLLEERESKAEKVLQFDPGTKNVTALLMEAKELEARVIILSASEDDAATVYRAAAMLNMTGSGYVWLVGEREISGNALRYAPDGILGLQLINGKNESAHISDAVGVVAQAVHELLEKENITDPPRGCVGNTNIWKTGPLFKRVLMSSKYADGVTGRVEFNEDGDRKFANYSIMNLQNRKLVQVGIYNGTHVIPNDRKIIWPGGETEKPRGYQMSTRLKIVTIHQEPFVYVKPTLSDGTCKEEFTVNGDPVKKVICTGPNDTSPGSPRHTVPQCCYGFCIDLLIKLARTMNFTYEVHLVADGKFGTQERVNNSNKKEWNGMMGELLSGQADMIVAPLTINNERAQYIEFSKPFKYQGLTILVKKEIPRSTLDSFMQPFQSTLWLLVGLSVHVVAVMLYLLDRFSPFGRFKVNSEEEEEDALTLSSAMWFSWGVLLNSGIGEGAPRSFSARILGMVWAGFAMIIVASYTANLAAFLVLDRPEERITGINDPRLRNPSDKFIYATVKQSSVDIYFRRQVELSTMYRHMEKHNYESAAEAIQAVRDNKLHAFIWDSAVLEFEASQKCDLVTTGELFFRSGFGIGMRKDSPWKQNVSLSILKSHENGFMEDLDKTWVRYQECDSRSNAPATLTFENMAGVFMLVAGGIVAGIFLIFIEIAYKRHKDARRKQMQLAFAAVNVWRKNLQSTGGGRGALQNQKDTVLPRRAIEREEGQLQLCSRHRES

SEQ ID NO: 8964 - protein, 943 aa, Homo sapiens
MSTMRLLTLALLFSCSVARAACDPKIVNIGAVLSTRKHEQMFREAVNQANKRHGSWKIQLNATSVTHKPNAIQMALSVCEDLISSQVYAILVSHPPTPNDHFTPTPVSYTAGFYRIPVLGLTTRMSIYSDKSIHLSFLRTVPPYSHQSSVWFEMMRVYSWNHIILLVSDDHEGRAAQKRLETLLEERESKSKKRNYENLDQLSYDNKRGPKAEKVLQFDPGTKNVTALLMEAKELEARVIILSASEDDAATVYRAAAMLNMTGSGYVWLVGEREISGNALRYAPDGILGLQLINGKNESAHISDAVGVVAQAVHELLEKENITDPPRGCVGNTNIWKTGPLFKRVLMSSKYADGVTGRVEFNEDGDRKFANYSIMNLQNRKLVQVGIYNGTHVIPNDRKIIWPGGETEKPRGYQMSTRLKIVTIHQEPFVYVKPTLSDGTCKEEFTVNGDPVKKVICTGPNDTSPGSPRHTVPQCCYGFCIDLLIKLARTMNFTYEVHLVADGKFGTQERVNNSNKKEWNGMMGELLSGQADMIVAPLTINNERAQYIEFSKPFKYQGLTILVKKEIPRSTLDSFMQPFQSTLWLLVGLSVHVVAVMLYLLDRFSPFGRFKVNSEEEEEDALTLSSAMWFSWGVLLNSGIGEGAPRSFSARILGMVWAGFAMIIVASYTANLAAFLVLDRPEERITGINDPRLRNPSDKFIYATVKQSSVDIYFRRQVELSTMYRHMEKHNYESAAEAIQAVRDNKLHAFIWDSAVLEFEASQKCDLVTTGELFFRSGFGIGMRKDSPWKQNVSLSILKSHENGFMEDLDKTWVRYQECDSRSNAPATLTFENMAGVFMLVAGGIVAGIFLIFIEIAYKRHKDARRKQMQLAFAAVNVWRKNLQDRKSGRAEPDPKKKATFRAITSTLASSFKRRRSSKDTQYHPTDITGPLNLSDPSVSTVV

SEQ ID NO: 8965 - protein, 922 aa, Homo sapiens
MSTMRLLTLALLFSCSVARAACDPKIVNIGAVLSTRKHEQMFREAVNQANKRHGSWKIQLNATSVTHKPNAIQMALSVCEDLISSQVYAILVSHPPTPNDHFTPTPVSYTAGFYRIPVLGLTTRMSIYSDKSIHLSFLRTVPPYSHQSSVWFEMMRVYSWNHIILLVSDDHEGRAAQKRLETLLEERESKSKKRNYENLDQLSYDNKRGPKAEKVLQFDPGTKNVTALLMEAKELEARVIILSASEDDAATVYRAAAMLNMTGSGYVWLVGEREISGNALRYAPDGILGLQLINGKNESAHISDAVGVVAQAVHELLEKENITDPPRGCVGNTNIWKTGPLFKRVLMSSKYADGVTGRVEFNEDGDRKFANYSIMNLQNRKLVQVGIYNGTHVIPNDRKIIWPGGETEKPRGYQMSTRLKIVTIHQEPFVYVKPTLSDGTCKEEFTVNGDPVKKVICTGPNDTSPGSPRHTVPQCCYGFCIDLLIKLARTMNFTYEVHLVADGKFGTQERVNNSNKKEWNGMMGELLSGQADMIVAPLTINNERAQYIEFSKPFKYQGLTILVKKEIPRSTLDSFMQPFQSTLWLLVGLSVHVVAVMLYLLDRFSPFGRFKVNSEEEEEDALTLSSAMWFSWGVLLNSGIGEGAPRSFSARILGMVWAGFAMIIVASYTANLAAFLVLDRPEERITGINDPRLRNPSDKFIYATVKQSSVDIYFRRQVELSTMYRHMEKHNYESAAEAIQAVRDNKLHAFIWDSAVLEFEASQKCDLVTTGELFFRSGFGIGMRKDSPWKQNVSLSILKSHENGFMEDLDKTWVRYQECDSRSNAPATLTFENMAGVFMLVAGGIVAGIFLIFIEIAYKRHKDARRKQMQLAFAAVNVWRKNLQSTGGGRGALQNQKDTVLPRRAIEREEGQLQLCSRHRES

SEQ ID NO: 8966 - protein, 152 aa, Homo sapiens
MSTPARRRLMRDFKRLQEDPPAGVSGAPSENNIMVWNAVIFGPEGTPFEDGTFKLTIEFTEEYPNKPPTVRFVSKMFHPNVYADGSICLDILQNRWSPTYDVSSILTSIQSLLDEPNPNSPANSQAAQLYQENKREYEKRVSAIVEQSWRDC

SEQ ID NO: 8967 - protein, 885 aa, Homo sapiens
MSTMRLLTLALLFSCSVARAACDPKIVNIGAVLSTRKHEQMFREAVNQANKRHGSWKIQLNATSVTHKPNAIQMALSVCEDLISSQVYAILVSHPPTPNDHFTPTPVSYTAGFYRIPVLGLTTRMSIYSDKSIHLSFLRTVPPYSHQSSVWFEMMRVYSWNHIILLVSDDHEGRAAQKRLETLLEERESKAEKVLQFDPGTKNVTALLMEAKELEARVIILSASEDDAATVYRAAAMLNMTGSGYVWLVGEREISGNALRYAPDGILGLQLINGKNESAHISDAVGVVAQAVHELLEKENITDPPRGCVGNTNIWKTGPLFKRVLMSSKYADGVTGRVEFNEDGDRKFANYSIMNLQNRKLVQVGIYNGTHVIPNDRKIIWPGGETEKPRGYQMSTRLKIVTIHQEPFVYVKPTLSDGTCKEEFTVNGDPVKKVICTGPNDTSPGSPRHTVPQCCYGFCIDLLIKLARTMNFTYEVHLVADGKFGTQERVNNSNKKEWNGMMGELLSGQADMIVAPLTINNERAQYIEFSKPFKYQGLTILVKKEIPRSTLDSFMQPFQSTLWLLVGLSVHVVAVMLYLLDRFSPFGRFKVNSEEEEEDALTLSSAMWFSWGVLLNSGIGEGAPRSFSARILGMVWAGFAMIIVASYTANLAAFLVLDRPEERITGINDPRLRNPSDKFIYATVKQSSVDIYFRRQVELSTMYRHMEKHNYESAAEAIQAVRDNKLHAFIWDSAVLEFEASQKCDLVTTGELFFRSGFGIGMRKDSPWKQNVSLSILKSHENGFMEDLDKTWVRYQECDSRSNAPATLTFENMAGVFMLVAGGIVAGIFLIFIEIAYKRHKDARRKQMQLAFAAVNVWRKNLQQYHPTDITGPLNLSDPSVSTVV

SEQ ID NO: 8968 - protein, 906 aa, Homo sapiens
MSTMRLLTLALLFSCSVARAACDPKIVNIGAVLSTRKHEQMFREAVNQANKRHGSWKIQLNATSVTHKPNAIQMALSVCEDLISSQVYAILVSHPPTPNDHFTPTPVSYTAGFYRIPVLGLTTRMSIYSDKSIHLSFLRTVPPYSHQSSVWFEMMRVYSWNHIILLVSDDHEGRAAQKRLETLLEERESKSKKRNYENLDQLSYDNKRGPKAEKVLQFDPGTKNVTALLMEAKELEARVIILSASEDDAATVYRAAAMLNMTGSGYVWLVGEREISGNALRYAPDGILGLQLINGKNESAHISDAVGVVAQAVHELLEKENITDPPRGCVGNTNIWKTGPLFKRVLMSSKYADGVTGRVEFNEDGDRKFANYSIMNLQNRKLVQVGIYNGTHVIPNDRKIIWPGGETEKPRGYQMSTRLKIVTIHQEPFVYVKPTLSDGTCKEEFTVNGDPVKKVICTGPNDTSPGSPRHTVPQCCYGFCIDLLIKLARTMNFTYEVHLVADGKFGTQERVNNSNKKEWNGMMGELLSGQADMIVAPLTINNERAQYIEFSKPFKYQGLTILVKKEIPRSTLDSFMQPFQSTLWLLVGLSVHVVAVMLYLLDRFSPFGRFKVNSEEEEEDALTLSSAMWFSWGVLLNSGIGEGAPRSFSARILGMVWAGFAMIIVASYTANLAAFLVLDRPEERITGINDPRLRNPSDKFIYATVKQSSVDIYFRRQVELSTMYRHMEKHNYESAAEAIQAVRDNKLHAFIWDSAVLEFEASQKCDLVTTGELFFRSGFGIGMRKDSPWKQNVSLSILKSHENGFMEDLDKTWVRYQECDSRSNAPATLTFENMAGVFMLVAGGIVAGIFLIFIEIAYKRHKDARRKQMQLAFAAVNVWRKNLQQYHPTDITGPLNLSDPSVSTVV

SEQ ID NO: 8969 - protein, 938 aa, Homo sapiens
MSTMRLLTLALLFSCSVARAACDPKIVNIGAVLSTRKHEQMFREAVNQANKRHGSWKIQLNATSVTHKPNAIQMALSVCEDLISSQVYAILVSHPPTPNDHFTPTPVSYTAGFYRIPVLGLTTRMSIYSDKSIHLSFLRTVPPYSHQSSVWFEMMRVYSWNHIILLVSDDHEGRAAQKRLETLLEERESKAEKVLQFDPGTKNVTALLMEAKELEARVIILSASEDDAATVYRAAAMLNMTGSGYVWLVGEREISGNALRYAPDGILGLQLINGKNESAHISDAVGVVAQAVHELLEKENITDPPRGCVGNTNIWKTGPLFKRVLMSSKYADGVTGRVEFNEDGDRKFANYSIMNLQNRKLVQVGIYNGTHVIPNDRKIIWPGGETEKPRGYQMSTRLKIVTIHQEPFVYVKPTLSDGTCKEEFTVNGDPVKKVICTGPNDTSPGSPRHTVPQCCYGFCIDLLIKLARTMNFTYEVHLVADGKFGTQERVNNSNKKEWNGMMGELLSGQADMIVAPLTINNERAQYIEFSKPFKYQGLTILVKKEIPRSTLDSFMQPFQSTLWLLVGLSVHVVAVMLYLLDRFSPFGRFKVNSEEEEEDALTLSSAMWFSWGVLLNSGIGEGAPRSFSARILGMVWAGFAMIIVASYTANLAAFLVLDRPEERITGINDPRLRNPSDKFIYATVKQSSVDIYFRRQVELSTMYRHMEKHNYESAAEAIQAVRDNKLHAFIWDSAVLEFEASQKCDLVTTGELFFRSGFGIGMRKDSPWKQNVSLSILKSHENGFMEDLDKTWVRYQECDSRSNAPATLTFENMAGVFMLVAGGIVAGIFLIFIEIAYKRHKDARRKQMQLAFAAVNVWRKNLQDRKSGRAEPDPKKKATFRAITSTLASSFKRRRSSKDTSTGGGRGALQNQKDTVLPRRAIEREEGQLQLCSRHRES

SEQ ID NO: 8970 - protein, 861 aa, Homo sapiens
MAHYPTRLKTRKTYSWVGRPLLDRKLHYQTYREMCVKTEGCSTEIHIQIGQFVLIEGDDDENPYVAKLLELFEDDSDPPPKKRARVQWFVRFCEVPACKRHLLGRKPGAQEIFWYDYPACDSNINAETIIGLVRVIPLAPKDVVPTNLKNEKTLFVKLSWNEKKFRPLSSELFAELNKPQESAAKCQKPVRAKSKSAESPSWTPAEHVAKRIESRHSASKSRQTPTHPLTPRARKRLELGNLGNPQMSQQTSCASLDSPGRIKRKVAFSEITSPSKRSQPDKLQTLSPALKAPEKTRETGLSYTEDDKKASPEHRIILRTRIAASKTIDIREERTLTPISGGQRSSVVPSVILKPENIKKRDAKEAKAQNEATSTPHRIRRKSSVLTMNRIRQQLRFLGNSKSDQEEKEILPAAEISDSSSDEEEASTPPLPRRAPRTVSRNLRSSLKSSLHTLTKVPKKSLKPRTPRCAAPQIRSRSLAAQEPASVLEEARLRLHVSAVPESLPCREQEFQDIYNFVESKLLDHTGGCMYISGVPGTGKTATVHEVIRCLQQAAQANDVPPFQYIEVNGMKLTEPHQVYVQILQKLTGQKATANHAAELLAKQFCTRGSPQETTVLLVDELDLLWTHKQDIMYNLFDWPTHKEARLVVLAIANTMDLPERIMMNRVSSRLGLTRMCFQPYTYSQLQQILRSRLKHLKAFEDDAIQLVARKVAALSGDARRCLDICRRATEICEFSQQKPDSPGLVTIAHSMEAVDEMFSSSYITAIKNSSVLEQSFLRAILAEFRRSGLEEATFQQIYSQHVALCRMEGLPYPTMSETMAVCSHLGSCRLLLVEPSRNDLLLRVRLNVSQDDVLYALKDE

SEQ ID NO: 8971 - protein, 513 aa, Homo sapiens
MTLLPGDNSDYDYSALSCTSDASFHPAFLPQRQAIKGAFYRRAQRLRPQDEPRQGCQPEDRRRRIIINVGGIKYSLPWTTLDEFPLTRLGQLKACTNFDDILNVCDDYDVTCNEFFFDRNPGAFGTILTFLRAGKLRLLREMCALSFQEELLYWGIAEDHLDGCCKRRYLQKIEEFAEMVEREEEDDALDSEGRDSEGPAEGEGRLGRCMRRLRDMVERPHSGLPGKVFACLSVLFVTVTAVNLSVSTLPSLREEEEQGHCSQMCHNVFIVESVCVGWFSLEFLLRLIQAPSKFAFLRSPLTLIDLVAILPYYITLLVDGAAAGRRKPGAGNSYLDKVGLVLRVLRALRILYVMRLARHSLGLQTLGLTARRCTREFGLLLLFLCVAIALFAPLLYVIENEMADSPEFTSIPACYWWAVITMTTVGYGDMVPRSTPGQVVALSSILSGILLMAFPVTSIFHTFSRSYLELKQEQERVMFRRAQFLIKTKSQLSVSQDSDILFGSASSDTRDNN

SEQ ID NO: 8972 - protein, 492 aa, Homo sapiens [sequence omitted]

SEQ ID NO: 8973 - protein, 287 aa, Homo sapiens
MASLEVSRSPRRSRRELEVRSPRQNKYSVLLPTYNERENLPLIVWLLVKSFSESGINYEIIIIDDGSPDGTRDVAEQLEKIYGSDRILLRPREKKLGLGTAYIHGMKHATGNYIIIMDADLSHHPKFIPEFIRKQKEGNFDIVSGTRYKGNGGVYGWDLKRKIISDGVLPCCPGWSLLGSSDPAILASWDYSRGANFLTQILLRPGASDLTGSFRLYRKEVLEKLIEKCVSKGYVFQMEMIVRARQLNYTIGEVPISFVDRVYGESKLGGNEIVSFLKGLLTLFATT

SEQ ID NO: 8974 - protein, 858 aa, Homo sapiens
MMPGPRPRKGPQARGQGVAAAKQMGLFMEFGPEDMLLGMDEAEDDEDLEAELLALTGEAQTTGKKPAPKGQAPLPMAHIEKLAADCMRDVEEEEEEEGLEEDAELLTELQEVLGVDEETEPLDGDEVADPGGSEEENGLEDTEPPVQTAVLTASAPAAQAGASQGLHALLEERIHNYREAAASAKEAGEAAKARRCERGLKTLESQLASVRRGRKINEDEIPPPVALGKRPLAPQEPANRSPETDPPAPPALESDNPSQPETSLPGISAQPVSDLDPDPRALLSSRQREYKVAALSAKRAGELDRARELMRIGKRFGAVLEALEKGQPVDLSAMPPAPEDLKPQQASQAPTAPSVIPPAVERVQPVMAPDVPATPVAPTESQTVLDALQQRLNKYREAGIQARSGGDERKARMHERIAKQYQDAIRAHRAGRKVNFAELPVPPGFPPIPGLESTMGVEEDAVAATLAAAEKLASAEDSAPADKDEDEPPGHLQGEPPAQAPVAKKPARPTVPSSQRLPEPRASSSKESPSPSVREQLALLEARKLQYQRAALQAKRSQDLEQAKAYLRVAKWLEAQIIQARSGRPVDLSKVPSPLTDEEGDFILIHHEDLRLSQKAEEVYAQLQKMLLEQQEKCLLFSKQFMHQGNVAETTRFEKLAQDRKKQLEILQLAQAQGLDPPTHHFELKTFQTVRIFSELNSTEMHLIIVRGMNLPAPPGVTPDDLDAFVRFEFHYPNSDQAQKSKTAVVKNTNSPEFDQLFKLNINRNHRGFKRVIQSKGIKFEIFHKGSFFRSDKLVGTAHLKLERLENECEIREIVEVLDGRKPTGGKLEVKVRLREPLSGQDVQMVTENWLVLEPRGL

SEQ ID NO: 8975 - protein, 260 aa, Homo sapiens
MASLEVSRSPRRSRRELEVRSPRQNKYSVLLPTYNERENLPLIVWLLVKSFSESGINYEIIIIDDGSPDGTRDVAEQLEKIYGSDRILLRPREKKLGLGTAYIHGMKHATGNYIIIMDADLSHHPKFIPEFIRKQKEGNFDIVSGTRYKGNGGVYGWDLKRKIISRGANFLTQILLRPGASDLTGSFRLYRKEVLEKLIEKCVSKGYVFQMEMIVRARQLNYTIGEVPISFVDRVYGESKLGGNEIVSFLKGLLTLFATT

SEQ ID NO: 8976 - protein, 699 aa, Homo sapiens
MAACEGRRSGALGSSQSDFLTPPVGGAPWAVATTVVMYPPPPPPPHRDFISVTLSFGENYDNSKSWRRRSCWRKWKQLSRLQRNMILFLLAFLLFCGLLFYINLADHWKALAFRLEEEQKMRPEIAGLKPANPPVLPAPQKADTDPENLPEISSQKTQRHIQRGPPHLQIRPPSQDLKDGTQEEATKRQEAPVDPRPEGDPQRTVISWRGAVIEPEQGTELPSRRAEVPTKPPLPPARTQGTPVHLNYRQKGVIDVFLHAWKGYRKFAWGHDELKPVSRSFSEWFGLGLTLIDALDTMWILGLRKEFEEARKWVSKKLHFEKDVDVNLFESTIRILGGLLSAYHLSGDSLFLRKAEDFGNRLMPAFRTPSKIPYSDVNIGTGVAHPPRWTSDSTVAEVTSIQLEFRELSRLTGDKKFQEAVEKVTQHIHGLSGKKDGLVPMFINTHSGLFTHLGVFTLGARADSYYEYLLKQWIQGGKQETQLLEDYVEAIEGVRTHLLRHSEPSKLTFVGELAHGRFSAKMDHLVCFLPGTLALGVYHGLPASHMELAQELMETCYQMNRQMETGLSPEIVHFNLYPQPGRRDVEVKPADRHNLLRPETVESLFYLYRVTGDRKYQDWGWEILQSFSRFTRVPSGGYSSINNVQDPQKPEPRDKMESFFLGETLKYLFLLFSDDPNLLSLDAYVFNTEAHPLPIWTPA

SEQ ID NO: 8977 - protein, 325 aa, Homo sapiens
MATPLPPPSPRHLRLLRLLLSGLVLGAALRGAAAGHPDVAACPGSLDCALKRRARCPPGAHACGPCLQPFQEDQQGLCVPRMRRPPGGGRPQPRLEDEIDFLAQELARKESGHSTPPLPKDRQRLPEPATLGFSARGQGLELGLPSTPGTPTPTPHTSLGSPVSSDPVHMSPLEPRGGQGDGLALVLILAFCVAGAAALSVASLCWCRLQREIRLTQKADYATAKAPGSPAAPRISPGDQRLAQSAEMYHYQHQRQQMLCLERHKEPPKELDTASSDEENEDGDFTVYECPGLAPTGEMEVRNPLFDHAALSAPLPAPSSPPALP

SEQ ID NO: 8978 - protein, 158 aa, Homo sapiens
MNQEKLAKLQAQVRIGGKGTARRKKKVVHRTATADDKKLQSSLKKLAVNNIAGIEEVNMIKDDGTVIHFNNPKVQASLSANTFAITGHAEAKPITEMLPGILSQLGADSLTSLRKLAEQFPRQVLDSKAPKPEDIDEEDDDVPDLVENFDEASKNEAN

SEQ ID NO: 8979 - protein, 2435 aa, Homo sapiens
MGFLHQLQLLLWKNVTLKRRSPWVLAFEIFIPLVLFFILLGLRQKKPTISVKEAFYTAAPLTSAGILPVMQSLCPDGQRDEFGFLQYANSTVTQLLERLDRVVEEGNLFDPARPSLGSELEALRQHLEALSAGPGTSGSHLDRSTVSSFSLDSVARNPQELWRFLTQNLSLPNSTAQALLAARVDPPEVYHLLFGPSSALDSQSGLHKGQEPWSRLGGNPLFRMEELLLAPALLEQLTCTPGSGELGRILTVPESQKGALQGYRDAVCSGQAAARARRFSGLSAELRNQLDVAKVSQQLGLDAPNGSDSSPQAPPPRRLQALLGDLLDAQKVLQDVDVLSALALLLPQGACTGRTPGPPASGAGGAANGTGAGAVMGPNATAEEGAPSAAALATPDTLQGQCSAFVQLWAGLQPILCGNNRTIEPEALRRGNMSSLGFTSKEQRNLGLLVHLMTSNPKILYAPAGSEVDRVILKANETFAFVGNVTHYAQVWLNISAEIRSFLEQGRLQQHLRWLQQYVAELRLHPEALNLSLDELPPALRQDNFSLPSGMALLQQLDTIDNAACGWIQFMSKVSVDIFKGFPDEESIVNYTLNQAYQDNVTVFASVIFQTRKDGSLPPHVHYKIRQNSSFTEKTNEIRRAYWRPGPNTGGRFYFLYGFVWIQDMMERAIIDTFVGHDVVEPGSYVQMFPYPCYTRDDFLFVIEHMMPLCMVISWVYSVAMTIQHIVAEKEHRLKEVMKTMGLNNAVHWVAWFITGFVQLSISVTALTAILKYGQVLMHSHVVIIWLFLAVYAVATIMFCFLVSVLYSKAKLASACGGIIYFLSYVPYMYVAIREEVAHDKITAFEKCIASLMSTTAFGLGSKYFALYEVAGVGIQWHTFSQSPVEGDDFNLLLAVTMLMVDAVVYGILTWYIEAVHPGMYGLPRPWYFPLQKSYWLGSGRTEAWEWSWPWARTPRLSVMEEDQACAMESRRFEETRGMEEEPTHLPLVVCVDKLTKVYKDDKKLALNKLSLNLYENQVVSFLGHNGAGKTTTMSILTGLFPPTSGSATIYGHDIRTEMDEIRKNLGMCPQHNVLFDRLTVEEHLWFYSRLKSMAQEEIRREMDKMIEDLELSNKRHSLVQTLSGGMKRKLSVAIAFVGGSRAIILDEPTAGVDPYARRAIWDLILKYKPGRTILLSTHHMDEADLLGDRIAIISHGKLKCCGSPLFLKGTYGDGYRLTLVKRPAEPGGPQEPGLASSPPGRAPLSSCSELQVSQFIRKHVASCLLVSDTSTELSYILPSEAAKKGAFERLFQHLERSLDALHLSSFGLMDTTLEEVFLKVSEEDQSLENSEADVKESRKDVLPGAEGPASGEGHAGNLARCSELTQSQASLQSASSVGSARGDEGAGYTDVYGDYRPLFDNPQDPDNVSLQEVEAEALSRVGQGSRKLDGGWLKVRQFHGLLVKRFHCARRNSKALFSQILLPAFFVCVAMTVALSVPEIGDLPPLVLSPSQYHNYTQPRGNFIPYANEERREYRLRLSPDASPQQLVSTFRLPSGVGATCVLKSPANGSLGPTLNLSSGESRLLAARFFDSMCLESFTQGLPLSNFVPPPPSPAPSDSPASPDEDLQAWNVSLPPTAGPEMWTSAPSLPRLVREPVRCTCSAQGTGFSCPSSVGGHPPQMRVVTGDILTDITGHNVSEYLLFTSDRFRLHRYGAITFGNVLKSIPASFGTRAPPMVRKIAVRRAAQVFYNNKGYHSMPTYLNSLNNAILRANLPKSKGNPAAYGITVTNHPMNKTSASLSLDYLLQGTDVVIAIFIIVAMSFVPASFVVFLVAEKSTKAKHLQFVSGCNPIIYWLANYVWDMLNYLVPATCCVIILFVFDLPAYTSPTNFPAVLSLFLLYGWSITPIMYPASFWFEVPSSAYVFLIVINLFIGITATVATFLLQLFEHDKDLKVVNSYLKSCFLIFPNYNLGHGLMEMAYNEYINEYYAKIGQFDKMKSPFEWDIVTRGLVAMAVEGVVGFLLTIMCQYNFLRRPQRMPVSTKPVEDDVDVASERQRVLRGDADNDMVKIENLTKVYKSRKIGRILAVDRLCLGVRPGECFGLLGVNGAGKTSTFKMLTGDESTTGGEAFVNGHSVLKELLQVQQSLGYCPQCDALFDELTAREHLQLYTRLRGISWKDEARVVKWALEKLELTKYADKPAGTYSGGNKRKLSTAIALIGYPAFIFLDEPTTGMDPKARRFLWNLILDLIKTGRSVVLTSHSMEECEALCTRLAIMVNGRLRCLGSIQHLKNRFGDGYMITVRTKSSQSVKDVVRFFNRNFPEAMLKERHHTKVQYQLKSEHISLAQVFSKMEQVSGVLGIEDYSVSQTTLDNVFVNFAKKQSDNLEQQETEPPSALQSPLGCLLSLLRPRSAPTELRALVADEPEDLDTEDEGLISFEEERAQLSFNTDTLC

SEQ ID NO: 8980 - protein, 298 aa, Homo sapiens
MTDAAVSFAKDFLAGGVAAAISKTAVAPIERVKLLLQVQHASKQITADKQYKGIIDCVVRIPKEQGVLSFWRGNLANVIRYFPTQALNFAFKDKYKQIFLGGVDKRTQFWLYFAGNLASGGAAGATSLCFVYPLDFARTRLAADVGKAGAEREFRGLGDCLVKIYKSDGIKGLYQGFNVSVQGIIIYRAAYFGIYDTAKGMLPDPKNTHIVISWMIAQTVTAVAGLTSYPFDTVRRRMMMQSGRKGTDIMYTGTLDCWRKIARDEGGKAFFKGAWSNVLRGMGGAFVLVLYDEIKKYT

SEQ ID NO: 8981 - protein, 354 aa, Homo sapiens
MPLVVFCGLPYSGKSRRAEELRVALAAEGRAVYVVDDAAVLGAEDPAVYGDSAREKALRGALRASVERRLSRHDVVILDSLNYIKGFRYELYCLARAARTPLCLVYCVRPGGPIAGPQVAGANENPGRNVSVSWRPRAEEDGRAQAAGSSVLRELHTADSVVNGSAQADVPKELEREESGAAESPALVTPDSEKSAKHGSGAFYSPELLEALTLRFEAPDSRNRWDRPLFTLVGLEEPLPLAGIRSALFENRAPPPHQSTQSQPLASGSFLHQLDQVTSQVLAGLMEAQKSAVPGDLLTLPGTTEHLRFTRPLTMAELSRLRRQFISYTKMHPNNENLPQLANMFLQYLSQSLH

SEQ ID NO: 8982 - protein, 435 aa, Homo sapiens
MEMEKEFEQIDKSGSWAAIYQDIRHEASDFPCRVAKLPKNKNRNRYRDVSPFDHSRIKLHQEDNDYINASLIKMEEAQRSYILTQGPLPNTCGHFWEMVWEQKSRGVVMLNRVMEKGSLKCAQYWPQKEEKEMIFEDTNLKLTLISEDIKSYYTVRQLELENLTTQETREILHFHYTTWPDFGVPESPASFLNFLFKVRESGSLSPEHGPVVVHCSAGIGRSGTFCLADTCLLLMDKRKDPSSVDIKKVLLEMRKFRMGLIQTADQLRFSYLAVIEGAKFIMGDSSVQDQWKELSHEDLEPPPEHIPPPPRPPKRILEPHNGKCREFFPNHQWVKEETQEDKDCPIKEEKGSPLNAAPYGIESMSQDTEVRSRVVGGSLRGAQAASPAKGEPSLPEKDEDHALSYWKPFLVNMCVATVLTAGAYLCYRFLFNSNT

SEQ ID NO: 8983 - protein, 190 aa, Homo sapiens
MATHHTLWMGLALLGVLGDLQAAPEAQVSVQPNFQQDKFLGRWFSAGLASNSSWLREKKAALSMCKSVVAPATDGGLNLTSTFLRKNQCETRTMLLQPAGSLGSYSYRSPHWGSTYSVSVVETDYDQYALLYSQGSKGPGEDFRMATLYSRTQTPRAELKEKFTAFCKAQGFTEDTIVFLPQTDKCMTEQ

SEQ ID NO: 8984 - protein, 172 aa, Homo sapiens
METRPRLGATCLLGFSFLLLVISSDGHNGLGKGFGDHIHWRTLEDGKKEAAASGLPLMVIIHKSWCGACKALKPKFAESTEISELSHNFVMVNLEDEEEPKDEDFSPDGGYIPRILFLDPSGKVHPEIINENGNPSYKYFYVSAEQVVQGMKEAQERLTGDAFRKKHLEDEL

SEQ ID NO: 8985 - protein, 1166 aa, Homo sapiens
MSGRRCAGGGAACASAAAEAVEPAARELFEACRNGDVERVKRLVTPEKVNSRDTAGRKSTPLHFAAGFGRKDVVEYLLQNGANVQARDDGGLIPLHNACSFGHAEVVNLLLRHGADPNARDNWNYTPLHEAAIKGKIDVCIVLLQHGAEPTIRNTDGRTALDLADPSAKAVLTGEYKKDELLESARSGNEEKMMALLTPLNVNCHASDGRKSTPLHLAAGYNRVKIVQLLLQHGADVHAKDKGDLVPLHNACSYGHYEVTELLVKHGACVNAMDLWQFTPLHEAASKNRVEVCSLLLSYGADPTLLNCHNKSAIDLAPTPQLKERLAYEFKGHSLLQAAREADVTRIKKHLSLEMVNFKHPQTHETALHCAAASPYPKRKQICELLLRKGANINEKTKEFLTPLHVASEKAHNDVVEVVVKHEAKVNALDNLGQTSLHRAAYCGHLQTCRLLLSYGCDPNIISLQGFTALQMGNENVQQLLQEGISLGNSEADRQLLEAAKAGDVETVKKLCTVQSVNCRDIEGRQSTPLHFAAGYNRVSVVEYLLQHGADVHAKDKGGLVPLHNACSYGHYEVAELLVKHGAVVNVADLWKFTPLHEAAAKGKYEICKLLLQHGADPTKKNRDGNTPLDLVKDGDTDIQDLLRGDAALLDAAKKGCLARVKKLSSPDNVNCRDTQGRHSTPLHLAAGYNNLEVAEYLLQHGADVNAQDKGGLIPLHNAASYGHVDVAALLIKYNACVNATDKWAFTPLHEAAQKGRTQLCALLLAHGADPTLKNQEGQTPLDLVSADDVSALLTAAMPPSALPSCYKPQVLNGVRSPGATADALSSGPSSPSSLSAASSLDNLSGSFSELSSVVSSSGTEGASSLEKKEVPGVDFSITQFVRNLGLEHLMDIFEREQITLDVLVEMGHKELKEIGINAYGHRHKLIKGVERLISGQQGLNPYLTLNTSGSGTILIDLSPDDKEFQSVEEEMQSTVREHRDGGHAGGIFNRYNILKIQKVCNKKLWERYTHRRKEVSEENHNHANERMLFHGSPFVNAIIHKGFDERHAYIGGMFGAGIYFAENSSKSNQYVYGIGGGTGCPVHKDRSCYICHRQLLFCRVTLGKSFLQFSAMKMAHSPPGHHSVTGRPSVNGLALAEYVIYRGEQAYPEYLITYQIMRPEGMVDG

SEQ ID NO: 8986 - protein, 192 aa, Homo sapiens
MRLLCGLWLWLSLLKVLQAQTPTPLPLPPPMQSFQGNQFQGEWFVLGLAGNSFRPEHRALLNAFTATFELSDDGRFEVWNAMTRGQHCDTWSYVLIPAAQPGQFTVDHGVEPGADREETRVVDSDYTQFALMLSRRHTSRLAVLRISLLGRSWLLPPGTLDQFICLGRAQGLSDDNIVFPDVTGWSPQASVC

SEQ ID NO: 8987 - protein, 202 aa, Homo sapiens
MLPPGTATLLTLLLAAGSLGQKPQRPRRPASPISTIQPKANFDAQQFAGTWLLVAVGSACRFLQEQGHRAEATTLHVAPQGTAMAVSTFRKLDGICWQVRQLYGDTGVLGRFLLQARDARGAVHVVVAETDYQSFAVLYLERAGQLSVKLYARSLPVSDSVLSGFEQRVQEAHLTEDQIFYFPKYGFCEAADQFHVLDEVRR

SEQ ID NO: 8988 - protein, 279 aa, Homo sapiens
MEWPARLCGLWALLLCAGGGGGGGGAAPTETQPPVTNLSVSVENLCTVIWTWNPPEGASSNCSLWYFSHFGDKQDKKIAPETRRSIEVPLNERICLQVGSQCSTNESEKPSILVEKCISPPEGDPESAVTELQCIWHNLSYMKCSWLPGRNTSPDTNYTLYYWHRSLEKIHQCENIFREGQYFGCSFDLTKVKDSSFEQHSVQIMVKDNAGKIKPSFNIVPLTSRVKPDPPHIKNLSFHNDDLYVQWENPQNFISRCLFYEVEVNNSQTETHNVFYVRF

SEQ ID NO: 8989 - protein, 139 aa, Homo sapiens
MAESDWDTVTVLRKKGPTAAQAKSKQAILAAQRRGEDVETSKKWAAGQNKQHSITKNTAKLDRETEELHHDRVTLEVGKVIQQGRQSKGLTQKDLATKINEKPQVIADYESGRAIPNNQVLGKIERAIGECPSTLRRVR

SEQ ID NO: 8990 - protein, 141 aa, Homo sapiens
MAESDWDTVTVLRKKGPTAAQAKSKQAILAAQRRGEDVETSKKWAAGQNKQHSITKNTAKLDRETEELHHDRVTLEVGKVIQQGRQSKGLTQKDLATKINEKPQVIADYESGRAIPNNQVLGKIERAIDVGTRSARVLRAQ

SEQ ID NO: 8991 - protein, 270 aa, Homo sapiens
MAGAENWPGQQLELDEDEASCCRWGAQHAGARELAALYSPGKRLQEWCSVILCFSLIAHNLVHLLLLARWEDTPLVILGVVAGALIADFLSGLVHWGADTWGSVELPIVGKAFIRPFREHHIDPTAITRHDFIETNGDNCLVTLLPLLNMAYKFRTHSPEALEQLYPWECFVFCLIIFGTFTNQIHKWSHTYFGLPRWVTLLQDWHVILPRKHHRIHHVSPHETYFCITTGWLNYPLEKIGFWRRLEDLIQGLTGEKPRADDMKWAQKIK

SEQ ID NO: 8992 - protein, 427 aa, Homo sapiens
MEWPARLCGLWALLLCAGGGGGGGGAAPTETQPPVTNLSVSVENLCTVIWTWNPPEGASSNCSLWYFSHFGDKQDKKIAPETRRSIEVPLNERICLQVGSQCSTNESEKPSILVEKCISPPEGDPESAVTELQCIWHNLSYMKCSWLPGRNTSPDTNYTLYYWHRSLEKIHQCENIFREGQYFGCSFDLTKVKDSSFEQHSVQIMVKDNAGKIKPSFNIVPLTSRVKPDPPHIKNLSFHNDDLYVQWENPQNFISRCLFYEVEVNNSQTETHNVFYVQEAKCENPEFERNVENTSCFMVPGVLPDTLNTVRIRVKTNKLCYEDDKLWSNWSQEMSIGKKRNSTLYITMLLIVPVIVAGAIIVLLLYLKRLKIIIFPPIPDPGKIFKEMFGDQNDDTLHWKKYDIYEKQTKEETDSVVLIENLKKASQ

SEQ ID NO: 8993 - protein, 147 aa, Homo sapiens
MAATTGSGVKVPRNFRLLEELEEGQKGVGDGTVSWGLEDDEDMTLTRWTGMIIGPPRTIYENRIYSLKIECGPKYPEAPPFVRFVTKINMNGVNSSNGVVDPRAISVLAKWQNSYSIKVVLQELRRLMMSKENMKLPQPPEGQCYSN

SEQ ID NO: 8994 - protein, 207 aa, Homo sapiens
MSEAVRVPSPATPLVVAAPAPEERKGKESEREKLPPIVSAGAGATAGLDRGAKGQISTFSSFISAVSPKKEAAENRSSPAHLVFPNIKNVREPPPICLDVRQKQRTSMDASSSEMKAPVLPEPILPIQPKTVKDFQEDVEKVKSSGDWKAVHDFYLTTFDSFPELNAAFKKDATASFNTIEDSGINAKFVNAVYDTLLNTVSIMTCK

SEQ ID NO: 8995 - protein, 246 aa, Homo sapiens
MELWPCLAAALLLLLLLVQLSRAAEFYAKVALYCALCFTVSAVASLVCLLRHGGRTVENMSIIGWFVRSFKYFYGLRFEVRDPRRLQEARPCVIVSNHQSILDMMGLMEVLPERCVQIAKRELLFLGPVGLIMYLGGVFFINRQRSSTAMTVMADLGERMVRENVPIVPVVYSSFSSFYNTKKKFFTSGTVTVQVLEAIPTSGLTAADVPALVDTCHRAMRTTFLHISKTPQENGATAGSGVQPAQ

SEQ ID NO: 8996 - protein, 278 aa, Homo sapiens
MELWPCLAAALLLLLLLVQLSRAAEFYAKVALYCALCFTVSAVASLVCLLRHGGRTVENMSIIGWFVRSFKYFYGLRFEVRDPRRLQEARPCVIVSNHQSILDMMGLMEVLPERCVQIAKRELLFLGPVGLIMYLGGVFFINRQRSSTAMTVMADLGERMVRENLKVWIYPEGTRNDNGDLLPFKKGAFYLAVQAQVPIVPVVYSSFSSFYNTKKKFFTSGTVTVQVLEAIPTSGLTAADVPALVDTCHRAMRTTFLHISKTPQENGATAGSGVQPAQ

SEQ ID NO: 8997 - protein, 319 aa, Homo sapiens
MMVLKVEELVTGKKNGNGEAGEFLPEDFRDGEYEAAVTLEKQEDLKTLLAHPVTLGEQQWKSEKQREAELKKKKLEQRSKLENLEDLEIIIQLKKRKKYRKTKVPVVKEPEPEIITEPVDVPTFLKAALENKLPVVEKFLSDKNNPDVCDEYKRTALHRACLEGHLAIVEKLMEAGAQIEFRDMLESTAIHWASRGGNLDVLKLLLNKGAKISARDKLLSTALHVAVRTGHYECAEHLIACEADLNAKDREGDTPLHDAVRLNRYKMIRLLIMYGADLNIKNCAGKTPMDLVLHWQNGTKAIFDSLRENSYKTSRIATF

SEQ ID NO: 8998 - protein, 268 aa, Homo sapiens
MAVFADLDLRAGSDLKALRGLVETAAHLGYSVVAINHIVDFKEKKQEIEKPVAVSELFTTLPIVQGKSRPIKILTRLTIIVSDPSHCNVLRATSSRARLYDVVAVFPKTEKLFHIACTHLDVDLVCITVTEKLPFYFKRPPINVAIDRGLAFELVYSPAIKDSTMRRYTISSALNLMQICKGKNVIISSAAERPLEIRGPYDVANLGLLFGLSESDAKAAVSTNCRAALLHGETRKTAFGIISTVKKPRPSEGDEDCLPASKKAKCEG

SEQ ID NO: 8999 - protein, 2134 aa, Homo sapiens
MPGLDRPLSRQNPHDGVVTPAASPSLPQPGLQMPGQWGPVQGGPQPSGQHRSPCPEGPVPSGVPCATSVPHFPTPSILHQGPGHEQHSPLVAPPAALPSDGRDEVSHLQSGSHLANNSDPESTFRQNPRIVNHWASPELRQNPGVKNEHRPASALVNPLARGDSPENRTHHPLGAGAGSGCAPLEADSGASGALAMFFQGGETENEENLSSEKAGLSGQADFDDFCSSPGLGRPPAPTHVGAGSLCQALLPGPSNEAAGDVWGDTASTGVPDASGSQYENVENLEFVQNQEVLPSEPLNLDPSSPSDQFRYGPLPGPAVPRHGAVCHTGAPDATLHTVHPDSVSSSYSSRSHGRLSGSARPQELVGTFIQQEVGKPEDEASGSFFKQIDSSPVGGETDETTVSQNYRGSVSQPSTPSPPKPTGIFQTSANSSFEPVKSHLVGVKPFEADRANVVGEVRETCVRQKQCRPAAALPDASPGNLEQPPDNMETLCAPQVCPLPLNSTTEAVHMLPHAGAPPLDTVYPAPEKRPSARTQGPVKCESPATTLWAQSELPDFGGNVLLAPAAPALYVCAKPQPPVVQPPEEAMSGQQSRNPSSAAPVQSRGGIGASENLENPPKMGEEEALQSQASSGYASLLSSPPTESLQNPPVLIAQPDHSYNLAQPINFSVSLSNSHEKNQSWREALVGDRPAVSSWALGGDSGENTSLSGIPTSSVLSLSLPSSVAQSNFPQGSGASEMVSNQPANLLVQPPSQPVPENLVPESQKDRKAGSALPGFANSPAGSTSVVLVPPAHGTLVPDGNKANHSSHQEDTYGALDFTLSRTLENPVNVYNPSHSDSLASQQSVASHPRQSGPGAPNLDRFYQQVTKDAQGQPGLERAQQELVPPQQQASPPQLPKAMFSELSNPESLPAQGQAQNSAQSPASLVLVDAGQQLPPRPPQSSSVSLVSSGSGQAAVPSEQPWPQPVPALAPGPPPQDLAAYYYYRPLYDAYQPQYSLPYPPEPGAASLYYQDVYSLYEPRYRPYDGAASAYAQNYRYPEPERPSSRASHSSERPPPRQGYPEGYYSSKSGWSSQSDYYASYYSSQYDYGDPGHWDRYHYSARVRDPRTYDRRYWCDAEYDAYRREHSAFGDRPEKRDNNWRYDPRFTGSFDDDPDPHRDPYGEEVDRRSVHSEHSARSLHSAHSLASRRSSLSSHSHQSQIYRSHNVAAGSYEAPLPPGSFHGDFAYGTYRSNFSSGPGFPEYGYPADTVWPAMEQVSSRPTSPEKFSVPHVCARFGPGGQLIKVIPNLPSEGQPALVEVHSMEALLQHTSEQEEMRAFPGPLAKDDTHKVDVINFAQNKAMKCLQNENLIDKESASLLWNFIVLLCRQNGTVVGTDIAELLLRDHRTVWLPGKSPNEANLIDFTNEAVEQVEEEESGEAQLSFLTGGPAAAASSLERETERFRELLLYGRKKDALESAMKNGLWGHALLLASKMDSRTHARVMTRFANSLPINDPLQTVYQLMSGRMPAASTCCGDEKWGDWRPHLAMVLSNLNNNMDVESRTMATMGDTLASRGLLDAAHFCYLMAQAGFGVYTKKTTKLVLIGSNHSLPFLKFATNEAIQRTEAYEYAQSLGAETCPLPSFQVFKFIYSCRLAEMGLATQAFHYCEAIAKSILTQPHLYSPVLISQLVQMASQLRLFDPQLKEKPEEESLAAPTWLVHLQQVERQIKEGAGVWHQDGALPQQCPGTPSSEMEQLDRPGLSQPGALGIANPLLAVPAPSPEHSSPSVRLLPSAPQTLPDGPLASPARVPMFPVPLPPGPLEPGPGCVTPGPALGFLEPSGPGLPPGVPPLQERRHLLQEARSPDPGIVPQEAPVGNSLSELSEENFDGKFANLTPSRTVPDSEAPPGWDRADSGPTQPPLSLSPAPETKRPGQAAKKETKEPKKGESWFFRWLPGKKKTEAYLPDDKNKSIVWDEKKNQWVNLNEPEEEKKAPPPPPTSMPKTVQAAPPALPGPPGAPVNMYSRRAAGTRARYVDVLNPSGTQRSEPALAPADFVAPLAPLPIPSNLFVPTPDAEEPQLPDGTGREGPAAARGLANPEPAPEPKAPGDLPAAGGPPSGAMPFYNPAQLAQACATSGSSRLGRIGQRKHLVLN

SEQ ID NO: 9000 - protein, 456 aa, Homo sapiens [sequence omitted]

SEQ ID NO: 9001 - protein, 388 aa, Homo sapiens
MRARRGLLRLPRRSLLAALFFFSLSSSLLYFVYVAPGIVNTYLFMMQAQGILIRDNVRTIGAQVYEQVLRSAYAKRNSSVNDSDYPLDLNHSETFLQTTTFLPEDFTYFANHTCPERLPSMKGPIDINMSEIGMDYIHELFSKDPTIKLGGHWKPSDCMPRWKVAILIPFRNRHEHLPVLFRHLLPMLQRQRLQFAFYVVEQVGTQPFNRAMLFNVGFQEAMKDLDWDCLIFHDVDHIPESDRNYYGCGQMPRHFATKLDKYMYLLPYTEFFGGVSGLTVEQFRKINGFPNAFWGWGGEDDDLWNRVQNAGYSVSRPEGDTGKYKSIPHHHRGEVQFLGRYALLRKSKERQGLDGLNNLNYFANITYDALYKNITVNLTPELAQVNEY

SEQ ID NO: 9002 - protein, 644 aa, Homo sapiens
MPSKAENLRPSEPAPQPPEGRTLQGQLPGAPPAQRAGSPPDAPGSESPALACSTPATPSGEDPPARAAPIAPRPPARPRLERALSLDDKGWRRRRFRGSQEDLEARNGTSPSRGSVQSEGPGAPAHSCSPPCLSTSLQEIPKSRGVLSSERGSPSSGGNPLSGVASSSPNLPHRDAAVAGSSPRLPSLLPPRPPPALSLDIASDSLRTANKVDSDLADYKLRAQPLLVRAHSSLGPGRPRSPLACDDCSLRSAKSSFSLLAPIRSKDVRSRSYLEGSLLASGALLGADELARYFPDRNVALFVATWNMQGQKELPPSLDEFLLPAEADYAQDLYVIGVQEGCSDRREWETRLQETLGPHYVLLSSAAHGVLYMSLFIRRDLIWFCSEVECSTVTTRIVSQIKTKGALGISFTFFGTSFLFITSHFTSGDGKVAERLLDYTRTVQALVLPRNVPDTNPYRSSAADVTTRFDEVFWFGDFNFRLSGGRTVVDALLCQGLVVDVPALLQHDQLIREMRKGSIFKGFQEPDIHFLPSYKFDIGKDTYDSTSKQRTPSYTDRVLYRSRHKGDICPVSYSSCPGIKTSDHRPVYGLFRVKVRPGRDNIPLAAGKFDRELYLLGIKRRISKEIQRQQALQSQNSSTICSVS

SEQ ID NO: 9003 - protein, 525 aa, Homo sapiens
MAAVVLAATRLLRGSGSWGCSRLRFGPPAYRRFSSGGAYPNIPLSSPLPGVPKPVFATVDGQEKFETKVTTLDNGLRVASQNKFGQFCTVGILINSGSRYEAKYLSGIAHFLEKLAFSSTARFDSKDEILLTLEKHGGICDCQTSRDTTMYAVSADSKGLDTVVALLADVVLQPRLTDEEVEMTRMAVQFELEDLNLRPDPEPLLTEMIHEAAYRENTVGLHRFCPTENVAKINREVLHSYLRNYYTPDRMVLAGVGVEHEHLVDCARKYLLGVQPAWGSAEAVDIDRSVAQYTGGIAKLERDMSNVSLGPTPIPELTHIMVGLESCSFLEEDFIPFAVLNMMMGGGGSFSAGGPGKGMFSRLYLNVLNRHHWMYNATSYHHSYEDTGLLCIHASADPRQVREMVEIITKEFILMGGTVDTVELERAKTQLTSMLMMNLESRPVIFEDVGRQVLATRSRKLPHELCTLIRNVKPEDVKRVASKMLRGKPAVAALGDLTDLPTYEHIQTALSSKDGRLPRTYRLFR

SEQ ID NO: 9004 - protein, 896 aa, Homo sapiens
MAAAAQLSLTQLSSGNPVYEKYYRQVDTGNTGRVLASDAAAFLKKSGLPDLILGKIWDLADTDGKGILNKQEFFVALRLVACAQNGLEVSLSSLNLAVPPPRFHDTSSPLLISGTSAAELPWAVKPEDKAKYDAIFDSLSPVNGFLSGDKVKPVLLNSKLPVDILGRVWELSDIDHDGMLDRDEFAVAMFLVYCALEKEPVPMSLPPALVPPSKRKTWVVSPAEKAKYDEIFLKTDKDMDGFVSGLEVREIFLKTGLPSTLLAHIWSLCDTKDCGKLSKDQFALAFHLISQKLIKGIDPPHVLTPEMIPPSDRASLQKNIIGSSPVADFSAIKELDTLNNEIVDLQREKNNVEQDLKEKEDTIKQRTSEVQDLQDEVQRENTNLQKLQAQKQQVQELLDELDEQKAQLEEQLKEVRKKCAEEAQLISSLKAELTSQESQISTYEEELAKAREELSRLQQETAELEESVESGKAQLEPLQQHLQDSQQEISSMQMKLMEMKDLENHNSQLNWCSSPHSILVNGATDYCSLSTSSSETANLNEHVEGQSNLESEPIHQESPARSSPELLPSGVTDENEVTTAVTEKVCSELDNNRHSKEEDPFNVDSSSLTGPVADTNLDFFQSDPFVGSDPFKDDPFGKIDPFGGDPFKGSDPFASDCFFRQSTDPFATSSTDPFSAANNSSITSVETLKHNDPFAPGGTVVAASDSATDPFASVFGNESFGGGFADFSTLSKVNNEDPFRSATSSSVSNVVITKNVFEETSVKSEDEPPALPPKIGTPTRPCPLPPGKRSINKLDSPDPFKLNDPFQPFPGNDSPKEKDPEIFCDPFTSATTTTNKEADPSNFANFSAYPSEEDMIEWAKRESEREEEQRLARLNQQEQEDLELAIALSKSEISEA

SEQ ID NO: 9005 - protein, 1918 aa, Homo sapiens
MEERRPHLDARPRNSHTNHRGPVDGELPPRARNQANNPPANALRGGASHPGRHPRANNHPAAYWQREERFRAMGRNPHQGRRNQEGHASDEARDQRHDQENDTRWRNGNQDCRNRRPPWSNDNFQQWRTPHQKPTEQPQQAKKLGYKFLESLLQKDPSEVVITLATSLGLKELLSHSSMKSNFLELICQVLRKACSSKMDRQSVLHVLGILKNSKFLKVCLPAYVVGMITEPIPDIRNQYPEHISNIISLLQDLVSVFPASSVQETSMLVSLLPTSLNALRASGVDIEEETEKNLEKVQTIIEHLQEKRREGTLRVDTYTLVQPEAEDHVESYRTMPIYPTYNEVHLDERPFLRPNIISGKYDSTAIYLDTHFRLLREDFVRPLREGILELLQSFEDQGLRKRKFDDIRIYFDTRIITPMCSSSGIVYKVQFDTKPLKFVRWQNSKRLLYGSLVCMSKDNFETFLFATVSNREQEDLCRGIVQLCFNEQSQQLLAEVQPSDSFLMVETTAYFEAYRHVLEGLQEVQEEDVPFQRNIVECNSHVKEPRYLLMGGRYDFTPLIENPSATGEFLRNVEGLRHPRINVLDPGQWPSKEALKLDDSQMEALQFALTRELAIIQGPPGTGKTYVGLKIVQALLTNESVWQISLQKFPILVVCYTNHALDQFLEGIYNCQKTSIVRVGGRSNSEILKQFTLRELRNKREFRRNLPMHLRRAYMSIMTQMKESEQELHEGAKTLECTMRGVLREQYLQKYISPQHWESLMNGPVQDSEWICFQHWKHSMMLEWLGLGVGSFTQSVSPAGPENTAQAEGDEEEEGEEESSLIEIAEEADLIQADRVIEEEEVVRPQRRKKEESGADQELAKMLLAMRLDHCGTGTAAGQEQATGEWQTQRNQKKKMKKRVKDELRKLNTMTAAEANEIEDVWQLDLSSRWQLYRLWLQLYQADTRRKILSYERQYRTSAERMAELRLQEDLHILKDAQVVGMTTTGAAKYRQILQKVEPRIVIVEEAAEVLEAHTIATLSKACQHLILIGDHQQLRPSANVYDLAKNFNLEVSLFERLVKVNIPFVRLNYQHRMCPEIARLLTPHIYQDLENHPSVLKYEKIKGVSSNLFFVEHNFPEQEIQEGKSHQNQHEAHFVVELCKYFLCQEYLPSQITILTTYTGQLFCLRKLMPAKTFAGVRVHVVDKYQGEENDIILLSLVRSNQEGKVGFLQISNRICVALSRAKKGMYCIGNMQMLAKVPLWSKIIHTLRENNQIGPMLRLCCQNHPETHTLVSKASDFQKVPEGGCSLPCEFRLGCGHVCTRACHPYDSSHKEFQCMKPCQKVICQEGHRCPLVCFQECQPCQVKVPKTIPRCGHEQMVPCSVPESDFCCQEPCSKSLRCGHRCSHPCGEDCVQLCSEMVTIKLKCGHSQPVKCGHVEGLLYGGLLVKCTTKCGTILDCGHPCPGSCHSCFEGRFHERCQQPCKRLLICSHKCQEPCIGECPPCQRTCQNRCVHSQCKKKCGELCSPCVEPCVWRCQHYQCTKLCSEPCNRPPCYVPCTKLLVCGHPCIGLCGEPCPKKCRICHMDEVTQIFFGFEDEPDARFVQLEDCSHIFEVQALDRYMNEQKDDEVAIRLKVCPICQVPIRKNLRYGTSIKQRLEEIEIIKEKIQGSAGEIATSQERLKALLERKSLLHQLLPEDFLMLKEKLAQKNLSVKDLGLVENYISFYDHLASLWDSLKKMHVLEEKRVRTRLEQVHEWLAKKRLSFTSQELSDLRSEIQRLTYLVNLLTRYKIAEKKVKDSIAVEVYSVQNILEKTCKFTQEDEQLVQEKMEALKATLPCSGLGISEEERVQIVSAIGYPRGHWFKCRNGHIYVIGDCGGAMERGTCPDCKEVIGGTNHTLERSNQLASEMDGAQHAAWSDTANNLMNFEEIQGMM

SEQ ID NO: 9006 - protein, 405 aa, Homo sapiens
MFVQEEKIFAGKVLRLHICASDGAEWLEEATEDTSVEKLKERCLKHCAHGSLEDPKSITHHKLIHAASERVLSDARTILEENIQDQDVLLLIKKRAPSPLPKMADVSAEEKKKQDQKAPDKEAILRATANLPSYNMDRAAVQTNMRDFQTELRKILVSLIEVAQKLLALNPDAVELFKKANAMLDEDEDERVDEAALRQLTEMGFPENRATKALQLNHMSVPQAMEWLIEHAEDPTIDTPLPGQAPPEAEGATAAASEAAAGASATDEEARDELTEIFKKIRRKREFRADARAVISLMEMGFDEKEVIDALRVNNNQQNAACEWLLGDRKPSPEELDKGIDPDSPLFQAILDNPVVQLGLTNPKTLLAFEDMLENPLNSTQWMNDPETGPVMLQISRIFQTLNRT

SEQ ID NO: 9007 - protein, 170 aa, Homo sapiens
MKTLFLGVTLGLAAALSFTLEEEDITGTWYVKAMVVDKDFPEDRRPRKVSPVKVTALGGGNLEATFTFMREDRCIQKKILMRKTEEPGKFSAYGGRKLIYLQELPGTDDYVFYCKDQRRGGLRYMGKLVGRNPNTNLEALEEFKKLVQHKGLSEEDIFMPLQTGSCVLEH

SEQ ID NO: 9008 - protein, 485 aa, Homo sapiens
MSVPLLKIGVVLSTMAMITNWMSQTLPSLVGLNTTKLSAAGGGTLDRSTGVLPTNPEESWQVYSSAQDSEGRCICTVVAPQQTMCSRDARTKQLRQLLEKVQNMSQSIEVLDRRTQRDLQYVEKMENQMKGLESKFKQVEESHKQHLARQFKAIKAKMDELRPLIPVLEEYKADAKLVLQFKEEVQNLTSVLNELQEEIGAYDYDELQSRVSNLEERLRACMQKLACGKLTGISDPVTVKTSGSRFGSWMTDPLAPEGDNRVWYMDGYHNNRFVREYKSMVDFMNTDNFTSHRLPHPWSGTGQVVYNGSIYFNKFQSHIIIRFDLKTETILKTRSLDYAGYNNMYHYAWGGHSDIDLMVDESGLWAVYATNQNAGNIVVSRLDPVSLQTLQTWNTSYPKRSAGEAFIICGTLYVTNGYSGGTKVHYAYQTNASTYEYIDIPFQNKYSHISMLDYNPKDRALYAWNNGHQILYNVTLFHVIRSDEL

SEQ ID NO: 9009 - protein, 482 aa, Homo sapiens
MSEIRKDTLKAILLELECHFTWNLLKEDIDLFEVEDTIGQQLEFLTTKSRLALYNLLAYVKHLKGQNKDALECLEQAEEIIQQEHSDKEEVRSLVTWGNYAWVYYHMDQLEEAQKYTGKIGNVCKKLSSPSNYKLECPETDCEKGWALLKFGGKYYQKAKAAFEKALEVEPDNPEFNIGYAITVYRLDDSDREGSVKSFSLGPLRKAVTLNPDNSYIKVFLALKLQDVHAEAEGEKYIEEILDQISSQPYVLRYAAKFYRRKNSWNKALELLKKALEVTPTSSFLHHQMGLCYRAQMIQIKKATHNRPKGKDKLKVDELISSAIFHFKAAMERDSMFAFAYTDLANMYAEGGQYSNAEDIFRKALRLENITDDHKHQIHYHYGRFQEFHRKSENTAIHHYLEALKVKDRSPLRTKLTSALKKLSTKRLCHNALDVQSLSALGFVYKLEGEKRQAAEYYEKAQKIDPENAEFLTALCELRLSI

SEQ ID NO: 9010 - protein, 167 aa, Homo sapiens
MPGRWRWQRDMHPARKLLSLLFLILMGTELTQNKRENKAEKMGGPESERKTTGEKTLNELPLFCLEAHAGSLALPRMCSPNPNPAVGLCRPAYPQSPSPGAAQTISQSLLERFCMASRRGFLGPRKAWWRVVVVHCCWTDAFIHVHTHTHTCTHRGADTCREEPTRS

SEQ ID NO: 9011 - protein, 478 aa, Homo sapiens
MSTNGDDHQVKDSLEQLRCHFTWELSIDDDEMPDLENRVLDQIEFLDTKYSVGIHNLLAYVKHLKGQNEEALKSLKEAENLMQEEHDNQANVRSLVTWGNFAWMYYHMGRLAEAQTYLDKVENICKKLSNPFRYRMECPEIDCEEGWALLKCGGKNYERAKACFEKVLEVDPENPESSAGYAISAYRLDGFKLATKNHKPFSLLPLRQAVRLNPDNGYIKVLLALKLQDEGQEAEGEKYIEEALANMSSQTYVFRYAAKFYRRKGSVDKALELLKKALQETPTSVLLHHQIGLCYKAQMIQIKEATKGQPRGQNREKLDKMIRSAIFHFESAVEKKPTFEVAHLDLARMYIEAGNHRKAEENFQKLLCMKPVVEETMQDIHFHYGRFQEFQKKSDVNAIIHYLKAIKIEQASLTRDKSINSLKKLVLRKLRRKALDLESLSLLGFVYKLEGNMNEALEYYERALRLAADFENSVRQGP

SEQ ID NO: 9012 - protein, 326 aa, Homo sapiens
MELSGATMARGLAVLLVLFLHIKNLPAQAADTCPEVKVVGLEGSDKLTILRGCPGLPGAPGPKGEAGVIGERGERGLPGAPGKAGPVGPKGDRGEKGMRGEKGDAGQSQSCATGPRNCKDLLDRGYFLSGWHTIYLPDCRPLTVLCDMDTDGGGWTVFQRRMDGSVDFYRDWAAYKQGFGSQLGEFWLGNDNIHALTAQGSSELRVDLVDFEGNHQFAKYKSFKVADEAEKYKLVLGAFVGGSAGNSLTGHNNNFFSTKDQDNDVSSSNCAEKFQGAWWYADCHASNLNGLYLMGPHESYANGINWSAAKGYKYSYKVSEMKVRPA

SEQ ID NO: 9013 - protein, 490 aa, Homo sapiens
MSEVTKNSLEKILPQLKCHFTWNLFKEDSVSRDLEDRVCNQIEFLNTEFKATMYNLLAYIKHLDGNNEAALECLRQAEELIQQEHADQAEIRSLVTWGNYAWVYYHLGRLSDAQIYVDKVKQTCKKFSNPYSIEYSELDCEEGWTQLKCGRNERAKVCFEKALEEKPNNPEFSSGLAIAMYHLDNHPEKQFSTDVLKQAIELSPDNQYVKVLLGLKLQKMNKEAEGEQFVEEALEKSPCQTDVLRSAAKFYRRKGDLDKAIELFQRVLESTPNNGYLYHQIGCCYKAKVRQMQNTGESEASGNKEMIEALKQYAMDYSNKALEKGLNPLNAYSDLAEFLETECYQTPFNKEVPDAEKQQSHQRYCNLQKYNGKSEDTAVQHGLEGLSISKKSTDKEEIKDQPQNVSENLLPQNAPNYWYLQGLIHKQNGDLLQAAKCYEKELGRLLRDAPSGIGSIFLSASELEDGSEEMGQGAVSSSPRELLSNSEQLN

SEQ ID NO: 9014 - protein, 1838 aa, Homo sapiens
MDVHTRWKARSALRPGAPLLPPLLLLLLWAPPPSRAAQPADLLKVLDFHNLPDGITKTTGFCATRRSSKGPDVAYRVTKDAQLSAPTKQLYPASAFPEDFSILTTVKAKKGSQAFLVSIYNEQGIQQIGLELGRSPVFLYEDHTGKPGPEDYPLFRGINLSDGKWHRIALSVHKKNVTLILDCKKKTTKFLDRSDHPMIDINGIIVFGTRILDEEVFEGDIQQLLFVSDHRAAYDYCEHYSPDCDTAVPDTPQSQDPNPDEYYTEGDGEGETYYYEYPYYEDPEDLGKEPTPSKKPVEAAKETTEVPEELTPTPTEAAPMPETSEGAGKEEDVGIGDYDYVPSEDYYTPSPYDDLTYGEGEENPDQPTDPGAGAEIPTSTADTSNSSNPAPPPGEGADDLEGEFTEETIRNLDENYYDPYYDPTSSPSEIGPGMPANQDTIYEGIGGPRGEKGQKGEPAIIEPGMLIEGPPGPEGPAGLPGPPGTMGPTGQVGDPGERGPPGRPGLPGADGLPGPPGTMLMLPFRFGGGGDAGSKGPMVSAQESQAQAILQQARLALRGPAGPMGLTGRPGPVGPPGSGGLKGEPGDVGPQGPRGVQGPPGPAGKPGRRGRAGSDGARGMPGQTGPKGDRGFDGLAGLPGEKGHRGDPGPSGPPGPPGDDGERGDDGEVGPRGLPGEPGPRGLLGPKGPPGPPGPPGVTGMDGQPGPKGNVGPQGEPGPPGQQGNPGAQGLPGPQGAIGPPGEKGPLGKPGLPGMPGADGPPGHPGKEGPPGEKGGQGPPGPQGPIGYPGPRGVKGADGIRGLKGTKGEKGEDGFPGFKGDMGIKGDRGEIGPPGPRGEDGPEGPKGRGGPNGDPGPLGPPGEKGKLGVPGLPGYPGRQGPKGSIGFPGFPGANGEKGGRGTPGKPGPRGQRGPTGPRGERGPRGITGKPGPKGNSGGDGPAGPPGERGPNGPQGPTGFPGPKGPPGPPGKDGLPGHPGQRGETGFQGKTGPPGPPGVVGPQGPTGETGPMGERGHPGPPGPPGEQGLPGLAGKEGTKGDPGPAGLPGKDGPPGLRGFPGDRGLPGPVGALGLKGNEGPPGPPGPAGSPGERGPAGAAGPIGIPGRPGPQGPPGPAGEKGAPGEKGPQGPAGRDGLQGPVGLPGPAGPVGPPGEDGDKGEIGEPGQKGSKGDKGEQGPPGPTGPQGPIGQPGPSGADGEPGPRGQQGLFGQKGDEGPRGFPGPPGPVGLQGLPGPPGEKGETGDVGQMGPPGPPGPRGPSGAPGADGPQGPPGGIGNPGAVGEKGEPGEAGEPGLPGEGGPPGPKGERGEKGESGPSGAAGPPGPKGPPGDDGPKGSPGPVGFPGDPGPPGEPGPAGQDGPPGDKGDDGEPGQTGSPGPTGEPGPSGPPGKRGPPGPAGPEGRQGEKGAKGEAGLEGPPGKTGPIGPQGAPGKPGPDGLRGIPGPVGEQGLPGSPGPDGPPGPMGPPGLPGLKGDSGPKGEKGHPGLIGLIGPPGEQGEKGDRGLPGPQGSSGPKGEQGITGPSGPIGPPGPPGLPGPPGPKGAKGSSGPTGPKGEAGHPGPPGPPGPPGEVIQPLPIQASRTRRNIDASQLLDDGNGENYVDYADGMEEIFGSLNSLKLEIEQMKRPLGTQQNPARTCKDLQLCHPDFPDGEYWVDPNQGCSRDSFKVYCNFTAGGSTCVFPDKKSEGARITSWPKENPGSWFSEFKRGKLLSYVDAEGNPVGVVQMTFLRLLSASAHQNVTYHCYQSVAWQDAATGSYDKALRFLGSNDEEMSYDNNPYIRALVDGCATKKGYQKTVLEIDTPKVEQVPIVDIMFNDFGEASQKFGFEVGPACFMG

SEQ ID NO: 9015 - protein, 490 aa, Homo sapiens; identical to SEQ ID NO: 9013

SEQ ID NO: 9016 - protein, 488 aa, Homo sapiens
MPKVKALQCALALEISSVTCPGVVLKDKEDIYLSICVFGQYKKTQCVPATFPLVFNARMVFEKVFPDAVDPGDVVTQLEYDTAVFELIQLVPPVGETLSTYDENTRDFMFPGPNQMSGHHDSNRQVTMRRISGLRGNAPRLEFSTTSVITECLISSRKCHTQDKFIYHLAPVEKSHGRLQNRTSRSQKKKSKSPERSKYCINAKNYEQPTISSKSHSPSPYTKRRMCELSEDTRRRLAHLNLGPYEFKKETDKPPFVIRHVDPPSPRADTLLGSSGRDCERDGWSRVHNDHSHLGCCRPKDYKVIRTPHGRDFDDSLEKCEEYLSPRSCSKPRHSARTLLVHSAPSTMPKHSPSPVLNRASLRERFHSDWCSPSNCDEIHDRVKNVLKSHQAHQRHLYDERDLEKDDELELKRSLLCRDSAYDSDPEYSSCQQPRGTFHLDDGEYWSNRAASYKGKSHRPIFENSMDKMYRNLYKKACSSASHTQESF

SEQ ID NO: 9017 - protein, 272 aa, Homo sapiens
MSCHNCSDPQVLCSSGQLFLQPLWDHLRSWEALLQSPFFPVIFSITTYVGFCLPFVVLDILCSWVPALRRYKIHPDFSPSAQQLLPCLGQTLYQHVMFVFPVTLLHWARSPALLPHEAPELLLLLHHILFCLLLFDMEFFVWHLLHHKVPWLYRTFHKVHHQNSSSFALATQYMSVWELFSLGFFDMMNVTLLGCHPLTTLTFHVVNIWLSVEDHSGYNFPWSTHRLVPFGWYGGVVHHDLHHSHFNCNFAPYFTHWDKILGTLRTASVPAR

SEQ ID NO: 9018 - protein, 577 aa, Homo sapiens
MSQVQVQVQNPSAALSGSQILNKNQSLLSQPLMSIPSTTSSLPSENAGRPIQNSALPSASITSTSAAAESITPTVELNALCMKLGKKPMYKPVDPYSRMQSTYNYNMRGGAYPPRYFYPFPVPPLLYQVELSVGGQQFNGKGKTRQAAKHDAAAKALRILQNEPLPERLEVNGRESEEENLNKSEISQVFEIALKRNLPVNFEVARESGPPHMKNFVTKVSVGEFVGEGEGKSKKISKKNAAIAVLEELKKLPPLPAVERVKPRIKKKTKPIVKPQTSPEYGQGINPISRLAQIQQAKKEKEPEYTLLTERGLPRRREFVMQVKVGNHTAEGTGTNKKVAKRNAAENMLEILGFKVPQAQPTKPALKSEEKTPIKKPGDGRKVTFFEPGSGDENGTSNKEDEFRMPYLSHQQLPAGILPMVPEVAQAVGVSQGHHTKDFTRAAPNPAKATVTAMIARELLYGGTSPTAETILKNNISSGHVPHGPLTRPSEQLDYLSRVQGFQVEYKDFPKNNKNEFVSLINCSSQPPLISHGIGKDVESCHDMAALNILKLLSELDQQSTEMPRTGNGPMSVCGRC

SEQ ID NO: 9019 - protein, 169 aa, Homo sapiens
MLSRCRSGLLHVLGLSFLLQTRRPILLCSPRLMKPLVVFVLGGPGAGKGTQCARIVEKYGYTHLSAGELLRDERKNPDSQYGELIEKYIKEGKIVPVEITISLLKREMDQTMAANAQKNKFLIDGFPRNQDNLQGWNKTMDGKADVSFVLFFDCNNENSDLPSVNKANY

SEQ ID NO: 9020 - protein, 918 aa, Homo sapiens
MASLSRALRVAAAHPRQSPTRGMGPCNLSSAAGPTAEKSVPYQRTLKEGQGTSVVAQGPSRPLPSTANVVVIGGGSLGCQTLYHLAKLGMSGAVLLERERLTSGTTWHTAGLLWQLRPSDVEVELLAHTRRVVSRELEEETGLHTGWIQNGGLFIASNRQRLDEYKRLMSLGKAYGVESHVLSPAETKTLYPLMNVDDLYGTLYVPHDGTMDPAGTCTTLARAASARGAQVIENCPVTGIRVWTDDFGVRRVAGVETQHGSIQTPCVVNCAGVWASAVGRMAGVKVPLVAMHHAYVVTERIEGIQNMPNVRDHDASVYLRLQGDALSVGGYEANPIFWEEVSDKFAFGLFDLDWEVFTQHIEGAINRVPVLEKTGIKSTVCGPESFTPDHKPLMGEAPELRGFFLGCGFNSAGMMLGGGCGQELAHWIIHGRPEKDMHGYDIRRFHHSLTDHPRWIRERSHESYAKNYSVVFPHDEPLAGRNMRRDPLHEELLGQGCVFQERHGWERPGWFHPRGPAPVLEYDYYGAYGSRAHEDYAYRRLLADEYTFAFPPHHDTIKKECLACRGAAAVFDMSYFGKFYLVGLDARKAADWLFSADVSRPPGSTVYTCMLNHRGGTESDLTVSRLAPSHQASPLAPAFEGDGYYLAMGGAVAQHNWSHITTVLQDQKSQCQLIDSSEDLGMISIQGPASRAILQEVLDADLSNEAFPFSTHKLLRAAGHLVRAMRLSFVGELGWELHIPKASCVPVYRAVMAAGAKHGLINAGYRAIDSLSIEKGYRHWHADLRPDDSPLEAGLAFTCKLKSPVPFLGREALEQQRAAGLRRRLVCFTMEDKVPMFGLEAIWRNGQVVGHVRRADFGFAIDKTIAYGYIHDPSGGPVSLDFVKSGDYALERMGVTYGAQAHLKSPFDPNNKRVKGIY

SEQ ID NO: 9021 - protein, 228 aa, Homo sapiens
MLSRCRSGLLHVLGLSFLLQTRRPILLCSPRLMKPLVVFVLGGPGAGKGTQCARIVEKYGYTHLSAGELLRDERKNPDSQYGELIEKYIKEGKIVPVEITISLLKREMDQTMAANAQKNKFLIDGFPRNQDNLQGWNKTMDGKADVSFVLFFDCNNEICIERCLERGKSSGRSDDNRESLEKRIQTYLQSTKPIIDLYEEMGKVKKIDASKSVDEVFDEVVQIFDKEG

SEQ ID NO: 9022 - protein, 445 aa, Homo sapiens
MQEPLLGAEGPDYDTFPEKPPPSPGDRARVGTLQNKRVFLATFAAVLGNFSFGYALVYTSPVIPALERSLDPDLHLTKSQASWFGSVFTLGAAAGGLSAMILNDLLGRKLSIMFSAVPSAAGYALMAGAHGLWMLLLGRTLTGFAGGLTAACIPVYVSEIAPPGVRGALGATPQLMAVFGSLSLYALGLLLPWRWLAVAGEAPVLIMILLLSFMPNSPRFLLSRGRDEEALRALAWLRGTDVDVHWEFEQIQDNVRRQSSRVSWAEARAPHVCRPITVALLMRLLQQLTGITPILVYLQSIFDSTAVLLPPKDDAAIVGAVRLLSVLIAALTMDLAGRKVLLFVSGYAVGWGPITWLLMSEVLPLRARGVASGLCVLASWLTAFVLTKSFLPVVSTFGLQVPFFFFAAICLVSLVFTGCCVPETKGRSLEQIESFFRTGRRSFLR

SEQ ID NO: 9023 - protein, 507 aa, Homo sapiens
MQEPLLGAEGPDYDTFPEKPPPSPGDRARVGTLQNKRVFLATFAAVLGNFSFGYALVYTSPVIPALERSLDPDLHLTKSQASWFGSVFTLGAAAGGLSAMILNDLLGRKLSIMFSAVPSAAGYALMAGAHGLWMLLLGRTLTGFAGGLTAACIPVYVSEIAPPGVRGALGATPQLMAVFGSLSLYALGLLLPWRWLAVAGEAPVLIMILLLSFMPNSPRFLLSRGRDEEALRALAWLRGTDVDVHWEFEQIQDNVRRQSSRVSWAEARAPHVCRPITVALLMRLLQQLTGITPILVYLQSIFDSTAVLLPPKDDAAIVGAVRLLSVLIAALTMDLAGRKVLLFVSAAIMFAANLTLGLYIHFGPRPLSPNSTAGLESESWGDLAQPLAAPAGYLTLVPLLATMLFIMGYAVGWGPITWLLMSEVLPLRARGVASGLCVLASWLTAFVLTKSFLPVVSTFGLQVPFFFFAAICLVSLVFTGCCVPETKGRSLEQIESFFRTGRRSFLR

SEQ ID NO: 9024 - protein, 1785 aa, Homo sapiens
MQESQTKSMFVSRALEKILADKEVKRPQHSQLRRACQVALDEIKAEIEKQRLGTAAPPKANFIEADKYFLPFELACQSKSPRVVSTSLDCLQKLIAYGHITGNAPDSGAPGKRLIDRIVETICSCFQGPQTDEGVQLQIIKALLTAVTSPHIEIHEGTILQTVRTCYNIYLASKNLINQTTAKATLTQMLNVIFTRMENQVLQEARELEKPIQSKPQSPVIQAAAVSPKFVRLKHSQAQSKPTTPEKTDLTNGEHARSDSGKVSTENGDAPRERGSSLSGTDDGAQEVVKDILEDVVTSAIKEAAEKHGLTEPERVLGELECQECAIPPGVDENSQTNGIADDRQSLSSADNLESDAQGHQVAARFSHVLQKDAFLVFRSLCKLSMKPLGEGPPDPKSHELRSKVVSLQLLLSVLQNAGPVFRTHEMFINAIKQYLCVALSKNGVSSVPDVFELSLAIFLTLLSNFKMHLKMQIEVFFKEIFLNILETSTSSFEHRWMVIQTLTRICADAQCVVDIYVNYDCDLNAANIFERLVNDLSKIAQGRSGHELGMTPLQELSLRKKGLECLVSILKCMVEWSKDLYVNPNHQTSLGQERLTDQEIGDGKGLDMARRCSVTSMESTVSSGTQTTVQDDPEQFEVIKQQKEIIEHGIELFNKKPKRGIQFLQEQGMLGTSVEDIAQFLHQEERLDSTQVGDFLGDSARFNKEVMYAYVDQLDFCEKEFVSALRTFLEGFRLPGEAQKIDRLMEKFAARYIECNQGQTLFASADTAYVLAYSIIMLTTDLHSPQVKNKMTKEQYIKMNRGINDSKDLPEEYLSSIYEEIEGKKIAMKETKELTIATKSTKQNVASEKQRRLLYNLEMEQMAKTAKALMEAVSHAKAPFTSATHLDHVRPMFKLVWTPLLAAYSIGLQNCDDTEVASLCLEGIRCAIRIACIFGMQLERDAYVQALARFSLLTASSSITEMKQKNIDTIKTLITVAHTDGNYLGNSWHEILKCISQLELAQLIGTGVKTRYLSGSGREREGSLKGHTLAGEEFMGLGLGNLVSGGVDKRQMASFQESVGETSSQSVVVAVDRIFTGSTRLDGNAIVDFVRWLCAVSMDELASPHHPRMFSLQKIVEISYYNMNRIRLQWSRIWHVIGDHFNKVGCNPNEDVAIFAVDSLRQLSMKFLEKGELANFRFQKDFLRPFEHIMKKNRSPTIRDMAIRCIAQMVNSQAANIRSGWKNIFAVFHQAASDHDGNIVELAFQTTCHIVTTIFQHHFPAAIDSFQDAVKCLSEFACNAAFPDTSMEAIRLIRFCGKYVSERPRVLQEYTSDDMNVAPGDRVWVRGWFPILFELSCIINRCKLDVRTRGLTVMFEIMKSYGHTFEKHWWQDLFRIVFRIFDNMKLPEQLSEKSEWMTTTCNHALYAICDVFTQFYEALNEVLLSDVFAQLQWCVKQDNEQLARSGTNCLENLVISNGEKFSPEVWDETCNCMLDIFKTTIPHVLLTWRPVGMEEDSSEKHLDVDLDRQSLSSIDKNPSERGQSQLSNPTDDSWKGRPYANQKLFASLLIKCVVQLELIQTIDNIVFYPATSKKEDAEHMVAAQQDTLDADIHIETEDQGMYKYMSSQHLFKLLDCLQESHSFSKAFNSNYEQRTVLWRAGFKGKSKPNLLKQETSSLACCLRILFRMYVDENRRDSWEEIQQRLLTVCSEALAYFITVNSESHREAWTSLLLLLLTKTLKINDEKFKAHASMYYPYLCEIMQFDLIPELRAVLRKFFLRIGVVYKIWIPEEPSQVPAALSPVW

SEQ ID NO: 9025 - protein, 512 aa, Homo sapiens
MVPSFLSLSFSSLGLWASGLILVLGFLKLIHLLLRRQTLAKAMDKFPGPPTHWLFGHALEIQETGSLDKVVSWAHQFPYAHPLWFGQFIGFLNIYEPDYAKAVYSRGDPKAPDVYDFFLQWIGRGLLVLEGPKWLQHRKLLTPGFHYDVLKPYVAVFTESTRIMLDKWEEKAREGKSFDIFCDVGHMALNTLMKCTFGRGDTGLGHSRDSSYYLAVSDLTLLMQQRLVSFQYHNDFIYWLTPHGRRFLRACQVAHDHTDQVIRERKAALQDEKVRKKIQNRRHLDFLDILLGARDEDDIKLSDADLRAEVDTFMFEGHDTTTSGISWFLYCMALYPEHQHRCREEVREILGDQDFFQWDDLGKMTYLTMCIKESFRLYPPVPQVYRQLSKPVTFVDGRSLPAGSLISMHIYALHRNSAVWPDPEVFDSLRFSTENASKRHPFAFMPFSAGPRNCIGQQFAMSEMKVVTAMCLLRFEFSLDPSRLPIKMPQLVLRSKNGFHLHLKPLGPGSGK

SEQ ID NO: 9026 - protein, 436 aa, Homo sapiens
MDQPFTVNSLKKLAAMPDHTDVSLSPEERVRALSKLGCNITISEDITPRRYFRSGVEMERMASVYLEEGNLENAFVLYNKFITLFVEKLPNHRDYQQCAVPEKQDIMKKLKEIAFPRTDELKNDLLKKYNVEYQEYLQSKNKYKAEILKKLEHQRLIEAERKRIAQMRQQQLESEQFLFFEDQLKKQELARGQMRSQQTSGLSEQIDGSALSCFSTHQNNSLLNVFADQPNKSDATNYASHSPPVNRALTPAATLSAVQNLVVEGLRCVVLPEDLCHKFLQLAESNTVRGIETCGILCGKLTHNEFTITHVIVPKQSAGPDYCDMENVEELFNVQDQHDLLTLGWIHTHPTQTAFLSSVDLHTHCSYQLMLPEAIAIVCSPKHKDTGIFRLTNAGMLEVSACKKKGFHPHTKEPRLFSICKHVLVKDIKIIVLDLR

SEQ ID NO: 9027 - protein, 495 aa, Homo sapiens
MKKRKELNALIGLAGDSRRKKPKKGPSSHRLLRTEPPDSDSESSSEEEEEFGVVGNRSRFAKGDYLRCCKICYPLCGFVILAACVVACVGLVWMQVALKEDLDALKEKFRTMESNQKSSFQEIPKLNEELLSKQKQLEKIESGEMGLNKVWINITEMNKQISLLTSAVNHLKANVKSAADLISLPTTVEGLQKSVASIGNTLNSVHLAVEALQKTVDEHKKTMELLQSDMNQHFLKETPGSNQIIPSPSATSELDNKTHSENLKQDILYLHNSLEEVNSALVGYQRQNDLKLEGMNETVSNLTQRVNLIESDVVAMSKVEKKANLSFSMMGDRSATLKRQSLDQVTNRTDTVKIQSIKKEDSSNSQVSKLREKLQLISALTNKPESNRPPETADEEQVESFTSKPSALPKFSQFLGDPVEKAAQLRPISLPGVSSTEDLQDLFRKTGQDVDGKLTYQEIWTSLGSAMPEPESLRAFDSDGDGRYSFLELRVALGI

SEQ ID NO: 9028 - protein, 422 aa, Homo sapiens
MGKAKVPASKRAPSSPVAKPGPVKTLTRKKNKKKKRFWKSKAREVSKKPASGPGAVVRPPKAPEDFSQNWKALQEWLLKQKSQAPEKPLVISQMGSKKKPKIIQQNKKETSPQVKGEEMPAGKDQEASRGSVPSGSKMDRRAPVPRTKASGTEHNKKGTKERTNGDIVPERGDIEHKKRKAKEAAPAPPTEEDIWFDDVDPADIEAAIGPEAAKIARKQLGQSEGSVSLSLVKEQAFGGLTRALALDCEMVGVGPKGEESMAARVSIVNQYGKCVYDKYVKPTEPVTDYRTAVSGIRPENLKQGEELEVVQKEVAEMLKGRILVGHALHNDLKVLFLDHPKKKIRDTQKYKPFKSQVKSGRPSLRLLSEKILGLQVQQAEHCSIQDAQAAMRLYVMVKKEWESMARDRRPLLTAPDHCSDDA

SEQ ID NO: 9029 - protein, 315 aa, Homo sapiens
MAQVLIVGAGMTGSLCAALLRRQTSGPLYLAVWDKAEDSGGRMTTACSPHNPQCTADLGAQYITCTPHYAKKHQRFYDELLAYGVLRPLSSPIEGMVMKEGDCNFVAPQGISSIIKHYLKESGAEVYFRHRVTQINLRDDKWEVSKQTGSPEQFDLIVLTMPVPEILQLQGDITTLISECQRQQLEAVSYSSRYALGLFYEAGTKIDVPWAGQYITSNPCIRFVSIDNKKRNIESSEIGPSLVIHTTVPFGVTYLEHSIEDVQELVFQQLENILPGLPQPIATKCQKWRHSQVPSAGVILGCAKSPWMMAIGFPI

SEQ ID NO: 9030 - protein, 403 aa, Homo sapiens [sequence omitted]

SEQ ID NO: 9031 - protein, 1084 aa, Homo sapiens
MRNSEEQPSGGTTVLQRLLQEQLRYGNPSENRSLLAIHQQATGNGPPFPSGSGNPGPQSDVLSPQDHHQQLVAHAARQEPQGQEIQSENLIMEKQLSPRMQNNEELPTYEEAKVQSQYFRGQQHASVGAAFYVTGVTNQKMRTEGRPSVQRLNPGKMHQDEGLRDLKQGHVRSLSERLMQMSLATSGVKAHPPVTSAPLSPPQPNDLYKNPTSSSEFYKAQGPLPNQHSLKGMEHRGPPPEYPFKGMPPQSVVCKPQEPGHFYSEHRLNQPGRTEGQLMRYQHPPEYGAARPAQDISLPLSARNSQPHSPTSSLTSGGSLPLLQSPPSTRLSPARHPLVPNQGDHSAHLPRPQQHFLPNQAHQGDHYRLSQPGLSQQQQQQQQQHHHHHHHQQQQQQQPQQQPGEAYSAMPRAQPSSASYQPVPADPFAIVSRAQQMVEILSDENRNLRQELEGCYEKVARLQKVETEIQRVSEAYENLVKSSSKREALEKAMRNKLEGEIRRMHDFNRDLRERLETANKQLAEKEYEGSEDTRKTISQLFAKNKESQREKEKLEAELATARSTNEDQRRHIEIRDQALSNAQAKVVKLEEELKKKQVYVDKVEKMQQALVQLQAACEKREQLEHRLRTRLERELESLRIQQRQGNCQPTNVSEYNAAALMELLREKEERILALEADMTKWEQKYLEENVMRHFALDAAATVAAQRDTTVISHSPNTSYDTALEARIQKEEEEILMANKRCLDMEGRIKTLHAQIIEKDAMIKVLQQRSRKEPSKTEQLSCMRPAKSLMSISNAGSGLLSHSSTLTGSPIMEEKRDDKSWKGSLGILLGGDYRAEYVPSTPSPVPPSTPLLSAHSKTGSRDCSTQTERGTESNKTAAVAPISVPAPVAAAATAAAITATAATITTTMVAAAPVAVAAAAAPAAAAAPSPATAAATAAAVSPAAAGQIPAAASVASAAAVAPSAAAAAAVQVAPAAPAPVPAPALVPVPAPAAAQASAPAQTQAPTSAPAVAPTPAPTPTPAVAQAEVPASPATGPGPHRLSIPSLTCNPDKTDGPVFHSNTLERKTPIQILGQEPDAEMVEYLI

SEQ ID NO: 9032 - protein, 300 aa, Homo sapiens
MAAVAALQLGLRAAGLGRAPASAAWRSVLRVSPRPGVAWRPSRCGSSAAEASATKAEDDSFLQWVLLLIPVTAFGLGTWQVQRRKWKLNLIAELESRVLAEPVPLPADPMELKNLEYRPVKVRGCFDHSKELYMMPRTMVDPVREAREGGLISSSTQSGAYVVTPFHCTDLGVTILVNRGFVPRKKVNPETRQKGQIEGEVDLIGMVRLTETRQPFVPENNPERNHWHYRDLEAMARITGAEPIFIDANFQSTVPGGPIGGQTRVTLRNEHLQYIVTWYGLSAATSYLWFKKFLRGTPGV

SEQ ID NO: 9033 - protein, 165 aa, Homo sapiens
MKCVFVTVGTTSFDDLIACVSAPDSLQKIESLGYNRLILQIGRGTVVPEPFSTESFTLDVYRYKDSLKEDIQKADLVISHAGAGSCLETLEKGKPLVVVINEKLMNNHQLELAKQLHKEGHLFYCTCSTLPGLLQSMDLSTLKCYPPGQPEKFSAFLDKVVGLQK

SEQ ID NO: 9034 - protein, 660 aa, Homo sapiens
MDDWKPSPLIKPFGARKKRSWYLTWKYKLTNQRALRRFCQTGAVLFLLVTVIVNIKLILDTRRAISEANEDPEPEQDYDEALGRLEPPRRRGSGPRRVLDVEVYSSRSKVYVAVDGTTVLEDEAREQGRGIHVIVLNQATGHVMAKRVFDTYSPHEDEAMVLFLNMVAPGRVLICTVKDEGSFHLKDTAKALLRSLGSQAGPALGWRDTWAFVGRKGGPVFGEKHSKSPALSSWGDPVLLKTDVPLSSAEEAECHWADTELNRRRRRFCSKVEGYGSVCSCKDPTPIEFSPDPLPDNKVLNVPVAVIAGNRPNYLYRMLRSLLSAQGVSPQMITVFIDGYYEEPMDVVALFGLRGIQHTPISIKNARVSQHYKASLTATFNLFPEAKFAVVLEEDLDIAVDFFSFLSQSIHLLEEDDSLYCISAWNDQGYEHTAEDPALLYRVETMPGLGWVLRRSLYKEELEPKWPTPEKLWDWDMWMRMPEQRRGRECIIPDVSRSYHFGIVGLNMNGYFHEAYFKKHKFNTVPGVQLRNVDSLKKEAYEVEVHRLLSEAEVLDHSKNPCEDSFLPDTEGHTYVAFIRMEKDDDFTTWTQLAKCLHIWDLDVRGNHRGLWRLFRKKNHFLMVGVPASPYSVKKPPSVTPIFLEPPPKEEGAPGAPEQT

SEQ ID NO: 9035 - protein, 269 aa, Homo sapiens
MGQNDLMGTAEDFADQFLRVTKQYLPHVARLCLISTFLEDGIRMWFQWSEQRDYIDTTWNCGYLLASSFVFLNLLGQLTGCVLVLSRNFVQYACFGLFGIIALQTIAYSILWDLKFLMRNLALGGGLLLLLAESRSEGKSMFAGVPTMRESSPKQYMQLGGRVLLVLMFMTLLHFDASFFSIVQNIVGTALMILVAIGFKTKLAALTLVVWLFAINVYFNAFWTIPVYKPMHDFLKYDFFQTMSVIGGLLLVVALGPGGVSMDEKKKEW

SEQ ID NO: 9036 - protein, 487 aa, Homo sapiens
MLRAPGCLLRTSVAPAAALAAALLSSLARCSLLEPRDPVASSLSPYFGTKTRYEDVNPVLLSGPEAPWRDPELLEGTCTPVQLVALIRHGTRYPTVKQIRKLRQLHGLLQARGSRDGGASSTGSRDLGAALADWPLWYADWMDGQLVEKGRQDMRQLALRLASLFPALFSRENYGRLRLITSSKHRCMDSSAAFLQGLWQHYHPGLPPPDVADMEFGPPTVNDKLMRFFDHCEKFLTEVEKNATALYHVEAFKTGPEMQNILKKVAATLQVPVNDLNADLIQVAFFTCSFDLAIKGVKSPWCDVFDIDDAKVLEYLNDLKQYWKRGYGYTINSRSSCTLFQDIFQHLDKAVEQKQRSQPISSPVILQFGHAETLLPLLSLMGYFKDKEPLTAYNYKKQMHRKFRSGLIVPYASNLIFVLYHCENAKTPKEQFRVQMLLNEKVLPLAYSQETVSFYEDLKNHYKDILQSCQTSEECELARANSTSDEL

SEQ ID NO: 9037 - protein, 1420 aa, Homo sapiens
MSGLGENLDPLASDSRKRKLPCDTPGQGLTCSGEKRRREQESKYIEELAELISANLSDIDNFNVKPDKCAILKETVRQIRQIKEQGKTISNDDDVQKADVSSTGQGVIDKDSLGPLLLQALDGFLFVVNRDGNIVFVSENVTQYLQYKQEDLVNTSVYNILHEEDRKDFLKNLPKSTVNGVSWTNETQRQKSHTFNCRMLMKTPHDILEDINASPEMRQRYETMQCFALSQPRAMMEEGEDLQSCMICVARRITTGERTFPSNPESFITRHDLSGKVVNIDTNSLRSSMRPGFEDIIRRCIQRFFSLNDGQSWSQKRHYQEAYLNGHAETPVYRFSLADGTIVTAQTKSKLFRNPVTNDRHGFVSTHFLQREQNGYRPNPNPVGQGIRPPMAGCNSSVGGMSMSPNQGLQMPSSRAYGLADPSTTGQMSGARYGGSSNIASLTPGPGMQSPSSYQNNNYGLNMSSPPHGSPGLAPNQQNIMISPRNRGSPKIASHQFSPVAGVHSPMASSGNTGNHSFSSSSLSALQAISEGVGTSLLSTLSSPGPKLDNSPNMNITQPSKVSNQDSKSPLGFYCDQNPVESSMCQSNSRDHLSDKESKESSVEGAENQRGPLESKGHKKLLQLLTCSSDDRGHSSLTNSPLDSSCKESSVSVTSPSGVSSSTSGGVSSTSNMHGSLLQEKHRILHKLLQNGNSPAEVAKITAEATGKDTSSITSCGDGNVVKQEQLSPKKKENNALLRYLLDRDDPSDALSKELQPQVEGVDNKMSQCTSSTIPSSSQEKDPKIKTETSEEGSGDLDNLDAILGDLTSSDFYNNSISSNGSHLGTKQQVFQGTNSLGLKSSQSVQSIRPPYNRAVSLDSPVSVGSSPPVKNISAFPMLPKQPMLGGNPRMMDSQENYGSSMGGPNRNVTVTQTPSSGDWGLPNSKAGRMEPMNSNSMGRPGGDYNTSLPRPALGGSIPTLPLRSNSIPGARPVLQQQQQMLQMRPGEIPMGMGANPYGQAAASNQLGSWPDGMLSMEQVSHGTQNRPLLRNSLDDLVGPPSNLEGQSDERALLDQLHTLLSNTDATGLEEIDRALGIPELVNQGQALEPKQDAFQGQEAAVMMDQKAGLYGQTYPAQGPPMQGGFHLQGQSPSFNSMMNQMNQQGNFPLQGMHPRANIMRPRTNTPKQLRMQLQQRLQGQQFLNQSRQALELKMENPTAGGAAVMRPMMQPQQGFLNAQMVAQRSRELLSHHFRQQRVAMMMQQQQQQQQQQQQQQQQQQQQQQQQQQQQQTQAFSPPPNVTASPSMDGLLAGPTMPQAPPQQFPYQPNYGMGQQPDPAFGRVSSPPNAMMSSRMGPSQNPMMQHPQAASIYQSSEMKGWPSGNLARNSSFSQQQFAHQGNPAVYSMVHMNGSSGHMGQMNMNPMPMSGMPMGPDQKYC

SEQ ID NO: 9038 - protein, 266 aa, Homo sapiens [sequence omitted]

SEQ ID NO: 9039 - protein, 76 aa, Homo sapiens
MASKGLQDLKQQVEGTAQEAVSAAGAAAQQVVDQATEAGQKAMDQLAKTTQETIDKTANQASDTFSGIGKKFGLLK

SEQ ID NO: 9040 - protein, 145 aa, Homo sapiens [sequence omitted]

SEQ ID NO: 9041 - protein, 361 aa, Homo sapiens
MASLLAKDAYLQSLAKKICSHSAPEQQARTRAGKTQGSETAGPPKKKRKKTQKKFRKREEKAAEHKAKSLGEKSPAASGARRPEAAKEEAAWASSSAGNPADGLATEPESVFALDVLRQRLHEKIQEARGQGSAKELSPAALEKRRRRKQERDRKKRKRKELRAKEKARKAEEATEAQEVVEATPEGACTEPREPPGLIFNKVEVSEDEPASKAQRRKEKRQRVKGNLTPLTGRNYRQLLERLQARQSRLDELRGQDEGKAQELEAKMKWTNLLYKAEGVKIRDDERLLQEALKRKEKRRAQRQRRWEKRTAGVVEKMQQRQDRRRQNLRRKKAARAERRLLRARKKGRILPQDLERAGLV

SEQ ID NO: 9042 - protein, 247 aa, Homo sapiens
MLRFIQKFSQASSKILKYSFPVGLRTSRTDILSLKMSLQQNFSPCPRPWLSSSFPAYMSKTQCYHTSPCSFKKQQKQALLARPSSTITYLTDSPKPALCVTLAGLIPFVAPPLVMLMTKTYIPILAFTQMAYGASFLSFLGGIRWGFALPEGSPAKPDYLNLASSAAPLFFSWFAFLISERLSEAIVTVIMGMGVAFHLELFLLPHYPNWFKALRIVVTLLATFSFIITLVVKSSFPEKGHKRPGQV

SEQ ID NO: 9043 - protein, 949 aa, Homo sapiens
MILSLLFSLGGPLGWGLLGAWAQASSTSLSDLQSSRTPGVWKAEAEDTGKDPVGRNWCPYPMSKLVTLLALCKTEKFLIHSQQPCPQGAPDCQKVKVMYRMAHKPVYQVKQKVLTSLAWRCCPGYTGPNCEHHDSMAIPEPADPGDSHQEPQDGPVSFKPGHLAAVINEVEVQQEQQEHLLGDLQNDVHRVADSLPGLWKALPGNLTAAVMEANQTGHEFPDRSLEQVLLPHVDTFLQVHFSPIWRSFNQSLHSLTQAIRNLSLDVEANRQAISRVQDSAVARADFQELGAKFEAKVQENTQRVGQLRQDVEDRLHAQHFTLHRSISELQADVDTKLKRLHKAQEAPGTNGSLVLATPGAGARPEPDSLQARLGQLQRNLSELHMTTARREEELQYTLEDMRATLTRHVDEIKELYSESDETFDQISKVERQVEELQVNHTALRELRVILMEKSLIMEENKEEVERQLLELNLTLQHLQGGHADLIKYVKDCNCQKLYLDLDVIREGQRDATRALEETQVSLDERRQLDGSSLQALQNAVDAVSLAVDAHKAEGERARAATSRLRSQVQALDDEVGALKAAAAEARHEVRQLHSAFAALLEDALRHEAVLAALFGEEVLEEMSEQTPGPLPLSYEQIRVALQDAASGLQEQALGWDELAARVTALEQASEPPRPAEHLEPSHDAGREEAATTALAGLARELQSLSNDVKNVGRCCEAEAGAGAASLNASLHGLHNALFATQRSLEQHQRLFHSLFGNFQGLMEANVSLDLGKLQTMLSRKGKKQQKDLEAPRKRDKKEAEPLVDIRVTGPVPGALGAALWEAGSPVAFYASFSEGTAALQTVKFNTTYINIGSSYFPEHGYFRAPERGVYLFAVSVEFGPGPGTGQLVFGGHHRTPVCTTGQGSGSTATVFAMAELQKGERVWFELTQGSITKRSLSGTAFGGFLMFKT

SEQ ID NO: 9044 - protein, 220 aa, Homo sapiens [sequence omitted]

SEQ ID NO: 9045 - protein, 170 aa, Homo sapiens
MKTLFLGVTLGLAAALSFTLEEEDITGTWYVKAMVVDKDFPEDRRPRKVSPVKVTALGGGKLEATFTFMREDRCIQKKILMRKTEEPGKYSAYGGRKLMYLQELPRRDHYIFYCKDQHHGGLLHMGKLVGRNSDTNREALEEFKKLVQRKGLSEEDIFTPLQTGSCVPEH

SEQ ID NO: 9046 - protein, 532 aa, Homo sapiens
MPQLYIYIRLLGAYLFIISRVQGQNLDSMLHGTGMKSDSDQKKSENGVTLAPEDTLPFLKCYCSGHCPDDAINNTCITNGHCFAIIEEDDQGETTLASGCMKYEGSDFQCKDSPKAQLRRTIECCRTNLCNQYLQPTLPPVVIGPFFDGSIRWLVLLISMAVCIIAMIIFSSCFCYKHYCKSISSRRRYNRDLEQDEAFIPVGESLKDLIDQSQSSGSGSGLPLLVQRTIAKQIQMVRQVGKGRYGEVWMGKWRGEKVAVKVFFTTEEASWFRETEIYQTVLMRHENILGFIAADIKGTGSWTQLYLITDYHENGSLYDFLKCATLDTRALLKLAYSAACGLCHLHTEIYGTQGKPAIAHRDLKSKNILIKKNGSCCIADLGLAVKFNSDTNEVDVPLNTRVGTKRYMAPEVLDESLNKNHFQPYIMADIYSFGLIIWEMARRCITGGIVEEYQLPYYNMVPSDPSYEDMREVVCVKRLRPIVSNRWNSDECLRAVLKLMSECWAHNPASRLTALRIKKTLAKMVESQDVKI

SEQ ID NO: 9047 - protein, 458 aa, Homo sapiens
MRKKWKMGGMKYIFSLLFFLLLEGGKTEQVKHSETYCMFQDKKYRVGERWHPYLEPYGLVYCVNCICSENGNVLCSRVRCPNVHCLSPVHIPHLCCPRCPEDSLPPVNNKVTSKSCEYNGTTYQHGELFVAEGLFQNRQPNQCTQCSCSEGNVYCGLKTCPKLTCAFPVSVPDSCCRVCRGDGELSWEHSDGDIFRQPANREARHSYHRSHYDPPPSRQAGGLSRFPGARSHRGALMDSQQASGTIVQIVINNKHKHGQVCVSNGKTYSHGESWHPNLRAFGIVECVLCTCNVTKQECKKIHCPNRYPCKYPQKIDGKCCKVCPGKKAKEELPGQSFDNKGYFCGEETMPVYESVFMEDGETTRKIALETERPPQVEVHVWTIRKGILQHFHIEKISKRMFEELPHFKLVTRTTLSQWKIFTEGEAQISQMCSSRVCRTELEDLVKVLYLERSEKGHC

SEQ ID NO: 9048 - protein, 450 aa, Homo sapiens
MGGMKYIFSLLFFLLLEGGKTEQVKHSETYCMFQDKKYRVGERWHPYLEPYGLVYCVNCICSENGNVLCSRVRCPNVHCLSPVHIPHLCCPRCPDSLPPVNNKVTSKSCEYNGTTYQHGELFVAEGLFQNRQPNQCTQCSCSEGNVYCGLKTCPKLTCAFPVSVPDSCCRVCRGDGELSWEHSDGDIFRQPANREARHSYHRSHYDPPPSRQAGGLSRFPGARSHRGALMDSQQASGTIVQIVINNKHKHGQVCVSNGKTYSHGESWHPNLRAFGIVECVLCTCNVTKQECKKIHCPNRYPCKYPQKIDGKCCKVCPGKKAKELPGQSFDNKGYFCGEETMPVYESVFMEDGETTRKIALETERPPQVEVHVWTIRKGILQHFHIEKISKRMFEELPHFKLVTRTTLSQWKIFTEGEAQISQMCSSRVCRTELEDLVKVLYLERSEKGHC

SEQ ID NO: 9049 - protein, 296 aa, Homo sapiens
MAAGCCGVKKQKLSSSPPSGSGGGGGASSSSHCSGESQCRAGELGLGGAGTRLNGLGGLTGGGSGSGCTLSPPQGCGGGGGGIALSPPPSCGVGTLLSTPAAATSSSPSSSSAASSSSPGSRKMVVSAEMCCFCFDVLYCHLYGYQQPRTPRFTNEPYALKDSRFPPMTRDELPRLFCSVSLLTNFEDVCDYLDWEVGVHGIRIEFINEKGSKRTATYLPEVAKEQGWDHIQTIDSLLRKGGYKAPITNEFRKTIKLTRYRSEKMTLSYAEYLAHRQHHHFQNGIGHPLPPYNHYS

SEQ ID NO: 9050 - protein, 297 aa, Homo sapiens [sequence omitted]

SEQ ID NO: 9051 - protein, 147 aa, Homo sapiens
MNFLLSWVHWSLALLLYLHHAKWSQAAPMAEGGGQNHHEVVKFMDVYQRSYCHPIETLVDIFQEYPDEIEYIFKPSCVPLMRCGGCCNDEGLECVPTEESNITMQIMRIKPHQGQHIGEMSFLQHNKCECRPKKDRARQEKCDKPRR

SEQ ID NO: 9052 - protein, 753 aa, Homo sapiens
MGRLQLVVLGLTCCWAVASAAKLGAVYTEGGFVEGVNKKLGLLGDSVDIFKGIPFAAPTKALENPQPHPGWQGTLKAKNFKKRCLQATITQDSTYGDEDCLYLNIWVPQGRKQVSRDLPVMIWIYGGAFLMGSGHGANFLNNYLYDGEEIATRGNVIVVTFNYRVGPLGFLSTGDANLPGNYGLRDQHMAIAWVKRNIAAFGGDPNNITLFGESAGGASVSLQTLSPYNKGLIRRAISQSGVALSPWVIQKNPLFWAKKVAEKVGCPVGDAARMAQCLKVTDPRALTLAYKVPLAGLEYPMLHYVGFVPVIDGDFIPADPINLYANAADIDYIAGTNNMDGHIFASIDMPAINKGNKKVTEEDFYKLVSEFTITKGLRGAKTTFDVYTESWAQDPSQENKKKTVVDFETDVLFLVPTEIALAQHRANAKSAKTYAYLFSHPSRMPVYPKWVGADHADDIQYVFGKPFATPTGYRPQDRTVSKAMIAYWTNFAKTGDPNMGDSAVPTHWEPYTTENSGYLEITKKMGSSSMKRSLRTNFLRYWTLTYLALPTVTDQEATPVPPTGDSEATPVPPTGDSETAPVPPTGDSGAPPVPPTGDSGAPPVPPTGDSGAPPVPPTGDSGAPPVPPTGDSGAPPVPPTGDSGAPPVPPTGDSGAPPVPPTGDSGAPPVPPTGDAGPPPVPPTGDSGAPPVPPTGDSGAPPVTPTGDSETAPVPPTGDSGAPPVPPTGDSEAAPVPPTDDSKEAQMPAVIRF

SEQ ID NO: 9053 - protein, 1047 aa, Homo sapiens
MEEKTQIKTFLGSKLPKYGTKSVRSTLQPMPNGTPVNLLGTSKNSNVKSYIKNNGSDCPSSHSFNWRKANKYQLCAQGVEEPNNTQNSHDKIIDPEKRVPTQGMFDKNGIKGGLKSVSLFTSKLAKPSTMFVSSTEELNQKSFSGPSNLGKFTKGTLLGRTSYSSINTPKSQLNGFYGNRSAGSMQRPRANSCATRSSSGESLAQSPDSSKSINCEKMVRSQSFSHSIQNSFLPPSSITRSHSFNRAVDLTKPYQNQQLSIRVPLRSSMLTRNSRQPEVLNGNEHLGYGFNRPYAAGGKKLALPNGPGVTSTLGYRMVHPSLLKSSRSPFSGTMTVDGNKNSPADTCVEEDATVLAKDRAANKDQELIENESYRTKNNQTMKHDAKMRYLSDDVDDISLSSLSSSDKNDLSEDFSDDFIDIEDSNRTRITPEEMSLKEEKHENGPPQDMFDSPKENEKAFSKTDEWIDISVSDRSECTKHTSGNNLVSPDTDYRAGSSFELSPSDSSDGTYMWDEEGLEPIGNVHPVGSYESSEMNSIDILNNLESCDLEDDDLMLDVDLPEDAPLENVECDNMNRFDRPDRNVRQPQEGFWKRPPQRWSGQEHYHLSHPDHYHHHGKSDLSRGSPYRESPLGHFESYGGMPFFQAQKMFVDVPENTVILDEMTLRHMVQDCTAVKTQLLKLKRLLHQHDGSGSLHDIQLSLPSSPEPEDGDKVYKNEDLLNEIKQLKDEIKKKDEKIQLLELQLATQHICHQKCKEEKCTYADKYTQTPWRRIPPQVLQPSSSLPRPTDHTQGKLIKPQRIEARSECSIQDMHQGGAHPEESFTHVLHQESNYGLEEQPFSSGPQLTMDVAKSTPSEANLNITVNAQEPYHLANNQISDMQFIPTSLQTPPESSTVDQAKRVGRNQSPPVGYMSQPKSLQLLKPSILSSLVPPPVSESSPSRTPTCKKSPIITTCNSAKLQPTSSQTNLANNQNLKASKLRPPSGSFKQKQTNSPQLEPQSFQAKTSIPRPLTQRKEIMQNPNGNLHSGDCLASNRYSRLPKPKIH

SEQ ID NO: 9054 - protein, 510 aa, Homo sapiens
MAADSDDGAVSAPAASDGGVSKSTTSGEELVVQVPVVDVQSNNFKEMWPSLLLAIKTANFVAVDTELSGLGDRKSLLNQCIEERYKAVCHAARTRSILSLGLACFKRQPDKGEHSYLAQVFNLTLLCMEEYVIEPKSVQFLIQHGFNFNQQYAQGIPYHKGNDKGDESQSQSVRTLFLELIRARRPLVLHNGLIDLVFLYQNFYAHLPESLGTFTADLCEMFPAGIYDTKYAAEFHARFVASYLEYAFRKCERENGKQRAAGSPHLTLEFCNYPSSMRDHIDYRCCLPPATHRPHPTSICDNFSAYGWCPLGPQCPQSHDIDLIIDTDEAAAEDKRRRRRRREKRKRALLNLPGTQTSGEAKDGPPKKQVCGDSIKPEETEQEVAADETRNLPHSKQGNKNDLEMGIKAARPEIADRATSEVPGSQASPNPVPGDGLHRAGFDAFMTGYVMAYVEVSQGPQPCSSGPWLPECHNKVYLSGKAVPLTVAKSQFSRSSKAHNQKMKLTWGSS

SEQ ID NO: 9055 - protein, 519 aa, Homo sapiens
MAAEAADLGLGAAVPVELRRERRMVCVEYPGVVRDVAKMLPTLGGEEGVSRIYADPTKRLELYFRPKDPYCHPVCANRFSTSSLLLRIRKRTRRQKGVLGTEAHSEVTFDMEILGIISTIYKFQGMSDFQYLAVHTEAGGKHTSMYDKVLMLRPEKEAFFHQELPLYIPPPIFSRLDAPVDYFYRPETQHREGYNNPPISGENLIGLSRARRPHNAIFVNFEDEEVPKQPLEAAAQTWRRVCTNPVDRKVEEELRKLFDIRPIWSRNAVKANISVHPDKLKVLLPFIAYYMITGPWRSLWIRFGYDPRKNPDAKIYQVLDFRIRCGMKHGYAPSDLPVKAKRSTYNYSLPITVKKTSSQLVTMHDLKQGLGPSGTSGARKPASSKYKLKDSVYIFREGALPPYRQMFYQLCDLNVEELQKIIHRNDGAENSCTERDGWCLPKTSDELRDTMSLMIRQTIRSKRPALFSSSAKADGGKEQLTYESGEDEEDEEEEEEEEEDFKPSDGSENEMETEILDYV

SEQ ID NO: 9056 - protein, 623 aa, Homo sapiens
MRVALGMLWLLALAWPPQARGFCPSQCSCSLHIMGDGSKARTVVCNDPDMTLPPASIPPDTSRLRLERTAIRRVPGEAFRPLGRLEQLWLPYNALSELNALMLRGLRRLRELRLPGNRLAAFPWAALRDAPKLRLLDLQANRLSAVPAEAARFLENLTFLDLSSNQLMRLPQELIVSWAHLETGIFPPGHHPRRVLGLQDNPWACDCRLYDLVHLLDGWAPNLAFIETELRCASPRSLAGVAFSQLELRKCQGPELHPGVASIRSLLGGTALLRCGATGVPGPEMSWRRANGRPLNGTVHQEVSSDGTSWTLLGLPAVSHLDSGDYICQAKNFLGASETVISLIVTEPPTSTEHSGSPGALWARTGGGGEAAAYNNKLVARHVPQIPKPAVLATGPSVPSTKEELTLEHFQMDALGELSDGRAGPSEARMVRSVKVVGDTYHSVSLVWKAPQAKNTTAFSVLYAVFGQHSMRRVIVQPGKTRVTITGLLPKTKYVACVCVQGLVPRKEQCVIFSTNEVVDAENTQQLINVVVISVAIVIALPLTLLVCCSALQKRCRKCFNKDSTEATVTYVNLERLGYSEDGLEELSRHSVSEADRLLSARSSVDFQAFGVKGGRRINEYFC

SEQ ID NO: 9057 - protein, 550 aa, Homo sapiens
MASVFHYFLLVLVFLDTHAAQPFCLPGCTCSEESFGRTLQCTSVSLGKIPGNLSEEFKQVRIENSPLFEMPQGSFINMSTLEYLWLNFNNISVIHLGALEHLPELRELRLEGNKLCSVPWTAFRATPLLRVLDLKRNKIDALPELALQFLVSLTYLDLSSNRLTVVSKSVFLNWPAYQKCRQPDCGAEILSSLVVALHDNPWVCDCRLRGLVQFVKSITLPVILVNSYLICQGPLSKAGQLFHETELSACMKPQISTPSANITIRAGQNVTLRCLAQASPSPSIAWTYPLSMWREFDVLTSSTGEDTALSELAIPAAHLVDSGNYTCMASNSIGKSNLVISLHVQPAQALHAPDSLSIPSEGNAYIDLRVVKQTVHGILLEWLAVADTSKEEWFTLYIASDEAFRKEVVHIGPGINTYAVDDLLPGTKYEACLSLEGQPPHQGQCVAFVTGRDAGGLEAREHLLHVTVVLCVVLLAVPVGAYAWAAQGPCSCSKWVLRGCLHRRKAPSCTPAAPQSKDGSFREHPAVCDDGEGHIDTEGDKEKGGTEDNS

SEQ ID NO: 9058 - protein, 253 aa, Homo sapiens
MAAARATTPADGEEPAPEAEALAAARERSSRFLSGLELVKQGAEARVFRGRFQGRAAVIKHRFPKGYRHPALEARLGRRRTVQEARALLRCRRAGISAPVVFFVDYASNCLYMEEIEGSVTVRDYIQSTMETEKTPQGLSNLAKTIGQVLARMHDEDLIHGDLTTSNMLLKPPLEQLNIVLIDFGLSFISALPEDKGVDLYVLEKAFLSTHPNTETVFEAFLKSYSTSSKKARPVLKKLDEVRLRGRKRSMVG

SEQ ID NO: 9059 - protein, 81 aa, Homo sapiens
MRLLVLSSLLCILLLCFSIFSTEGKRRPAKAWSGRRTRLCCHRVPSPNSTNLKGHHVRLCKPCKLEPEPRLWVVPGALPQV

SEQ ID NO: 9060 - protein, 196 aa, Homo sapiens
MAALKALVSGCGRLLRGLLAGPAATSWSRLPARGFREVVETQEGKTTIIEGRITATPKESPNPPNPSGQCPICRWNLKHKYNYDDVLLLSQFIRPHGGMLPRKITGLCQEEHRKIEECVKMAHRAGLLPNHRPRLPEGVVPKSKPQLNRYLTRWAPGSVKPIYKKGPRWNRVRMPVGSPLLRDNVCYSRTPWKLYH

SEQ ID NO: 9061 - protein, 345 aa, Homo sapiens
MLAARLVCLRTLPSRVFHPAFTKASPVVKNSITKNQWLLTPSREYATKTRIGIRRGRTGQELKEAALEPSMEKIFKIDQMGRWFVAGGAAVGLGALCYYGLGLSNEIGAIEKAVIWPQYVKDRIHSTYMYLAGSIGLTALSAIAISRTPVLMNFMMRGSWVTIGVTFAAMVGAGMLVRSIPYDQSPGPKHLAWLLHSGVMGAVVAPLTILGGPLLIRAAWYTAGIVGGLSTVAMCAPSEKFLNMGAPLGVGLGLVFVSSLGSMFLPPTTVAGATLYSVAMYGGLVLFSMFLLYDTQKVIKRAEVSPMYGVQKYDPINSMLSIYMDTLNIFMRVATMLATGGNRKK

SEQ ID NO: 9062 - protein, 822 aa, Homo sapiens
MNTADQARVGPADDGPAPSGEEEGEGGGEAGGKEPAADAAPGPSAAFRLMVTRREPAVKLQYAVSGLEPLAWSEDHRVSVSTARSIAVLELICDVHNPGQDLVIHRTSVPAPLNSCLLKVGSKTEVAECKEKFAASKDPTVSQTFMLDRVFNPEGKALPPMRGFKYTSWSPMGCDANGRCLLAALTMDNRLTIQANLNRLQWVQLVDLTEIYGERLYETSYRLSKNEAPEGNLGDFAEFQRRHSMQTPVRMEWSGICTTQQVKHNNECRDVGSVLLAVLFENGNIAVWQFQLPFVGKESISSCNTIESGITSPSVLFWWEYEHNNRKMSGLIVGSAFGPIKILPVNLKAVKGYFTLRQPVILWKEMDQLPVHSIKCVPLYHPYQKCSCSLVVAARGSYVFWCLLLISKAGLNVHNSHVTGLHSLPIVSMTADKQNGTVYTCSSDGKVRQLIPIFTDVALKFEHQLIKLSDVFGSVRTHGIAVSPCGAYLAIITTEGMINGLHPVNKNYQVQFVTLKTFEEAAAQLLESSVQNLFKQVDLIDLVRWKILKDKHIPQFLQEALEKKIESSGVTYFWRFKLFLLRILYQSMQKTPSEALWKPTHEDSKILLVDSPGMGNADDEQQEEGTSSKQVVKQGLQERSKEGDVEEPTDDSLPTTGDAGGREPMEEKLLEIQGKIEAVEMHLTREHMKRVLGEVYLHTWITENTSIPTRGLCNFLMSDEEYDDRTARVLIGHISKKMNKQTFPEHCSLCKEILPFTDRKQAVCSNGHIWLRCFLTYQSCQSLIYRRCLLHDSIARHPAPEDPDWIKRLLQSPCPFCDSPVF

SEQ ID NO: 9063 - protein, 270 aa, Homo sapiens
MHYYRYSNAKVSCWYKYLLFSYNIIFWLAGVVFLGVGLWAWSEKGVLSDLTKVTRMHGIDPVVLVLMVGVVMFTLGFAGCVGALRENICLLNFFCGTIVLIFFLELAVAVLAFLFQDWVRDRFREFFESNIKSYRDDIDLQNLIDSLQKANQCCGAYGPEDWDLNVYFNCSGASYSREKCGVPFSCCVPDPAQKVVNTQCGYDVRIQLKSKWDESIFTKGCIQALESWLPRNIYIVAGVFIAISLLQIFGIFLARTLISDIEAVKAGHHF

SEQ ID NO: 9064 - protein, 276 aa, Homo sapiens
MDADSLLLSLELASGSGQGLSPDRRASLLTSLMLVKRDYRYDRVLFWGRILGLVADYYIAQGLSEDQLAPRKTLYSLNCTEWSLLPPATEEMVAQSSVVKGRFMGDPSYEYEHTELQKVNEGEKVFEEEIVVQIKEETRLVSVIDQIDKAVAIIPRGALFKTPFGPTHVNRTFEGLSLSEAKKLSSYFHFREPVELKNKTLLEKADLDPSLDFMDSLEHDIPKGSWSIQMERGNALVVLRSLLWPGLTFYHAPRTKNYGYVYVGTGEKNMDLPFML

SEQ ID NO: 9065 - protein, 274 aa, Homo sapiens
MAAPEAEVLSSAAVPDLEWYEKSEETHASQIELLETSSTQEPLNASEAFCPRDCMVPVVFPGPVSQEGCCQFTCELLKHIMYQRQQLPLPYEQLKHFYRKPSPQAEEMLKKKPRATTEVSSRKCQQALAELESVLSHLEDFFARTLVPRVLILLGGNALSPKEFYELDLSLLAPYSVDQSLSTAACLRRLFRAIFMADAFSELQAPPLMGTVVMAQGHRNCGEDWFRPKLNYRVPSRGHKLTVTLSCGRPSIRTTAWEDYIWFQAPVTFKGFRE

SEQ ID NO: 9066 - protein, 861 aa, Homo sapiens
MAGPGPGAVLESPRQLLGRVRFLAEAARSLRAGRPLPAALAFVPREVLYKLYKDPAGPSRVLLPVWEAEGLGLRVGAAGPAPGTGSGPLRAARDSIELRRGACVRTTGEELCNGHGLWVKLTKEQLAEHLGDCGLQEGWLLVCRPAEGGARLVPIDTPNHLQRQQQLFGVDYRPVLRWEQVVDLTYSHRLGSRPQPAEAYAEAVQRLLYVPPTWTYECDEDLIHFLYDHLGKEDENLGSVKQYVESIDVSSYTEEFNVSCLTDSNADTYWESDGSQCQHWVRLTMKKGTIVKKLLLTVDTTDDNFMPKRVVVYGGEGDNLKKLSDVSIDETLIGDVCVLEDMTVHLPIIEIRIVECRDDGIDVRLRGVKIKSSRQRELGLNADLFQPTSLVRYPRLEGTDPEVLYRRAVLLQRFIKILDSVLHHLVPAWDHTLGTFSEIKQVKQFLLLSRQRPGLVAQCLRDSESSKPSFMPRLYINRRLAMEHRACPSRDPACKNAVFTQVYEGLKPSDKYEKPLDYRWPMRYDQWWECKFIAEGIIDQGGGFRDSLADMSEELCPSSADTPVPLPFFVRTANQGNGTGEARDMYVPNPSCRDFAKYEWIGQLMGAALRGKEFLVLALPGFVWKQLSGEEVSWSKDFPAVDSVLVKLLEVMEGMDKETFEFKFGKELTFTTVLSDQQVVELIPGGAGIVVGYGDRSRFIQLVQKARLEESKEQVAAMQAGLLKVVPQAVLDLLTWQELEKKVCGDPEVTVDALRKLTRFEDFEPSDSRVQYFWEALNNFTNEDRSRFLRFVTGRSRLPARIYIYPDKLGYETTDALPESSTCSSTLFLPHYASAKVCEEKLRYAAYNCVAIDTDMSPWEE

SEQ ID NO: 9067 - protein, 422 aa, Homo sapiens
MLHLLALFLHCLPLASGDYDICKSWVTTDEGPTWEFYACQPKVMRLKDYVKVKVEPSGITCGDPPERFCSHENPYLCSNECDASNPDLAHPPRLMFDKEEEGLATYWQSITWSRYPSPLEANITLSWNKTVELTDDVVMTFEYGRPTVMVLEKSLDNGRTWQPYQFYAEDCMEAFGMSARRARDMSSSSAHRVLCTEEYSRWAGSKKEKHVRFEVRDRFAIFAGPDLRNMDNLYTRLESAKGLKEFFTLTDLRMRLLRPALGGTYVQRENLYKYFYAISNIEVIGRCKCNLHANLCSMREGSLQCECEHNTTGPDCGKCKKNFRTRSWRAGSYLPLPHGSPNACATAGSFGTLQTPPPGRSPSALRGSRRGLANVKEPAGSRPQISEMLLGCTVTLHQGSVGPHIPPKLSLPDPGGPWLGSQ

SEQ ID NO: 9068 - protein, 229 aa, Homo sapiens
MSFLQDPSFFTMGMWSIGAGALGAAALALLLANTDVFLSKPQKAALEYLEDIDLKTLEKEPRTFKAKELWEKNGAVIMAVRRPGCFLCREEAADLSSLKSMLDQLGVPLYAVVKEHIRTEVKDFQPYFKGEIFLDEKKKFYGPQRRKMMFMGFIRLGVWYNFFRAWNGGFSGNLEGEGFILGGVFVVGSGKQGILLEHREKEFGDKVNLLSVLEAAKMIKPQTLASEKK

SEQ ID NO: 9069 - protein, 218 aa, Homo sapiens
MGMWSIGAGALGAAALALLLANTDVFLSKPQKAALEYLEDIDLKTLEKEPRTFKAKELWEKNGAVIMAVRRPGCFLCREEAADLSSLKSMLDQLGVPLYAVVKEHIRTEVKDFQPYFKGEIFLDEKKKFYGPQRRKMMFMGFIRLGVWYNFFRAWNGGFSGNLEGEGFILGGVFVVGSGKQGILLEHREKEFGDKVNLLSVLEAAKMIKPQTLASEKK

SEQ ID NO: 9070 - protein, 646 aa, Homo sapiens
MEPAAGFLSPRPFQRAAAAPAPPAGPGPPPSALRGPELEMLAGLPTSDPGRLITDPRSGRTYLKGRLLGKGGFARCYEATDTETGSAYAVKVIPQSRVAKPHQREKILNEIELHRDLQHRHIVRFSHHFEDADNIYIFLELCSRKSLAHIWKARHTLLEPEVRYYLRQILSGLKYLHQRGILHRDLKLGNFFITENMELKVGDFGLAARLEPPEQRKKTICGTPNYVAPEVLLRQGHGPEADVWSLGCVMYTLLCGSPPFETADLKETYRCIKQVHYTLPASLSLPARQLLAAILRASPRDRPSIDQILRHDFFTKGYTPDRLPISSCVTVPDLTPPNPARSLFAKVTKSLFGRKKKSKNHAQERDEVSGLVSGLMRTSVGHQDARPEAPAASGPAPVSLVETAPEDSSPRGTLASSGDGFEEGLTVATVVESALCALRNCIAFMPPAEQNPAPLAQPEPLVWVSKWVDYSNKFGFGYQLSSRRVAVLFNDGTHMALSANRKTVHYNPTSTKHFSFSVGAVPRALQPQLGILRYFASYMEQHLMKGGDLPSVEEVEVPAPPLLLQWVKTDQALLMLFSDGTVQVNFYGDHTKLILSGWEPLLVTFVARNRSACTYLASHLRQLGCSPDLRQRLRYALRLLRDRSPA

SEQ ID NO: 9071 - protein, 395 aa, Homo sapiens
MNGPVDGLCDHSLSEGVFMFTSESVGEGHPDKICDQISDAVLDAHLKQDPNAKVACETVCKTGMVLLCGEITSMAMVDYQRVVRDTIKHIGYDDSAKGFDFKTCNVLVALEQQSPDIAQCVHLDRNEEDVGAGDQGLMFGYATDETEECMPLTIILAHKLNARMADLRRSGLLPWLRPDSKTQVTVQYMQDNGAVIPVRIHTIVISVQHNEDITLEEMRRALKEQVIRAVVPAKYLDEDTVYHLQPSGRFVIGGPQGDAGVTGRKIIVDTYGGWGAHGGGAFSGKDYTKVDRSAAYAARWVAKSLVKAGLCRRVLVQVSYAIGVAEPLSISIFTYGTSQKTERELLDVVHKNFDLRPGVIVRDLDLKKPIYQKTACYGHFGRSEFPWEVPRKLVF

SEQ ID NO: 9072 - protein, 1691 aa, Homo sapiens
MLINKLWLLLVTLCLTEELAAAGEKSYGKPCGGQDCSGSCQCFPEKGARGRPGPIGIQGPTGPQGFTGSTGLSGLKGERGFPGLLGPYGPKGDKGPMGVPGFLGINGIPGHPGQPGPRGPPGLDGCNGTQGAVGFPGPDGYPGLLGPPGLPGQKGSKGDPVLAPGSFKGMKGDPGLPGLDGITGPQGAPGFPGAVGPAGPPGLQGPPGPPGPLGPDGNMGLGFQGEKGVKGDVGLPGPAGPPPSTGELEFMGFPKGKKGSKGEPGPKGFPGISGPPGFPGLGTTGEKGEKGEKGIPGLPGPRGPMGSEGVQGPPGQQGKKGTLGFPGLNGFQGIEGQKGDIGLPGPDVFIDIDGAVISGNPGDPGVPGLPGLKGDEGIQGLRGPSGVPGLPALSGVPGALGPQGFPGLKGDQGNPGRTTIGAAGLPGRDGLPGPPGPPGPPSPEFETETLHNKESGFPGLRGEQGPKGNLGLKGIKGDSGFCACDGGVPNTGPPGEPGPPGPWGLIGLPGLKGARGDRGSGGAQGPAGAPGLVGPLGPSGPKGKKGEPILSTIQGMPGDRGDSGSQGFRGVIGEPGKDGVPGLPGLPGLPGDGGQGFPGEKGLPGLPGEKGHPGPPGLPGNGLPGLPGPRGLPGDKGKDGLPGQQGLPGSKGITLPCIIPGSYGPSGFPGTPGFPGPKGSRGLPGTPGQPGSSGSKGEPGSPGLVHLPELPGFPGPRGEKGLPGFPGLPGKDGLPGMIGSPGLPGSKGATGDIFGAENGAPGEQGLQGLTGHKGFLGDSGLPGLKGVHGKPGLLGPKGERGSPGTPGQVGQPGTPGSSGPYGIKGKSGLPGAPGFPGISGHPGKKGTRGKKGPPGSIVKKGLPGLKGLPGNPGLVGLKGSPGSPGVAGLPALSGPKGEKGSVGFVGFPGIPGLPGIPGTRGLKGIPGSTGKMGPSGRAGTPGEKGDRGNPGPVGIPSPRRPMSNLWLKGDKGSQGSAGSNGFPGPRGDKGEAGRPGPPGLPGAPGLPGIIKGVSGKPGPPGFMGIRGLPGLKGSSGITGFPGMPGESGSQGIRGSPGLPGASGLPGLKGDNGQTVEISGSPGPKGQPGESGFKGTKGRDGLIGNIGFPGNKGEDGKVGVSGDVGLPGAPGFPGVAGMRGEPGLPGSSGHQGAIGPLGSPGLIGPKGFPGFPGLHGLNGLPGTKGTHGTPGPSITGVPGPAGLPGPKGEKGYPGIGIGAPGKPGLRGQKGDRGFPGLQGPAGLPGAPGISLPSLIAGQPGDPGRPGLDGERGRPGPAGPPGPPGPSSNQGDTGDPGFPGIPGPKGPKGDQGIPGFSGLPGELGLKGMRGEPGFMGTPGKVGPPGDPGFPGMKGKAGPRGSSGLQGDPGQTPTAEAVQVPPGPLGLPGIDGIPGLTGDPGAQGPVGLQGSKGLPGIPGKDGPSGLPGPPGALGDPGLPGLQGPPGFEGAPGQQGPFGMPGMPGQSMRVGYTLVKHSQSEQVPPCPIGMSQLWVGYSLLFVEGQEKAHNQDLGFAGSCLPRFSTMPFIYCNINEVCHYARRNDKSYWLSTTAPIPMMPVSQTQIPQYISRCSVCEAPSQAIAVHSQDITIPQCPLGWRSLWIGYSFLMHTAAGAEGGGQSLVSPGSCLEDFRATPFIECSGARGTCHYFANKYSFWLTTVEERQQFGELPVSETLKAGQLHTRVSRCQVCMKSL

SEQ ID NO: 9073 - protein, 747 aa, Homo sapiens
MWGFLKRPVVVTADINLSLVALTGMGLLSRLWRLTYPRAVVFDEVYYGQYISFYMKQIFFLDDSGPPFGHMVLALGGYLGGFDGNFLWNRIGAEYSSNVPVWSLRLLPALAGALSVPMAYQIVLELHFSHCAAMGAALLMLIENALITQSRLMLLESVLIFFNLLAVLSYLKFFNCQKHSPFSLSWWFWLTLTGVACSCAVGIKYMGVFTYVLVLGVAAVHAWHLLGDQTLSNVGADVQCCMRPACMGQMQMSQGVCVFCHLLARAVALLVIPVVLYLLFFYVHLILVFRSGPHDQIMSSAFQASLEGGLARITQGQPLEVAFGSQVTLRNVFGKPVPCWLHSHQDTYPMIYENGRGSSHQQQVTCYPFKDVNNWWIVKDPRRHQLVVSSPPRPVRHGDMVQLVHGMTTRSLNTHDVAAPLSPHSQEVSCYIDYNISMPAQNLWRLEIVNRGSDTDVWKTILSEVRFVHVNTSAVLKLSGAHLPDWGYRQLEIVGEKLSRGYHGSTVWNVEEHRYGASQEQRERERELHSPAQVDVSRNLSFMARFSELQWRMLALRSDDSEHKYSSSPLEWVTLDTNIAYWLHPRTSAQIHLLGNIVIWVSGSLALAIYALLSLWYLLRRRRNVHDLPQDAWLRWVLAGALCAGGWAVNYLPFFLMEKTLFLYHYLPALTFQILLLPVVLQHISDHLCRSQLQRSIFSALVVAWYSSACHVSNTLRPLTYGDKSLSPHELKALRWKDSWDILIRKH

SEQ ID NO: 9074 - protein, 505 aa, Homo sapiens
MSYPGYPPPPGGYPPAAPGGGPWGGAAYPPPPSMPPIGLDNVATYAGQFNQDYLSGMAANMSGTFGGANMPNLYPGAPGAGYPPVPPGGFGQPPSAQQPVPPYGMYPPPGGNPPSRMPSYPPYPGAPVPGQPMPPPGQQPPGAYPGQPPVTYPGQPPVPLPGQQQPVPSYPGYPGSGTVTPAVPPTQFGSRGTITDAPGFDPLRDAEVLRKAMKGFGTDEQAIIDCLGSRSNKQRQQILLSFKTAYGKDLIKDLKSELSGNFEKTILALMKTPVLFDIYEIKEAIKGVGTDEACLIEILASRSNEHIRELNRAYKAEFKKTLEEAIRSDTSGHFQRLLISLSQGNRDESTNVDMSLAQRDAQELYAAGENRLGTDESKFNAVLCSRSRAHLVAVFNEYQRMTGRDIEKSICREMSGDLEEGMLAVVKCLKNTPAFFAERLNKAMRGAGTKDRTLIRIMVSRSETDLLDIRSEYKRMYGKSLYHDISGDTSGDYRKILLKICGGND

SEQ ID NO: 9075 - protein, 713 aa, Homo sapiens
MATGQDRVVALVDMDCFFVQVEQRQNPHLRNKPCAVVQYKSWKGGGIIAVSYEARAFGVTRSMWADDAKKLCPDLLLAQVRESRGKANLTKYREASVEVMEIMSRFAVIERASIDEAYVDLTSAVQERLQKLQGQPISADLLPSTYIEGLPQGPTTAEETVQKEGMRKQGLFQWLDSLQIDNLTSPDLQLTVGAVIVEEMRAAIERETGFQCSAGISHNKVLAKLACGLNKPNRQTLVSHGSVPQLFSQMPIRKIRSLGGKLGASVIEILGIEYMGELTQFTESQLQSHFGEKNGSWLYAMCRGIEHDPVKPRQLPKTIGCSKNFPGKTALATREQVQWWLLQLAQELEERLTKDRNDNDRVATQLVVSIRVQGDKRLSSLRRCCALTRYDAHKMSHDAFTVIKNCNTSGIQTEWSPPLTMLFLCATKFSASAPSSSTDITSFLSSDPSSLPKVPVTSSEAKTQGSGPAVTATKKATTSLESFFQKAAERQKVKEASLSSLTAPTQAPMSNSPSKPSLPFQTSQSTGTEPFFKQKSLLLKQKQLNNSSVSSPQQNPWSNCKALPNSLPTEYPGCVPVCEGVSKLEESSKATPAEMDLAHNSQSMHASSASKSVLEVTQKATPNPSLLAAEDQVPCEKCGSLVPVWDMPEHMDYHFALELQKSFLQPHSSNPQVVSAVSHQGKRNPKSPLACTNKRPRPEGMQTLESFFKPLTH

SEQ ID NO: 9076 - protein, 337 aa, Homo sapiens
MATASPAADGGRGRPWEGGLVSWPPAPPLTLPWTWMGPSWGQHPGHWGFPALTEPSASPAAGLGIFEVRRVLDASGCSMLAPLQTGAARFSSYLLSRARKVLGSHLFSPCGVPEFCSISTRKLAAHGFGASMAAMVSFPPQRYHYFLVLDFEATCDKPQIHPQEIIEFPILKLNGRTMEIESTFHMYVQPVVHPQLTPFCTELTGIIQAMVDGQPSLQQVLERVDEWMAKEGLLDPNVKSIFVTCGDWDLKVMLPGQCQYLGLPVADYFKQWINLKKAYSFAMGCWPKNGLLDMNKGLSLQHIGRPHSGIDDCKNIANIMKTLAYRGFIFKQTSKPF

SEQ ID NO: 9077 - protein, 97 aa, Homo sapiens
MRPLLCALTGLALLRAAGSLAAAEPFSPPRGDSAQSTACDRHMAVQRRLDVMEEMVEKTVDHLGTEVKGLLGLLEELAWNLPPGPFSPAPDLLGDGF

SEQ ID NO: 9078 - protein, 87 aa, Homo sapiens
MRPLLCALTGLALLRAAGSLAAAEPFSPPRGDSAQSTACDRHMAVQRRLDVMEEMASEPWSWSPAVGGGAPARQRPQNQPCPLDFLP

SEQ ID NO: 9079 - protein, 280 aa, Homo sapiens
MTSYILISFVLLIGVGCIEKDQSCPVFGGRKRLHLLFVGGQLRQVRMLRGSPEASTDCCWLHQATGSGSVTQAGVQWYDLGSLQPLPPRFKRFSCLSLPSSWDYRSSWELPDLQEGKIQAISDSDGVNYPWYGNTTETCTIVGPTKRDSKFIISMNDNFYPSVTWAVPVSESNVAKLTNIYRDQSFTTWLVATNTSTNDMIILQTLHWRMQLSIEVNPNRPLGQRARLREPIAQDQPKILSKNEPIPPSALVKPNANDAQVLMWRPKYGQPLVVIPPKHR

SEQ ID NO: 9080 - protein, 55 aa, Homo sapiens
MAVQRRLDVMEEMVEKTVDHLGTEVKGLLGLLEELAWNLPPGPFSPAPDLLGDGF

SEQ ID NO: 9081 - protein, 103 aa, Homo sapiens
MATAAGATYFQRGSLFWFTVITLSFGYYTWVVFWPQSIPYQNLGPLGPFTQYLVDHHHTLLCNGYWLAWLIHVGESLYAIVLCKQNELRIRIKMRKLILRDSE

SEQ ID NO: 9082 - protein, 84 aa, Homo sapiens
MATAAGATYFQRGSLFWFTVITLSFGYYTWVVFWPQSIPYQNLGPLGPFTQYLVDHHHTLLCNGYWLAWLIHVGESLYAIVLCK

SEQ ID NO: 9083 - protein, 203 aa, Homo sapiens
MVRLPLQCVLWGCLLTAVHPEPPTACREKQYLINSQCCSLCQPGQKLVSDCTEFTETECLPCGESEFLDTWNRETHCHQHKYCDPNLGLRVQQKGTSETDTICTCEEGWHCTSEACESCVLHRSCSPGFGVKQIATGVSDTICEPCPVGFFSNVSSAFEKCHPWTRSPGSAESPGGDPHHLRDPVCHPLGAGLYQKGGQEANQ

SEQ ID NO: 9084 - protein, 123 aa, Homo sapiens
MATAAGATYFQRGSLFWFTVITLSFGYYTWVVFWPQSIPYQNLGPLGPFTQYLVDHHHTLLCNGYWLAWLIHVGESLYAIVLCKHKGITSGRAQLLWFLQTFFFGIASLTILIAYKRKRQKQT

SEQ ID NO: 9085 - protein, 277 aa, Homo sapiens
MVRLPLQCVLWGCLLTAVHPEPPTACREKQYLINSQCCSLCQPGQKLVSDCTEFTETECLPCGESEFLDTWNRETHCHQHKYCDPNLGLRVQQKGTSETDTICTCEEGWHCTSEACESCVLHRSCSPGFGVKQIATGVSDTICEPCPVGFFSNVSSAFEKCHPWTSCETKDLVVQQAGTNKTDVVCGPQDRLRALVVIPIIFGILFAILLVLVFIKKVAKKPTNKAPHPKQEPQEINFPDDLPGSNTAAPVQETLHGCQPVTQEDGKESRISVQERQ

SEQ ID NO: 9086 - protein, 375 aa, Homo sapiens
MLLFLLSALVLLTQPLGYLEAEMKTYSHRTMPSACTLVMCSSVESGLPGRDGRDGREGPRGEKGDPGLPGAAGQAGMPGQAGPVGPKGDNGSVGEPGPKGDTGPSGPPGPPGVPGPAGREGPLGKQGNIGPQGKPGPKGEAGPKGEVGAPGMQGSAGARGLAGPKGERGVPGERGVPGNTGAAGSAGAMGPQGSPGARGPPGLKGDKGIPGDKGAKGESGLPDVASLRQQVEALQGQVQHLQAAFSQYKKVELFPNGQSVGEKIFKTAGFVKPFTEAQLLCTQAGGQLASPRSAAENAALQQLVVAKNEAAFLSMTDSKTEGKFTYPTGESLVYSNWAPGEPNDDGGSEDCVEIFTNGKWNDRACGEKRLVVCEF

SEQ ID NO: 9087 - protein, 633 aa, Homo sapiens
MVGKGAKGMLNGAVPSEATKRDQNLKRGNWGNQIEFVLTSVGYAVGLGNVWRFPYLCYRNGGGAFMFPYFIMLIFCGIPLFFMELSFGQFASQGCLGVWRISPMFKGVGYGMMVVSTYIGIYYNVVICIAFYYFFSSMTHVLPWAYCNNPWNTHDCAGVLDASNLTNGSRPAALPSNLSHLLNHSLQRTSPSEEYWRLYVLKLSDDIGNFGEVRLPLLGCLGVSWLVVFLCLIRGVKSSGKVVYFTATFPYVVLTILFVRGVTLEGAFDGIMYYLTPQWDKILEAKVWGDAASQIFYSLGCAWGGLITMASYNKFHNNCYRDSVIISITNCATSVYAGFVIFSILGFMANHLGVDVSRVADHGPGLAFVAYPEALTLLPISPLWSLLFFFMLILLGLGTQFCLLETLVTAIVDEVGNEWILQKKTYVTLGVAVAGFLLGIPLTSQAGIYWLLLMDNYAASFSLVVISCIMCVAIMYIYGHRNYFQDIQMMLGFPPPLFFQICWRFVSPAIIFFILVFTVIQYQPITYNHYQYPGWAVAIGFLMALSSVLCIPLYAMFRLCRTDGDTLLQRLKNATKPSRDWGPALLEHRTGRYAPTIAPSPEDGFEVQPLHPDKAQIPIVGSNGSSRLQDSRI

SEQ ID NO: 9088 - protein, 248 aa, Homo sapiens
MWLCPLALTLILMAASGAACEVKDVCVGSPGIPGTPGSHGLPGRDGRDGVKGDPGPPGPMGPPGETPCPPGNNGLPGAPGVPGERGEKGEAGERGPPGLPAHLDEELQATLHDFRHQILQTRGALSLQGSIMTVGEKVFSSNGQSITFDAIQEACARAGGRIAVPRNPEENEAIASFVKKYNTYAYVGLTEGPSPGDFRYSDGTPVNYTNWYRGEPAGRGKEQCVEMYTDGQWNDRNCLYSRLTICEF

SEQ ID NO: 9089 - protein, 707 aa, Homo sapiens
MSLWQPLVLVLLVLGCCFAAPRQRQSTLVLFPGDLRTNLTDRQLAEEYLYRYGYTRVAEMRGESKSLGPALLLLQKQLSLPETGELDSATLKAMRTPRCGVPDLGRFQTFEGDLKWHHHNITYWIQNYSEDLPRAVIDDAFARAFALWSAVTPLTFTRVYSRDADIVIQFGVAEHGDGYPFDGKDGLLAHAFPPGPGIQGDAHFDDDELWSLGKGVVVPTRFGNADGAACHFPFIFEGRSYSACTTDGRSDGLPWCSTTANYDTDDRFGFCPSERLYTQDGNADGKPCQFPFIFQGQSYSACTTDGRSDGYRWCATTANYDRDKLFGFCPTRADSTVMGGNSAGELCVFPFTFLGKEYSTCTSEGRGDGRLWCATTSNFDSDKKWGFCPDQGYSLFLVAAHEFGHALGLDHSSVPEALMYPMYRFTEGPPLHKDDVNGIRHLYGPRPEPEPRPPTTTTPQPTAPPTVCPTGPPTVHPSERPTAGPTGPPSAGPTGPPTAGPSTATTVPLSPVDDACNVNIFDAIAEIGNQLYLFKDGKYWRFSEGRGSRPQGPFLIADKWPALPRKLDSVFEERLSKKLFFFSGRQVWVYTGASVLGPRRLDKLGLGADVAQVTGALRSGRGKMLLFSGRRLWRFDVKAQMVDPRSASEVDRMFPGVPLDTHDVFQYREKAYFCQDRFYWRVSSRSELNQVDQVGYVTYDILQCPED

SEQ ID NO: 9090 - protein, 241 aa, Homo sapiens
MSLLSAIDTSAASVYQPAQLLNWVYLSLQDTHQASAFDAFRPEPTAGAAPPELAFGKGRPEQLGSPLHSSYLNSFFQLQRGEALSNSVYKGASPYGSLNNIADGLSSLTEHFSDLTLTSEARKPSKRPPPNYLCHLCFNKGHYIKDCPQARPKGEGLTPYQGKKRCFGEYKCPKCKRKWMSGNSWANMGQECIKCHINVYPHKQRPLEKPDGLDVSDQSKEHPQHLCEKCKVLGYYCRRVQ

SEQ ID NO: 9091 - protein, 963 aa, Homo sapiens
MERREEQPGAAGAGAAPALDFTVENVEKALHQLYYDPNIENKNLAQKWLMQAQVSPQAWHFSWQLLQPDKVPEIQYFGASALHIKISRYWSDIPTDQYESLKAQLFTQITRFASGSKIVLTRLCVALASLALSMMPDAWPCAVADMVRLFQAEDSPVDGQGRCLALLELLTVLPEEFQTSRLPQYRKGLVRTSLAVECGAVFPLLEQLLQQPSSPSCVRQKVLKCFSSWVQLEVPLQDCEALIQAAFAALQDSELFDSSVEAIVNAISQPDAQRYVNTLLKLIPLVLGLQEQLRQAVQNGDMETSHGICRIAVALGENHSRALLDQVEHWQSFLALVNMIMFCTGIPGHYPVNETTSSLTLTFWYTLQDDILSFEAEKQAVYQQVYRPVYFQLVDVLLHKAQFPSDEEYGFWSSDEKEQFRIYRVDISDTLMYVYEMLGAELLSNLYDKLGRLLTSSEEPYSWQHTEALLYGFQSIAETIDVNYSDVVPGLIGLIPRISISNVQLADTVMFTIGALSEWLADHPVMINSVLPLVLHALGNPELSVSSVSTLKKICRECKYDLPPYAANIVAVSQDVLMKQIHKTSQCMWLMQALGFLLSALQVEEILKNLHSLISPYIQQLEKLAEEIPNPSNKLAIVHILGLLSNLFTTLDISHHEDDHEGPELRKLPVPQGPNPVVVVLQQVFQLIQKVLSKWLNDAQVVEAVCAIFEKSVKTLLDDFAPMVPQLCEMLGRMYSTIPQASALDLTRQLVHIFAHEPAHFPPIEALFLLVTSVTLTLFQQGPRDHPDIVDSFMQLLAQALKRKPDLFLCERLDVKAVFQCAVLALKFPEAPTVKASCGFFTELLPRCGEVESVGKVVQEDGRMLLIAVLEAIGGQASRSLMDCFADILFALNKHCFSLLSMWIKEALQPPGFPSARLSPEQKDTFSQQILRERVNKRRVKEMVKEFTLLCRGLHGTDYTADY

SEQ ID NO: 9092 - protein, 1149 aa, Homo sapiens
MGQQPGKVLGDQRRPSLPALHFIKGAGKKESSRHGGPHCNVFVEHEALQRPVASDFEPQGLSEAARWNSKENLLAGPSENDPNLFVALYDFVASGDNTLSITKGEKLRVLGYNHNGEWCEAQTKNGQGWVPSNYITPVNSLEKHSWYHGPVSRNAAEYLLSSGINGSFLVRESESSPGQRSISLRYEGRVYHYRINTASDGKLYVSSESRFNTLAELVHHHSTVADGLITTLHYPAPKRNKPTVYGVSPNYDKWEMERTDITMKHKLGGGQYGEVYEGVWKKYSLTVAVKTLKEDTMEVEEFLKEAAVMKEIKHPNLVQLLGVCTREPPFYIITEFMTYGNLLDYLRECNRQEVNAVVLLYMATQISSAMEYLEKKNFIHRDLAARNCLVGENHLVKVADFGLSRLMTGDTYTAHAGAKFPIKWTAPESLAYNKFSIKSDVWAFGVLLWEIATYGMSPYPGIDLSQVYELLEKDYRMERPEGCPEKVYELMRACWQWNPSDRPSFAEIHQAFETMFQESSISDEVEKELGKQGVRGAVSTLLQAPELPTKTRTSRRAAEHRDTTDVPEMPHSKGQGESDPLDHEPAVSPLLPRKERGPPEGGLNEDERLLPKDKKTNLFSALIKKKKKTAPTPPKRSSSFREMDGQPERRGAGEEEGRDISNGALAFTPLDTADPAKSPKPSNGAGVPNGALRESGGSGFRSPHLWKKSSTLTSSRLATGEEEGGGSSSKRFLRSCSASCVPHGAKDTEWRSVTLPRDLQSTGRQFDSSTFGGHKSEKPALPRKRAGENRSDQVTRGTVTPPPRLVKKNEEAADEVFKDIMESSPGSSPPNLTPKPLRRQVTVAPASGLPHKEEAGKGSALGTPAAAEPVTPTSKAGSGAPGGTSKGPAEESRVRRHKHSSESPGRDKGKLSRLKPAPPPPPAASAGKAGGKPSQSPSQEAAGEAVLGAKTKATSLVDAVNSDAAKPSQPGEGLKKPVLPATPKPQSAKPSGTPISPAPVPSTLPSASSALAGDQPSSTAFIPLISTRVSLRKTRQPPERIASGAITKGVVLDSTEALCLAISRNSEQMASHSAVLEAGKNLYTFCVSYVDSIQQMRNKFAFREAINKLENNLRELQICPATAGSGPAATQDFSKLLSSVKEISDIVQR

SEQ ID NO: 9093 - protein, 293 aa, Homo sapiens
MAMEMRLPVARKPLSERLGRDTKKHLVVPGDTITTDTGFMRGHGTYMGEEKLIASVAGSVERVNKLICVKALKTRYIGEVGDIVVGRITEVQQKRWKVETNSRLDSVLLLSSMNLPGGELRRRSAEDELAMRGFLQEGDLISAEVQAVFSDGAVSLHTRSLKYGKLGQGVLVQVSPSLVKRQKTHFHDLPCGASVILGNNGFIWIYPTPEHKEEEAGGFIANLEPVSLADREVISRLRNCIISLVTQRMMLYDTSILYCYEASLPHQIKDILKPEIMEEIVMETRQRLLEQEG

SEQ ID NO: 9094 - protein, 1390 aa, Homo sapiens
MVKEQFRETDVAKKISHICFGMKSPEEMRQQAHIQVVSKNLYSQDNQHAPLLYGVLDHRMGTSEKDRPCETCGKNLADCLGHYGYIDLELPCFHVGYFRAVIGILQMICKTCCHIMLSQEEKKQFLDYLKRPGLTYLQKRGLKKKISDKCRKKNICHHCGAFNGTVKKCGLLKIIHEKYKTNKKVVDPIVSNFLQSFETAIEHNKEVEPLLGRAQENLNPLVVLNLFKRIPAEDVPLLLMNPEAGKPSDLILTRLLVPPLCIRPSVVSDLKSGTNEDDLTMKLTEIIFLNDVIKKHRISGAKTQMIMEDWDFLQLQCALYINSELSGIPLNMAPKKWTRGFVQRLKGKQGRFRGNLSGKRVDFSGRTVISPDPNLRIDEVAVPVHVAKILTFPEKVNKANINFLRKLVQNGPEVHPGANFIQQRHTQMKRFLKYGNREKMAQELKYGDIVERHLIDGDVVLFNRQPSLHKLSIMAHLARVKPHRTFRFNECVCTPYNADFDGDEMNLHLPQTEEAKAEALVLMGTKANLVTPRNGEPLIAAIQDFLTGAYLLTLKDTFFDRAKACQIIASILVGKDEKIKVRLPPPTILKPVTLWTGKQIFSVILRPSDDNPVRANLRTKGKQYCGKGEDLCANDSYVTIQNSELMSGSMDKGTLGSGSKNNIFYILLRDWGQNEAADAMSRLARLAPVYLSNRGFSIGIGDVTPGQGLLKAKYELLNAGYKKCDEYIEALNTGKLQQQPGCTAEETLEALILKELSVIRDHAGSACLRELDKSNSPLTMALCGSKGSFINISQMIACVGQQAISGSRVPDGFENRSLPHFEKHSKLPAAKGFVANSFYSGLTPTEFFFHTMAGREGLVDTAVKTAETGYMQRRLVKSLEDLCSQYDLTVRSSTGDIIQFIYGGDGLDPAAMEGKDEPLEFKRVLDNIKAVFPCPSEPALSKNELILTTESIMKKSEFLCCQDSFLQEIKKFIKGVSEKIKKTRDKYGINDNGTTEPRVLYQLDRITPTQVEKFLETCRDKYMRAQMEPGSAVGALCAQSIGEPGTQMTLKTFHFAGVASMNITLGVPRIKEIINASKAISTPIITAQLDKDDDADYARLVKGRIEKTLLGEISEYIEEVFLPDDCFILVKLSLERIRLLRLEVNAETVRYSICTSKLRVKPGDVAVHGEAVVCVTPRENSKSSMYYVLQFLKEDLPKVVVQGIPEVSRAVIHIDEQSGKEKYKLLVEGDNLRAVMATHGVKGTRTTSNNTYEVEKTLGIEAARTTIINEIQYTMVNHGMSIDRRHVMLLSDLMTYKGEVLGITRFGLAKMKESVLMLASFEKTADHLFDAAYFGQKDSVCGVSECIIMGIPMNIGTGLFKLLHKADRDPNPPKRPLIFDTNEFHIPLVT

SEQ ID NO: 9095 - protein, 1919 aa, Homo sapiens
MEPQRRELLAQCQQSLAQAMTEVEAVLGLLEAAGALSPGERRQLDEEAGGAKAELLLKLLLAKERDHFQDLRAALEKTQPHLLPILYLNGVVGPPQPAEGAGSTYSVLSTMPSDSESSSSLSSVGTTGKAPSPPPLLTDQQVNEKVENLSIQLRLMTRERNELRKRLAFATHGTAFDKRPYHRLNPDYERLKIQCVRAMSDLQSLQNQHTNALKRCEEVAKETDFYHTLHSRLLSDQTRLKDDVDMLRRENGQLLRERNLLQQSWEDMKRLHEEDQKEIGDLRAQQQQVLKHNGSSEILNKLYDTAMDKLEVVKKDYDALRKRYSEKVAIHNADLSRLEQLGEENQRLLKQTEMLTQQRDTAIQLQHQCALSLRRFEAIHHELNKATAQNKDLQWEMELLQSELTELRTTQVKTAKESEKYREERDAVYSEYKLIMSERDQVISELDKLQTEVELAESKLKSSTSEKKAANEEMEALRQIKDTVTMDAGRANKEVEILRKQCKALCQELKEALQEADVAKCRRDWAFQERDKIVAERDSIRTLCDNLRRERDRAVSELAEALRSLDDTRKQKNDVSRELKELKEQMESQLEKEARFRQLMAHSSHDSAIDTDSMEWETEVVEFERETEDIDLKALGFDMAEGVNEPCFPGDCGIFVTKVDKGSIADGRLRVNDWLLRINDVDLINKDKKQAIKALLNGEGAINMVVRRRKSLGGKVVTPLHINLSGQKDSGISLENGVYAAAVLPGSPAAKEGSLAVGDRIVAINGIALDNKSLNECESLLRSCQDSLTLSLLKVFPQSSSWSGQNIFENIKDSDKMLSFRAHGPEVQAHNKRNLIQHNNSTQTDIFYTDRLEDRKEPGPPGGSSSFLHKPFPGGPLQVCPQACPSASERSLSSFRSDASGDRGFGLVDVRGRRPLLPFETEVGPCGVGEASLDKADSEGSNSGGTWPKAMLSSTAVPEKLSVYKKPKQRKSIFDPNTFKRPQTPPKIDYLLPGPGPAHSPQPSKRAGPLTPPKPPRRSDSIKFQHRLETSSESEATLVGSSPSTSPPSALPPDVDPGEPMHASPPRKARVRIASSYYPEGDGDSSHLPAKKSCDEDLTSQKVDELGQKRRRPKSAPSFRPKLAPVVIPAQFLEEQKCVPASGELSPELQEWAPYSPGHSSRHSNPPLYPSRPSVGTVPRSLTPSTTVSSILRNPIYTVRSHRVGPCSSPPAARDAGPQGLHPSVQHQGRLSLDLSHRTCSDYSEMRATHGSNSLPSSARLGSSSNLQFKAERIKIPSTPRYPRSVVGSERGSVSHSECSTPPQSPLNIDTLSSCSQSQTSASTLPRIAVNPASLGERRKDRPYVEEPRHVKVQKGSEPLGISIVSGEKGGIYVSKVTVGSIAHQAGLEYGDQLLEFNGINLRSATEQQARLIIGQQCDTITILAQYNPHVHQLSSHSRSSSHLDPAGTHSTLQGSGTTTPEHPSVIDPLMEQDEGPSTPPAKQSSSRIAGDANKKTLEPRVVFIKKSQLELGVHLCGGNLHGVFVAEVEDDSPAKGPDGLVPGDLILEYGSLDVRNKTVEEVYVEMLKPRDGVRLKVQYRPEEFTKAKGLPGDSFYIRALYDRLADVEQELSFKKDDILYVDDTLPQGTFGSWMAWQLDENAQKIQRGQIPSKYVMDQEFSRRLSMSEVKDDNSATKTLSAAARRSFFRRKHKHKRSGSKDGKDLLALDAFSSDSIPLFEDSVSLAYQRVQKVDCTALRPVLILGPLLDVVKEMLVNEAPGKFCRCPLEVMKASQQAIERGVKDCLFVDYKRRSGHFDVTTVASIKEITEKNRHCLLDIAPHAIERLHHMHIYPIVIFIHYKSAKHIKEQRDPIYLRDKVTQRHSKEQFEAAQKLEQEYSRYFTGVIQGGALSSICTQILAMVNQEQNKVLWIPACPL

SEQ ID NO: 9096 - protein, 1064 aa, Homo sapiens
MASESETLNPSARIMTFYPTMEEFRNFSRYIAYIESQGAHRAGLAKVVPPKEWKPRASYDDIDDLVIPAPIQQLVTGQSGLFTQYNIQKKAMTVREFRKIANSDKYCTPRYSEFEELERKYWKNLTFNPPIYGADVNGTLYEKHVDEWNIGRLRTILDLVEKESGITIEGVNTPYLYFGMWKTSFAWHTEDMDLYSINYLHFGEPKSWYSVPPEHGKRLERLAKGFFPGSAQSCEAFLRHKMTLISPLMLKKYGIPFDKVTQEAGEFMITFPYGYHAGFNHGFNCAESTNFATRRWIEYGKQAVLCSCRKDMVKISMDVFVRKFQPERYKLWKAGKDNTVIDHTLPTPEAAEFLKESELPPRAGNEEECPEEDMEGVEDGEEGDLKTSLAKHRIGTKRHRVCLEIPQEVSQSELFPKEDLSSEQYEMTECPAALAPVRPTHSSVRQVEDGLTFPDYSDSTEVKFEELKNVKLEEEDEEEEQAAAALDLSVNPASVGGRLVFSGSKKKSSSSLGSGSSRDSISSDSETSEPLSCRAQGQTGVLTVHSYAKGDGRVTVGEPCTRKKGSAARSFSERELAEVADEYMFSLEENKKSKGRRQPLSKLPRHHPLVLQECVSDDETSEQLTPEEEAEETEAWAKPLSQLWQNRPPNFEAEKEFNETMAQQAPHCAVCMIFQTYHQVEFGGFNQNCGNASDLAPQKQRTKPLIPEMCFTSTGCSTDINLSTPYLEEDGTSILVSCKKCSVRVHASCYGVPPAKASEDWMCSRCSANALEEDCCLCSLRGGALQRANDDRWVHVSCAVAILEARFVNIAERSPVDVSKIPLPRFKLKCIFCKKRRKRTAGCCVQCSHGRCPTAFHVSCAQAAGVMMQPDDWPFVVFITCFRHKIPNLERAKGALQSITAGQKVISKHKNGRFYQCEVVRLTTETFYEVNFDDGSFSDNLYPEDIVSQDCLQFGPPAEGEVVQVRWTDGQVYGAKFVASHPIQMYQVEFEDGSQLVVKRDDVYTLDEELPKRVKSRLSVASDMRFNEIFTEKEVKQEKKRQRVINSRYREDYIEPALYRAIME

SEQ ID NO: 9097 - protein, 134 aa, Homo sapiens
MNTEMYQTPMEVAVYQLHNFSISFFSSLLGGDVVSVKLDNSASGASVVAIDNKIEQAMDLVKNHLMYAVREEVEILKEQIRELVEKNSQLERENTLLKTLASPEQLEKFQSCLSPEEPAPESPQVPEAPGGSAV

SEQ ID NO: 9098 - protein, 704 aa, Homo sapiens
MANENHGSPREEASLLSHSPGTSNQSQPCSPKPIRLVQDLPEELVHAGWEKCWSRRENRPYYFNRFTNQSLWEMPVLGQHDVISDPLGLNATPLPQDSSLVETPPAENKPRKRQLSEEQPSGNGVKKPKIEIPVTPTGQSVPSSPSIPGTPTLKMWGTSPEDKQQAALLRPTEVYWDLDIQTNAVIKHRGPSEVLPPHPEVELLRSQLILKLRQHYRELCQQREGIEPPRESFNRWMLERKVVDKGSDPLLPSNCEPVVSPSMFREIMNDIPIRLSRIKFREEAKRLLFKYAEAARRLIESRSASPDSRKVVKWNVEDTFSWLRKDHSASKEDYMDRLEHLRRQCGPHVSAAAKDSVEGICSKIYHISLEYVKRIREKHLAILKENNISEEVEAPEVEPRLVYCYPVRLAVSAPPMPSVEMHMENNVVCIRYKGEMVKVSRNYFSKLWLLYRYSCIDDSAFERFLPRVWCLLRRYQMMFGVGLYEGTGLQGSLPVHVFEALHRLFGVSFECFASPLNCYFRQYCSAFPDTDGYFGSRGPCLDFAPLSGSFEANPPFCEELMDAMVSHFERLLESSPEPLSFIVFIPEWREPPTPALTRMEQSRFKRHQLILPAFEHEYRSGSQHICKKEEMHYKAVHNTAVLFLQNDPGFAKWAPTPERLQELSAAYRQSGRSHSSGSSSSSSSEAKDRDSGREQGPSREPHPT

SEQ ID NO: 9099 - protein, 571 aa, Homo sapiens
MAALAPVGSPASRGPRLAAGLRLLPMLGLLQLLAEPGLGRVHHLALKDDVRHKVHLNTFGFFKDGYMVVNVSSLSLNEPEDKDVTIGFSLDRTKNDGFSSYLDEDVNYCILKKQSVSVTLLILDISRSEVRVKSPPEAGTQLPKIIFSRDEKVLGQSQEPNVNPASAGNQTQKTQDGGKSKRSTVDSKAMGEKSFSVHNNGGAVSFQFFFNISTDDQEGLYSLYFHKCLGKELPSDKFTFSLDIEITEKNPDSYLSAGEIPLPKLYISMAFFFFLSGTIWIHILRKRRNDVFKIHWLMAALPFTKSLSLVFHAIDYHYISSQGFPIEGWAVVYYITHLLKGALLFITIALIGTGWAFIKHILSDKDKKIFMIVIPLQVLANVAYIIIESTEEGTTEYGLWKDSLFLVDLLCCGAILFPVVWSIRHLQEASATDGKGDSMGPLQQRANLRAGSRIAAINLAKLKLFRHYYVLIVCYIYFTRIIAFLLKLAVPFQWKWLYQLLDETATLVFFVLTGYKFRPASDNPYLQLSQEEEDLEMESVVTTSGVMESMKKVKKVTNGSVEPQGEWEGAV

SEQ ID NO: 9100 - protein, 350 aa, Homo sapiens
MATTAAPAGGARNGAGPEWGGFEENIQGGGSAVIDMENMDDTSGSSFEDMGELHQRLREEEVDADAADAAAAEEEDGEFLGMKGFKGQLSRQVADQMWQAGKRQASRAFSLYANIDILRPYFDVEPAQVRSRLLESMIPIKMVNFPQKIAGELYGPLMLVFTLVAILLHGMKTSDTIIREGTLMGTAIGTCFGYWLGVSSFIYFLAYLCNAQITMLQMLALLGYGLFGHCIVLFITYNIHLHALFYLFWLLVGGLSTLRMVAVLVSRTVGPTQRLLLCGTLAALHMLFLLYLHFAYHKVVEGILDTLEGPNIPPIQRVPRDIPAMLPAARLPTTVLNATAKAVAVTLQSH

SEQ ID NO: 9101 - protein, 277 aa, Homo sapiens
MAPLRFSANLSWLFPELSGLPARVRAAGSSGFEAVEVAWPYAETPEALARAAREAGLRLVLINTPPGDQEKGEMGLGAVPGRQAAFREGLEQAVRYAKALGCPRIHLMAGRVPQGADRIAVKAEMEAVFLENLRHAAGVLAQEDLVGLLEPINTRITDPQYFLDTPQQAAAILQKVGRPNLQLQMDIFHWQIMDGNLTGNIREFLPIVGHVQVAQVPGRGEPSSPGELNFPYLFQLLEDEGYKGFVGCEYQPRGDTVEGLSWLRSYWDRRGHPEAGQ

SEQ ID NO: 9102 - protein, 493 aa, Homo sapiens
MALFGALFLALLAGAHAEFPGCKIRVTSKALELVKQEGLRFLEQELETITIPDLRGKEGHFYYNISEVKVTELQLTSSELDFQPQQELMLQITNASLGLRFRRQLLYWFFYDGGYINASAEGVSIRTGLELSRDPAGRMKVSNVSCQASVSRMHAAFGGTFKKVYDFLSTFITSGMRFLLNQQICPVLYHAGTVLLNSLLDTVPVRSSVDELVGIDYSLMKDPVASTSNLDMDFRGAFFPLTERNWSLPNRAVEPQLQEEERMVYVAFSEFFFDSAMESYFRAGALQLLLVGDKVPHDLDMLLRATYFGSIVLLSPAVIDSPLKLELRVLAPPRCTIKPSGTTISVTASVTIALVPPDQPEVQLSSMTMDARLSAKMALRGKALRTQLDLRRFRIYSNHSALESLALIPLQAPLKTMLQIGVMPMLNERTWRGVQIPLPEGINFVHEVVTNHAGFLTIGADLHFAKGLREVIEKNRPADVRASTAPTPSTAAV

SEQ ID NO: 9103 - protein, 318 aa, Homo sapiens
MPNIKIFSGSSHQDLSQKIADRLGLELGKVVTKKFSNQETCVEIGESVRGEDVYIVQSGCGEINDNLMELLIMINACKIASASRVTAVIPCFPYARQDKKDKSRAPISAKLVANMLSVAGADHIITMDLHASQIQGFFDIPVDNLYAEPAVLKWIRENISEWRNCTIVSPDAGGAKRVTSIADRLNVDFALIHKERKKANEVDRMVLVGDVKDRVAILVDDMADTCGTICHAADKLLSAGATRVYAILTHGIFSGPAISRINNACFEAVVVTNTIPQEDKMKHCSKIQVIDISMILAEAIRRTHNGESVSYLFSHVPL

SEQ ID NO: 9104 - protein, 289 aa, Homo sapiens
MPVVRKIFRRRRGDSESEEDEQDSEEVRLKLEETREVQNLRKRPNGVSAVALLVGEKVQEETTLVDDPFQMKTGGMVDMKKLKERGKDKISEEEDLHLGTSFSAETNRRDEDADMMKYIETELKKRKGIVEHEEQKVKPKNAEDCLYELPENIRVSSAKKTEEMLSNQMLSGIPEVDLGIDAKIKNIISTEDAKARLLAEQQNKKKDSETSFVPTNMAVNYVQHNRFYHEELNAPIRRNKEEPKARPLRVGDTEKPEPERSPPNRKRPANEKATDDYHYEKFKKMNRRY

SEQ ID NO: 9105 - protein, 268 aa, Homo sapiens
MQREEKQLEASLDALLSQVADLKNSLGSFICKLENEYGRLTWPSVLDSFALLSGQLNTLNKVLKHEKTPLFRNQVIIPLVLSPDRDEDLMRQTEGRVPVFSHEVVPDHLRTKPDPEVEEQEKQLTTDAARIGADAAQKQIQSLNKMCSNLLEKISKEERESESGGLRPNKQTFNPTDTNALVAAVAFGKGLSNWRPSGSSGPGQAGQPGAGTILAGTSGLQQVQMAGAPSQQQPMLSGVQMAQAGQPGKMPSGIKTNIKSASMHPYQR

SEQ ID NO: 9106 - protein, 279 aa, Homo sapiens
MEAVVNLYQEVMKHADPRIQGYPLMGSPLLMTSILLTYVYFVLSLGPRIMANRKPFQLRGFMIVYNFSLVALSLYIVYEFLMSGWLSTYTWRCDPVDYSNSPEALRMVRVAWLFLFSKFIELMDTVIFILRKKDGQVTFLHVFHHSVLPWSWWWGVKIAPGGMGSFHAMINSSVHVIMYLYYGLSAFGPVAQPYLWWKKHMTAIQLIQFVLVSLHISQYYFMSSCNYQYPVIIHLIWMYGTIFFMLFSNFWYHSYTKGKRLPRALQQNGAPGIAKVKAN

SEQ ID NO: 9107 - protein, 253 aa, Homo sapiens
MDSAAAAFALDKPALGPGPPPPPPALGPGDCAQARKNFSVSHLLDLEEVAAAGRLAARPGARAEAREGAAREPSGGSSGSEAAPQDGECPSPGRGSAAKRKKKQRRNRTTFNSSQLQALERVFERTHYPDAFVREELARRVNLSEARVQVWFQNRRAKFRRNERAMLASRSASLLKSYSQEAAIEQPVAPRPTALSPDYLSWTASSPYSTVPPYSPGSSGPATPGVNMANSIASLRLKAKEFSLHHSQVPTVN

SEQ ID NO: 9108 - protein, 635 aa, Homo sapiens
MPSWALFMVTSCLLLAPQNLAQVSSQDVSLLASDSEPLKCFSRTFEDLTCFWDEEEAAPSGTYQLLYAYPREKPRACPLSSQSMPHFGTRYVCQFPDQEEVRLFFPLHLWVKNVFLNQTRTQRVLFVDSVGLPAPPSIIKAMGGSQPGELQISWEEPAPEISDFLRYELRYGPRDPKNSTGPTVIQLIATETCCPALQRPHSASALDQSPCAQPTMPWQDGPKQTSPSREASALTAEGGSCLISGLQPGNSYWLQLRSEPDGISLGGSWGSWSLPVTVDLPGDAVALGLQCFTLDLKNVTCQWQQQDHASSQGFFYHSRARCCPRDRYPIWENCEEEEKTNPGLQTPQFSRCHFKSRNDSIIHILVEVTTAPGTVHSYLGSPFWIHQAVRLPTPNLHWREISSGHLELEWQHPSSWAAQETCYQLRYTGEGHQDWKVLEPPLGARGGTLELRPRSRYRLQLRARLNGPTYQGPWSSWSDPTRVETATETAWISLVTALHLVLGLSAVLGLLLLRWQFPAHYRRLRHALWPSLPDLHRVLGQYLRDTAALSPPKATVSDTCEEVEPSLLEILPKSSERTPLPLCSSQAQMDYRRLQPSCLGTMPLSVCPPMAESGSCCTTHIANHSYLPLSYWQQP

SEQ ID NO: 9109 - protein, 1138 aa, Homo sapiens
MVWRVPPFLLPILFLASHVGAAVDLTLLANLRLTDPQRFFLTCVSGEAGAGRGSDAWGPPLLLEKDDRIVRTPPGPPLRLARNGSHQVTLRGFSKPSDLVGVFSCVGGAGARRTRVIYVHNSPGAHLLPDKVTHTVNKGDTAVLSARVHKEKQTDVIWKSNGSYFYTLDWHEAQDGRFLLQLPNVQPPSSGIYSATYLEASPLGSAFFRLIVRGCGAGRWGPGCTKECPGCLHGGVCHDHDGECVCPPGFTGTRCEQACREGRFGQSCQEQCPGISGCRGLTFCLPDPYGCSCGSGWRGSQCQEACAPGHFGADCRLQCQCQNGGTCDRFSGCVCPSGWHGVHCEKSDRIPQILNMASELEFNLETMPRINCAAAGNPFPVRGSIELRKPDGTVLLSTKAIVEPEKTTAEFEVPRLVLADSGFWECRVSTSGGQDSRRFKVNVKVPPVPLAAPRLLTKQSRQLVVSPLVSFSGDGPISTVRLHYRPQDSTMDWSTIVVDPSENVTLMNLRPKTGYSVRVQLSRPGEGGEGAWGPPTLMTTDCPEPLLQPWLEGWHVEGTDRLRVSWSLPLVPGPLVGDGFLLRLWDGTRGQERRENVSSPQARTALLTGLTPGTHYQLDVQLYHCTLLGPASPPAHVLLPPSGPPAPRHLHAQALSDSEIQLTWKHPEALPGPISKYVVEVQVAGGAGDPLWIDVDRPEETSTIIRGLNASTRYLFRMRASIQGLGDWSNTVEESTLGNGLQAEGPVQESRAAEEGLDQQLILAVVGSVSATCLTILAALLTLVCIRRSCLHRRRTFTYQSGSGEETILQFSSGTLTLTRRPKLQPEPLSYPVLEWEDITFEDLIGEGNFGQVIRAMIKKDGLKMNAAIKMLKEYASENDHRDFAGELEVLCKLGHHPNIINLLGACKNRGYLYIAIEYAPYGNLLDFLRKSRVLETDPAFAREHGTASTLSSRQLLRFASDAANGMQYLSEKQFIHRDLAARNVLVGENLASKIADFGLSRGEEVYVKKTMGRLPVRWMAIESLNYSVYTTKSDVWSFGVLLWEIVSLGGTPYCGMTCAELYEKLPQGYRMEQPRNCDDEVYELMRQCWRDRPYERPPFAQIALQLGRMLEARKAYVNMSLFENFTYAGIDATAEEA

SEQ ID NO: 9110 - protein, 223 aa, Homo sapiens
MTSEVIEDEKQFYSKAKTYWKQIPPTVDGMLGGYGHISSIDINSSRKFLQRFLREGPNKTGTSCALDCGAGIGRITKRLLLPLFREVDMVDITEDFLVQAKTYLGEEGKRVRNYFCCGLQDFTPEPDSYDVIWIQWVIGHLTDQHLAEFLRRCKGSLRPNGIIVIKDNMAQEGVILDDVDSSVCRDLDVVRRIICSAGLSLLAEERQENLPDEIYHVYSFALR

SEQ ID NO: 9111 - protein, 145 aa, Homo sapiens
MTSEVIEDEKQFYSKAKTYWKQIPPTVDGMLGGYGHISSIDINSSRKFLQRFLREGPNKTGTSCALDCGAGIGRITKRLLLPLFREVDMVDITEDFLVQAKTYLGEEGKRATSPISTWPSSCGAARAASAPTASSSSKTTWPRRA

SEQ ID NO: 9112 - protein, 498 aa, Homo sapiens
MTSSPRAPPGEQGRGGAEMIRAAPPPLFLLLLLLLLLVSWASRGEAAPDQDEIQRLPGLAKQPSFRQYSGYLKGSGSKHLHYWFVESQKDPENSPVVLWLNGGPGCSSLDGLLTEHGPFLVQPDGVTLEYNPYSWNLIANVLYLESPAGVGFSYSDDKFYATNDTEVAQSNFEALQDFFRLFPEYKNNKLFLTGESYAGIYIPTLAVLVMQDPSMNLQGLAVGNGLSSYEQNDNSLVYFAYYHGLLGNRLWSSLQTHCCSQNKCNFYDNKDLECVTNLQEVARIVGNSGLNIYNLYAPCAGGVPSHFRYEKDTVVVQDLGNIFTRLPLKRMWHQALLRSGDKVRMDPPCTNTTAASTYLNNPYVRKALNIPEQLPQWDMCNFLVNLQYRRLYRSMNSQYLKLLSSQKYQILLYNGDVDMACNFMGDEWFVDSLNQKMEVQRRPWLVKYGDSGEQIAGFVKEFSHIAFLTIKGAGHMVPTDKPLAAFTMFSRFLNKQPY

SEQ ID NO: 9113 - protein, 377 aa, Homo sapiens
MPSGCRCLHLVCLLCILGAPGQPVRADDCSSHCDLAHGCCAPDGSCRCDPGWEGLHCERCVRMPGCQHGTCHQPWQCICHSGWADEHICTTQSPCQNGGQCMYDGGGEYHCVCLPGFHGRDCERKAGPCEQAGSPCRNGGQCQDDQGFALNFTCRCLVGFVGARCEVNVDDCLMRPCANGATCLDGINRFSCLCPEGFAGRFCTINLDDCASRPCQRGARCRDRVHDFDCLCPSGYGGKTCELVLPVPDPPTTVDTPLGPTSAVVVPATGPAPHSAGAGLLRISVKEVVRRQEAGLGEPSLVALVVFGALTAALVLATVLLTLRAWRRGVCPPGPCCYPAPHYAPACQDQECQVSMLPAGLPLPRDLPPEPGKTTAL

SEQ ID NO: 9114 - protein, 404 aa, Homo sapiens
MECALDAQSLISISLRKIHSSRTQRGGIKLHKNLLVSYVLRNARQLYLSERYAELYRRQQQQQQQQPPHHQHQHLAYAAPGMPASAADFGPLQLGGGGDAEAREPAARHQLHQLHQLHQLHLQQQLHQHQHPAPRGCAAAAAAGAPAGGAGALSELPGCAALQPPHGAPHRGQPLEPLQPGPAPLPLPLPPPAPAALCPRDPRAPAACSAPPGAAPPAAAASPPASPAPASSPGFYRGAYPTPSDFGLHCSSQTTVLDLDTHVVTTVENGYLHQDCCASAHCPCCGQGAPGPGLASAAGCKRKYYPGQEEEEDDEEDAGGLGAEPPGGAPFAPCKRARFEDFCPDSSPDASNISNLISIFGSGFSGLVSRQPDSSEQPPPLNGQLCAKQALASLGAWTRAIVAF

SEQ ID NO: 9115 - protein, 475 aa, Homo sapiens
MEMASSAGSWLSGCLIPLVFLRLSVHVSGHAGDAGKFHVALLGGTAELLCPLSLWPGTVPKEVRWLRSPFPQRSQAVHIFRDGKDQDEDLMPEYKGRTVLVRDAQEGSVTLQILDVRLEDQGSYRCLIQVGNLSKEDTVILQVAAPSVGSLSPSAVALAVILPVLVLLIMVCLCLIWKQRRAKEKLLYEHVTEVDNLLSDHAKEKGKLHKAVKKLRSELKLKRAAANSGWRRARLHFVAVTLDPDTAHPKLILSEDQRCVRLGDRRQPVPDNPQRFDFVVSILGSEYFTTGCHYWEVYVGDKTKWILGVCSESVSRKGKVTASPANGHWLLRQSRGNEYEALTSPQTSFRLKEPPRCVGIFLDYEAGVISFYNVTNKSHIFTFTHNFSGPLRPFFEPCLHDGGKNTAPLVICSELHKSEESIVPRPEGKGHANGDVSLKVNSSLLPPKAPELKDIILSLPPDLGPALQELKAPSF

SEQ ID NO: 9116 - protein, 485 aa, Homo sapiens
MLERLKAPWSAALQRKYFDLGIWTAPISPMALTMLNGLLIKDSSPPMLLHQVNKTAQLDTFNYQSCFMQSVFDHFPEILFIHRTYNPRGKVLYTFLVDGPRVQLEGHLARAVYFAIPAKEDTEGLAQMFQVFKKFNPAWERVCTILVDPHFLPLPILAMEFPTAEVLLSAFHICKFLQAKFYQLSLERPVERLLLTSLQSTMCSATAGNLRKLYTLLSNCIPPAKLPELHSHWLLNDRIWLAHRWRSRAESSHYFQSLEVTTHILSQFFGTTPSEKQGMASLFRYMQQNSADKANFNQGLCAQNNHAPSDTIPESPKLEQLVESHIQHSLNAICTGPAAQLCLGELAVVQKSTHLIGSGSEKMNIQILEDTHKVQPQPPASCSCYFNQAFHLPCRHILAMLSARRQVLQPDMLPAQWTAGCATSLDSILGSKWSETLDKHLAVTHLTEEVGQLLQHCTKEEFERRYSTLRELADSWIGPYEQVQL

SEQ ID NO: 9117 - protein, 646 aa, Homo sapiens
MSTAPSLSALRSSKHSGGGGGGGGGGGADPAWTSALSGNSSGPGPGSSPAGSTKPFVHAVPPSDPLRQANRLPIKVLKMLTARTGHILHPEYLQPLPSTPVSPIELDAKKSPLALLAQTCSQIGKPDPSPSSKLSSVASNGGGAGGAGGGAAGDKDTKSGPLKLSDIGVEDKSSFKPYSKPGSDKKEPGGGGGGGGGGGGGGGGVSSEKSGFRVPSATCQPFTPRTGSPSSSASACSPGGMLSSAGGAPEGKDDKKDTDVGGGGKGTGGASAEGGPTGLAHGRISCGGGINVDVNQHPDGGPGGKALGSDCGGSSGSSSGSGPSAPTSSSVLGSGLVAPVSPYKPGQTVFPLPPAGMTYPGSLAGAYAGYPPQFLPHGVALDPTKPGSLVGAQLAAAAAGSLGCSKPAGSSPLAGASPPSVMTASLCRDPYCLSYHCASHLAGAAAASASCAHDPAAAAAALKSGYPLVYPTHPLHGVHSSLTAAAAAGATPPSLAGHPLYPYGFMLPNDPLPHICNWVSANGPCDKRFATSEELLSHLRTHTAFPGTDKLLSGYPSSSSLASAAAAAMACHMHIPTSGAPGSPGTLALRSPHHALGLSSRYHPYSKSPLPTPGAPVPVPAATGPYYSPYALYGQRLTTASALGYQ

SEQ ID NO: 9118 - protein, 199 aa, Homo sapiens
MEDAAAPGRTEGVLERQGAPPAAGQGGALVELTPTPGGLALVSPYHTHRAGDPLDLVALAEQVQKADEFIRANATNKLTVIAEQIQHLQEQARKVLEDAHRDANLHHVACNIVKKPGNIYYLYKRESGQQYFSIISPKEWGTSCPHDFLGAYKLQHDLSWTPYEDIEKQDAKISMMDTLLSQSVALPPCTEPNFQGLTH

SEQ ID NO: 9119 - protein, 207 aa, Homo sapiens
MAVRALKLLTTLLAVVAAASQAEVESEAGWGMVTPDLLFAEGTAAYARGDWPGVVLSMERALRSRAALRALRLRCRTQCAADFPWELDPDWSPSPAQASGAAALRDLSFFGGLLRRAACLRRCLGPPAAHSLSEEMELEFRKRSPYNYLQVAYFKDLETQPHMQEFRLGVRLYSEEQPQEAVPHLEAALQEYFVAYEECRALCEGPY

SEQ ID NO: 9120 - protein, 1492 aa, Homo sapiens
MERLLAQLCGSSAAWPLPLWEGDTTGHCFTQLVLSALPHALLAVLSACYLGTPRSPDYILPCSPGWRLRLAASFLLSVFPLLDLLPVALPPGAGPGPIGLEVLAGCVAAVAWISHSLALWVLAHSPHGHSRGPLALALVALLPAPALVLTVLWHCQRGTLLPPLLPGPMARLCLLILQLAALLAYALGWAAPGGPREPWAQEPLLPEDQEPEVAEDGESWLSRFSYAWLAPLLARGACGELRQPQDICRLPHRLQPTYLARVFQAHWQEGARLWRALYGAFGRCYLALGLLKLVGTMLGFSGPLLLSLLVGFLEEGQEPLSHGLLYALGLAGGAVLGAVLQNQYGYEVYKVTLQARGAVLNILYCKALQLGPSRPPTGEALNLLGTDSERLLNFAGSFHEAWGLPLQLAITLYLLYQQVGVAFVGGLILALLLVPVNKVIATRIMASNQEMLQHKDARVKLVTELLSGIRVIKFCGWEQALGARVEACRARELGRLRVIKYLDAACVYLWAALPVVISIVIFITYVLMGHQLTATKVFTALALVRMLILPLNNFPWVINGLLEAKVSLDRIQLFLDLPNHNPQAYYSPDPPAEPSTVLELHGALFSWDPVGTSLETFISHLEVKKGMLVGIVGKVGCGKSSLLAAIAGELHRLRGHVAVRGLSKGFGLATQEPWIQFATIRDNILFGKTFDAQLYKEVLEACALNDDLSILPAGDQTEVGEKGVTLSGGQRARIALARAVYQEKELYLLDDPLAAVDADVANHLLHRCILGMLSYTTRLLCTHRTEYLERADAVLLMEAGRLIRAGPPSEILPLVQAVPKAWAENGQESDSATAQSVQNPEKTKEGLEEEQSTSGRLLQEESKKEGAVALHVYQAYWKAVGQGLALAILFSLLLMQATRNAADWWLSHWISQLKAENSSQEAQPSTSPASMGLFSPQLLLFSPGNLYIPVFPLPKAAPNGSSDIRFYLTVYATIAGVNSLCTLLRAVLFAAGTLQAAATLHRRLLHRVLMAPVTFFNATPTGRILNRFSSDVACADDSLPFILNILLANAAGLLGLLAVLGSGLPWLLLLLPPLSIMYYHVQRHYRASSRELRRLGSLTLSPLYSHLADTLAGLSVLRATGATYRFEEENLRLLELNQRCQFATSATMQWLDIRLQLMGAAVVSAIAGIALVQHQQGLANPGLVGLSLSYALSLTGLLSGLVSSFTQTEAMLVSVERLEEYTCDLPQEPQGQPLQLGTGWLTQGGVEFQDVVLAYRPGLPNALDGVTFCVQPGEKLGIVGRTGSGKSSLLLVLFRLLEPSSGRVLLDGVDTSQLELAQLRSQLAIIPQEPFLFSGTVRENLDPQGLHKDRALWQALKQCHLSEVITSMGGLDGELGEGGRSLSLGQRQLLCLARALLTDAKILCIDEATASVDQKTDQLLQQTICKRFANKTVLTIAHRLNTILNSDRVLVLQAGRVVELDSPATLRNQPHSLFQQLLQSSQQGVPASLGGP

SEQ ID NO: 9121 - protein, 364 aa, Homo sapiens
MASRLLHRLRHALAGDGPGEAAASPEAEQFPESSELEDDDAEGLSSRLSGTLSFTSAEDDEDDEDEDDEEAGPDQLPLGDGTSGEDAERSPPPDGQWGSQLLARQLQDFWKKSRNTLAPQRLLFEVTSANVVKDPPSKYVLYTLAVIGPGPPDCQPAQISRRYSDFERLHRNLQRQFRGPMAAISFPRKRLRRNFTAETIARRSRAFEQFLGHLQAVPELRHAPDLQDFFVLPELRRAQSLTCTGLYREALALWANAWQLQAQLGTPSGPDRPLLTLAGLAVCHQELEDPGEARACCEKALQLLGDKSLHPLLAPFLEAHVRLSWRLGLDKRQSEARLQALQEAGLTPTPPPSLKELLIKEVLD

SEQ ID NO: 9122 - protein, 238 aa, Homo sapiens
MAADGQCSLPASWRPVTLTHVEYPAGDLSGHLLAYLSLSPVFVIVGFVTLIIFKRELHTISFLGGLALNEGVNWLIKNVIQEPRPCGGPHTAVGTKYGMPSSHSQFMWFFSVYSFLFLYLRMHQTNNARFLDLLWRHVLSLGLLAVAFLVSYSRVYLLYHTWSQVLYGGIAGGLMAIAWFIFTQEVLTPLFPRIAAWPVSEFFLIRDTSLIPNVLWFEYTVTRAEARNRQRKLGTKLQ

SEQ ID NO: 9123 - protein, 395 aa, Homo sapiens
MDFNMKKLASDAGIFFTRAVQFTEEKFGQAEKTELDAHFENLLARADSTKNWTEKILRQTEVLLQPNPSARVEEFLYEKLDRKVPSRVTNGELLAQYMADAASELGPTTPYGKTLIKVAEAEKQLGAAERDFIHTASISFLTPLRNFLEGDWKTISKERRLLQNRRLDLDACKARLKKAKAAEAKATTVPDFQETRPRNYILSASASALWNDEVDKAEQELRVAQTEFDRQAEVTRLLLEGISSTHVNHLRCLHEFVKSQTTYYAQCYRHMLDLQKQLGRFPGTFVGTTEPASPPLSSTSPTTAAATMPVVPSVASLAPPGEASLCLEEVAPPASGTRKARVLYDYEAADSSELALLADELITVYSLPGMDPDWLIGERGNKKGKVPVTYLELLS

SEQ ID NO: 9124 - protein, 311 aa, Homo sapiens
MAEMDPVAEFPQPPGAARWAEVMARFAARLGAQGRRVVLVTSGGTKVPLEARPVRFLDNFSSGRRGATSAEAFLAAGYGVLFLYRARSAFPYAHRFPPQTWLSALRPSGPALSGLLSLEAEENALPGFAEALRSYQEAAAAGTFLAVEFTTLADYLHLLQAAAQALNPLGPSAMFYLAAAVSDFYVPVSEMPEHKIQSSGGPLQITMKMVPKLLSPLVKDWAPKAFIISFKLETDPAIVINRARKALEIYQHQVVVANILESRQSFVFIVTKDSETKLLLSEEEIEKGVEIEEKIVDNLQSRHTAFIGDRN

SEQ ID NO: 9125 - protein, 1749 aa, Homo sapiens
MAAAAGGPCVRSSRELWTILLGRSALRELSQIEAELNKHWRRLLEGLSYYKPPSPSSAEKVKANKDVASPLKELGLRISKFLGLDEEQSVQLLQCYLQEDYRGTRDSVKTVLQDERQSQALILKIADYYYEERTCILRCVLHLLTYFQDERHPYRVEYADCVDKLEKELVSKYRQQFEELYKTEAPTWETHGNLMTERQVSRWFVQCLREQSMLLEIIFLYYAYFEMAPSDLLVLTKMFKEQGFGSRQTNRHLVDETMDPFVDRIGYFSALILVEGMDIESLHKCALDDRRELHQFAQDGLICQDMDCLMLTFGDIPHHAPVLLAWALLRHTLNPEETSSVVRKIGGTAIQLNVFQYLTRLLQSLASGGNDCTTSTACMCVYGLLSFVLTSLELHTLGNQQDIIDTACEVLADPSLPELFWGTEPTSGLGIILDSVCGMFPHLLSPLLQLLRALVSGKSTAKKVYSFLDKMSFYNELYKHKPHDVISHEDGTLWRRQTPKLLYPLGGQTNLRIPQGTVGQVMLDDRAYLVRWEYSYSSWTLFTCEIEMLLHVVSTADVIQHCQRVKPIIDLVHKVISTDLSIADCLLPITSRIYMLLQRLTTVISPPVDVIASCVNCLTVLAARNPAKVWTDLRHTGFLPFVAHPVSSLSQMISAEGMNAGGYGNLLMNSEQPQGEYGVTIAFLRLITTLVKGQLGSTQSQGLVPCVMFVLKEMLPSYHKWRYNSHGVREQIGCLILELIHAILNLCHETDLHSSHTPSLQFLCICSLAYTEAGQTVINIMGIGVDTIDMVMAAQPRSDGAEGQGQGQLLIKTVKLAFSVTNNVIRLKPPSNVVSPLEQALSQHGAHGNNLIAVLAKYIYHKHDPALPRLAIQLLKRLATVAPMSVYACLGNDAAAIRDAFLTRLQSKIEDMRIKVMILEFLTVAVETQPGLIELFLNLEVKDGSDGSKEFSLGMWSCLHAVLELIDSQQQDRYWCPPLLHRAAIAFLHALWQDRRDSAMLVLRTKPKFWENLTSPLFGTLSPPSETSEPSILETCALIMKIICLEIYYVVKGSLDQSLKDTLKKFSIEKRFAYWSGYVKSLAVHVAETEGSSCTSLLEYQMLVSAWRMLLIIATTHADIMHLTDSVVRRQLFLDVLDGTKALLLVPASVNCLRLGSMKCTLLLILLRQWKRELGSVDEILGPLTEILEGVLQADQQLMEKTKAKVFSAFITVLQMKEMKVSDIPQYSQLVLNVCETLQEEVIALFDQTRHSLALGSATEDKDSMETDDCSRSRHRDQRDGVCVLGLHLAKELCEVDEDGDSWLQVTRRLPILPTLLTTLEVSLRMKQNLHFTEATLHLLLTLARTQQGATAVAGAGITQSICLPLLSVYQLSTNGTAQTPSASRKSLDAPSWPGVYRLSMSLMEQLLKTLRYNFLPEALDFVGVHQERTLQCLNAVRTVQSLACLEEADHTVGFILQLSNFMKEWHFHLPQLMRDIQVNLGYLCQACTSLLHSRKMLQHYLQNKNGDGLPSAVAQRVQRPPSAASAAPSSSKQPAADTEASEQQALHTVQYGLLKILSKTLAALRHFTPDVCQILLDQSLDLAEYNFLFALSFTTPTFDSEVAPSFGTLLATVNVALNMLGELDKKKEPLTQAVGLSTQAEGTRTLKSLLMFTMENCFYLLISQAMRYLRDPAVHPRDKQRMKQELSSELSTLLSSLSRYFRRGAPSSPATGVLPSPQGKSTSLSKASPESQEPLIQLVQAFVRHMQR

SEQ ID NO: 9126 - protein, 112 aa, Homo sapiens
MGCRAASGLLPGVAVVLLLLLQSTQSVYIQYQGFRVQLESMKKLSDLEAQWAPSPRLQAQSLLPAVCHHPALPQDLQPVCASQEASSIFKTLRTIANDDCELCVNVACTGCL

SEQ ID NO: 9127 - protein, 686 aa, Homo sapiens
MKPPFLLALVVCSVVSTNLKMVSKRNSVDGCIDWSVDLKTYMALAGEPVRVKCALFYSYIRTNYSTAQSTGLRLMWYKNKGDLEEPIIFSEVRMSKEEDSIWFHSAEAQDSGFYTCVLRNSTYCMKVSMSLTVAENESGLCYNSRIRYLEKSEVTKRKEISCPDMDDFKKSDQEPDVVWYKECKPKMWRSIIIQKGNALLIQEVQEEDGGNYTCELKYEGKLVRRTTELKVTALLTDKPPKPLFPMENQPSVIDVQLGKPLNIPCKAFFGFSGESGPMIYWMKGEKFIEELAGHIREGEIRLLKEHLGEKEVELALIFDSVVEADLANYTCHVENRNGRKHASVLLRKKDLIYKIELAGGLGAIFLLLVLLVVIYKCYNIELMLFYRQHFGADETNDDNKEYDAYLSYTKVDQDTLDCDNPEEEQFALEVLPDVLEKHYGYKLFIPERDLIPSGTYMEDLTRYVEQSRRLIIVLTPDYILRRGWSIFELESRLHNMLVSGEIKVILIECTELKGKVNCQEVESLKRSIKLLSLIKWKGSKSSKLNSKFWKHLVYEMPIKKKEMLPRCHVLDSAEQGLFGELQPIPSIAMTSTSATLVSSQADLPEFHPSDSMQIRHCCRGYKHEIPATTLPVPSLGNHHTYCNLPLTLLNGQLPLNNTLKDTQEFHRNSSLLPLSSKELSFTSDIW

SEQ ID NO: 9128 - protein, 538 aa, Homo sapiens
MTRECPSPAPGPGAPLSGSVLAEAAVVFAVVLSIHATVWDRYSWCAVALAVQAFYVQYKWDRLLQQGSAVFQFRMSANSGLLPASMVMPLLGLVMKERCQTAGNPFFERFGIVVAATGMAVALFSSVLALGITRPVPTNTCVILGLAGGVIIYIMKHSLSVGEVIEVLEVLLIFVYLNMILLYLLPRCFTPGEALLVLGGISFVLNQLIKRSLTLVESQGDPVDFFLLVVVVGMVLMGIFFSTLFVFMDSGTWASSIFFHLMTCVLSLGVVLPWLHRLIRRNPLLWLLQFLFQTDTRIYLLAYWSLLATLACLVVLYQNAKRSSSESKKHQAPTIARKYFHLIVVATYIPGIIFDRPLLYVAATVCLAVFIFLEYVRYFRIKPLGHTLRSFLSLFLDERDSGPLILTHIYLLLGMSLPIWLIPRPCTQKGSLGGARALVPYAGVLAVGVGDTVASIFGSTMGEIRWPGTKKTFEGTMTSIFAQIISVALILIFDSGVDLNYSYAWILGSISTVSLLEAYTTQIDNLLLPLYLLILLMA

SEQ ID NO: 9129 - protein, 178 aa, Homo sapiens
MVSVPTTWCSVALALLVALHEGKGQAAATLEQPASSSHAQGTHLRLRRCSCSSWLDKECVYFCHLDIIWVNTPEQTAPYGLGNPPRRRRRSLPRRCQCSSARDPACATFCLRRPWTEAGAVPSRKSPADVFQTGKTGATTGELLQRLRDISTVKSLFAKRQQEAMREPRSTHSRWRKR

SEQ ID NO: 9130 - protein, 546 aa, Homo sapiens
MGFEELLEQVGGFGPFQLRNVALLALPRVLLPLHFLLPIFLAAVPAHRCALPGAPANFSHQDVWLEAHLPREPDGTLSSCLRFAYPQALPNTTLGEERQSRGELEDEPATVPCSQGWEYDHSEFSSTIATEWDLVCEQKGLNRAASTFFFAGVLVGAVAFGYLSDRFGRRRLLLVAYVSTLVLGLASAASVSYVMFAITRTLTGSALAGFTIIVMPLELEWLDVEHRTVAGVLSSTFWTGGVMLLALVGYLIRDWRWLLLAVTLPCAPGILSLWWVPESARWLLTQGHVKEAHRYLLHCARLNGRPVCEDSFSQEAVSKVAAGERVVRRPSYLDLFRTPRLRHISLCCVVVWFGVNFSYYGLSLDVSGLGLNVYQTQLLFGAVELPSKLLVYLSVRYAGRRLTQAGTLLGTALAFGTRLLVSSDMKSWSTVLAVMGKAFSEAAFTTAYLFTSELYPTVLRQTGMGLTALVGRLGGSLAPLAALLDGVWLSLPKLTYGGIALLAAGTALLLPETRQAQLPETIQDVERKSAPTSLQEEEMPMKQVQN

SEQ ID NO: 9131 - protein, 291 aa, Homo sapiens
MACLSPSQLQKFQQDGFLVLEGFLSAEECVAMQQRIGEIVAEMDVPLHCRTEFSTQEEEQLRAQGSTDYFLSSGDKIRFFFEKGVFDEKGNFLVPPEKSINKIGHALHAHDPVFKSITHSFKVQTLARSLGLQMPVVVQSMYIFKQPHFGGEVSPHQDASFLYTEPLGRVLGVWIAVEDATLENGCLWFIPGSHTSGVSRRMVRAPVGSAPGTSFLGSEPARDNSLFVPTPVQRGALVLIHGEVVHKSKQNLSDRSRQAYTFHLMEASGTTWSPENWLQPTAELPFPQLYT

SEQ ID NO: 9132 - protein, 294 aa, Homo sapiens
MATHGQTCARPMCIPPSYADLGKAARDIFNKGFGFGLVKLDVKTKSCSGVEFSTSGSSNTDTGKVTGTLETKYKWCEYGLTFTEKWNTDNTLGTEIAIEDQICQGLKLTFDTTFSPNTGKKSGKIKSSYKRECINLGCDVDFDFAGPAIHGSAVFGYEGWLAGYQMTFDSAKSKLTRNNFAVGYRTGDFQLHTNVNDGTEFGGSIYQKVCEDLDTSVNLAWTSGTNCTRFGIAAKYQLDPTASISAKVNNSSLIGVGYTQTLRPGVKLTLSALVDGKSINAGGHKVGLALELEA

SEQ ID NO: 9133 - protein, 591 aa, Homo sapiens
MKYILVTGGVISGIGKGIIASSVGTILKSCGLHVTSIKIDPYINIDAGTFSPYEHGEVFVLDDGGEVDLDLGNYERFLDIRLTKDNNLTTGKIYQYVINKERKGDYLGKTVQVVPHITDAIQEWVMRQALIPVDEDGLEPQVCVIELGGTVGDIESMPFIEAFRQFQFKVKRENFCNIHVSLVPQPSSTGEQKTKPTQNSVRELRGLGLSPDLVVCRCSNPLDTSVKEKISMFCHVEPEQVICVHDVSSIYRVPLLLEEQGVVDYFLRRLDLPIERQPRKMLMKWKEMADRYDRLLETCSIALVGKYTKFSDSYASVIKALEHSALAINHKLEIKYIDSADLEPITSQEEPVRYHEAWQKLCSAHGVLVPGGFGVRGTEGKIQAIAWARNQKKPFLGVCLGMQLAVVEFSRNVLGWQDANSTEFDPTTSHPVVVDMPEHNPGQMGGTMRLGKRRTLFQTKNSVMRKLYGDADYLEERHRHRFEVNPVWKKCLEEQGLKFVGQDVEGERMEIVELEDHPFFVGVQYHPEFLSRPIKPSPPYFGLLLASVGRLSHYLQKGCRLSPRDTYSDRSGSSSPDSEITELKFPSINHD

SEQ ID NO: 9134 - protein, 417 aa, Homo sapiens
MTTLVPATLSFLLLWTLPGQVLLRVALAKEEVKSGTKGSQPMSPSDFLDKLMGRTSGYDARIRPNFKGPPVNVTCNIFINSFSSITKTTMDYRVNVFLRQQWNDPRLSYREYPDDSLDLDPSMLDSIWKPDLFFANEKGANFHEVTTDNKLLRIFKNGNVLYSIRLTLILSCLMDLKNFPMDIQTCTMQLESFGYTMKDLVFEWLEDAPAVQVAEGLTLPQFILRDEKDLGCCTKHYNTGKFTCIEVKFHLERQMGYYLIQMYIPSLLIVILSWVSFWINMDAAPARVGLGITTVLTMTTQSSGSRASLPKVSYVKAIDIWMAVCLLFVFAALLEYAAINFVSRQHKEFIRLRRRQRRQRLEEDIIQESRFYFRGYGLGHCLQARDGGPMEGSGIYSPQPPAPLLREGETTRKLYVD

SEQ ID NO: 9135 - protein, 329 aa, Homo sapiens
MGATGDAEQPRGPSGAERGGLELGDAGAAGQLVLTNPWNIMIKHRQVQRRGRRSQMTTSFTDPAISMDLLRAVLQPSINEEIQTVFNKYMKFFQKAALNVRDNVGEEVDAEQLIQEACRSCLEQAKLLFSDGEKVIPRLTHELPGIKRGRQAEEECAHRGSPLPKKRKGRPPGHILSSDRAAAGMVWKPKSCEPIRREGPKWDPARLNESTTFVLGSRANKALGMGGTRGRIYIKHPHLFKYAADPQDKHWLAEQHHMRATGGKMAYLLIEEDIRDLAASDDYRGCLDLKLEELKSFVLPSWMVEKMRKYMETLRTENEHRAVEAPPQT

SEQ ID NO: 9136 - protein, 159 aa, Homo sapiens
MDKPRKENEEEPQSAPKTDEERPPVEHSPEKQSPEEQSSEEQSSEEEFFPEELLPELLPEMLLSEERPPQEGLSRKDLFEGRPPMEQPPCGVGKHKLEEGSFKERLARSRPQFRGDIHGRNLSNEEMIQAADELEEMKRVRNKLMIMHWKAKRSRPYPI

SEQ ID NO: 9137 - protein, 94 aa, Homo sapiens
MMLSCLFLLKALLALGSLESWITAGEHGRGGDCPKVLVGLCIVGCVMDENCQAGEKCCKSGCGRFCVPPVLPPKLTMNPNWTVRSDSELEIPVP

SEQ ID NO: 9138 - protein, 137 aa, Homo sapiens
MMLSCLFLLKALLALGSLESWITAGEHAKEGECPPHKNPCKELCQGDELCPAEQKCCTTGCGRICRDIPKGRGGDCPKVLVGLCIVGCVMDENCQAGEKCCKSGCGRFCVPPVLPPKLTMNPNWTVRSDSELEIPVP

SEQ ID NO: 9139 - protein, 111 aa, Homo sapiens
MANIHQENEEMEQPMQNGEEDRPLGGGEGHQPAGNRRGQARRLAPNFRWAIPNRQINDGMGGDGDDMEIFMEEMREIRRKLRELQLRNCLRILMGELSNHHDHHDEFCLMP

SEQ ID NO: 9140 - protein, 297 aa, Homo sapiens
MRALRAGLTLASGAGLGAVVEGWRRRREDARAAPGLLGRLPVLPVAAAAELPPVPGGPRGPGELAKYGLPGLAQLKSRESYVLCYDPRTRGALWVVEQLRPERLRGDGDRRECDFREDDSVHAYHRATNADYRGSGFDRGHLAAAANHRWSQKAMDDTFYLSNVAPQVPHLNQNAWNNLEKYSRSLTRSYQNVYVCTGPLFLPRTEADGKSYVKYQVIGKNHVAVPTHFFKVLILEAAGGQIELRTYVMPNAPVDEAIPLERFLVPIESIERASGLLFVPNILARAGSLKAITAGSK

SEQ ID NO: 9141 - protein, 79 aa, Homo sapiens
MAPQTLLPVLVLCVLLLQAQGGYRDKKRMQKTQLSPEIKVCQQQPKLYLCKHLCESHRDCQANNICCSTYCGNVCMSIL

SEQ ID NO: 9142 - protein, 400 aa, Homo sapiens
MSSLHKSRIADFQDVLKEPSIALEKLRELSFSGIPCEGGLRCLCWKILLNYLPLERASWTSILAKQRELYAQFLREMIIQPGIAKANMGVSREDVTFEDHPLNPNPDSRWNTYFKDNEVLLQIDKDVRRLCPDISFFQRATDYPCLLILDPQNEFETLRKRVEQTTLKSQTVARNRSGVTNMSSPHKNSVPSSLNEYEVLPNGCEAHWEVVERILFIYAKLNPGIAYVQGMNEIVGPLYYTFATDPNSEWKEHAEADTFFCFTNLMAEIRDNFIKSLDDSQCGITYKMEKVYSTLKDKDVELYLKLQEQNIKPQFFAFRWLTLLLSQEFLLPDVIRIWDSLFADDNRFDFLLLVCCAMLMLIREQLLEGDFTVNMRLLQDYPITDVCQILQKAKELQDSK

SEQ ID NO: 9143 - protein, 439 aa, Homo sapiens
MSTEGGFGGTSSSDAQQSLQSFWPRVMEEIRNLTVKDFRVQELPLARIKKIMKLDEDVKMISAEAPVLFAKAAQIFITELTLRAWIHTEDNKRRTLQRNDIAMAITKFDQFDFLIDIVPRDELKPPKRQEEVRQSVTPAEPVQYYFTLAQQPTAVQVQGQQQGQQTTSSTTTIQPGQIIIAQPQQGQTTPVTMQVGEGQQVQIVQAQPQGQAQQAQSGTGQTMQVMQQIITNTGEIQQIPVQLNAGQLQYIRLAQPVSGTQVVQGQIQTLATNAQQITQTEVQQGQQQFSQFTDGQRNSVQQARVSELTGEAEPREVKATGNSTPCTSSLPTTHPPSHRAGASCVCCSQPQQSSTSPPPSDALQWVVVEVSGTPNQLETHRELHAPLPGMTSLSPLHPSQQLYQIQQVTMPAGQDLAQPMFIQSANQPSDGQAPQVTGD

SEQ ID NO: 9144 - protein, 104 aa, Homo sapiens
MKSCQKMEGKPENESEPKHEEEPKPEEKPEEEEKLEEEAKAKGTFRERLIQSLQEFKEDIHNRHLSNEDMFREVDEIDEIRRVRNKLIVMRWKVNRNHPYPYLM

SEQ ID NO: 9145 - protein, 133 aa, Homo sapiens
MGSSGLLSLLVLFVLLANVQGPGLTDWLFPRRCPKIREECEFQERDVCTKDRQCQDNKKCCVFSCGKKCLDLKQDVCEMPKETGPCLAYFLHWWYDKKDNTCSMFVYGGCQGNNNNFQSKANCLNTCKNKRFP

SEQ ID NO: 9146 - protein, 267 aa, Homo sapiens
MAPWALLSPGVLVRTGHTVLTWGITLVLFLHDTELRQWEEQGELLLPLTFLLLVLGSLLLYLAVSLMDPGYVNVQPQPQEELKEEQTAMVPPAIPLRRCRYCLVLQPLRARHCRECRRCVRRYDHHCPWMENCVGERNHPLFVVYLALQLVVLLWGLYLAWSGLRFFQPWGQWLRSSGLLFATFLLLSLFSLVASLLLVSHLYLVASNTTTWEFISSHRIAYLRQRPSNPFDRGLTRNLAHFFCGWPSGSWETLWAEEEEEGSSPAV

SEQ ID NO: 9147 - protein, 131 aa, Homo sapiens
MGLSGLLPILVPFILLGDIQEPGHAEGILGKPCPKIKVECEVEEIDQCTKPRDCPENMKCCPFSRGKKCLDFRKIYAVCHRRLAPAWPPYHTGGTIKKTKICSEFIYGGSQGNNNNFQTEAICLVTCKKYH

SEQ ID NO: 9148 - protein, 281 aa, Homo sapiens
MAPWALLSPGVLVRTGHTVLTWGITLVLFLHDTGEPDPERPRTHPIPQLRQWEEQGELLLPLTFLLLVLGSLLLYLAVSLMDPGYVNVQPQPQEELKEEQTAMVPPAIPLRRCRYCLVLQPLRARHCRECRRCVRRYDHHCPWMENCVGERNHPLFVVYLALQLVVLLWGLYLAWSGLRFFQPWGQWLRSSGLLFATFLLLSLFSLVASLLLVSHLYLVASNTTTWEFISSHRIAYLRQRPSNPFDRGLTRNLAHFFCGWPSGSWETLWAEEEEEGSSPAV

SEQ ID NO: 9149 - protein, 86 aa, Homo sapiens
MGLSGLLPILVPFILLGDIQEPGHAEGILGKPCPKIKVECEVEEIDQCTKPRDCPENMKCCPFSRGKKCLDFRKVSLTLYHKEELE

SEQ ID NO: 9150 - protein, 124 aa, Homo sapiens
MPACRLGPLAAALLLSLLLFGFTLVSGTGAEKTGVCPELQADQNCTQECVSDSECADNLKCCSAGCATFCSLPNDKEGSCPQVNINFPQLGLCRDQCQVDSQCPGQMKCCRNGCGKVSCVTPNF

SEQ ID NO: 9151 - protein, 326 aa, Homo sapiens
MAGPNQLCIRRWTTKHVAVWLKDEGFFEYVDILCNKHRLDGITLLTLTEYDLRSPPLEIKVLGDIKRLMLSVRKLQKIHIDVLEEMGYNSDSPMGSMTPFISALQSTDWLCNGELSHDCDGPITDLNSDQYQYMNGKNKHSVRRLDPEYWKTILSCIYVFIVFGFTSFIMVIVHERVPDMQTYPPLPDIFLDSVPRIPWAFAMTEVCGMILCYIWLLVLLLHKHRSILLRRLCSLMGTVFLLRCFTMFVTSLSVPGQHLQCTGKIYGSVWEKLHRAFAIWSGFGMTLTGVHTCGDYMFSGHTVVLTMLNFFVTECKYLFSASMRIR

SEQ ID NO: 9152 - protein, 511 aa, Homo sapiens
MAAAMPLALLVLLLLGPGGWCLAEPPRDSLREELVITPLPSGDVAATFQFRTRWDSELQREGVSHYRLFPKALGQLISKYSLRELHLSFTQGFWRTRYWGPPFLQAPSGAELWVWFQDTVTDVDKSWKELSNVLSGIFCASLNFIDSTNTVTPTASFKPLGLANDTDHYFLRYAVLPREVVCTENLTPWKKLLPCSSKAGLSVLLKADRLFHTSYHSQAVHIRPVCRNARCTSISWELRQTLSVVFDAFITGQGKKDWSLFRMFSRTLTEPCPLASESRVYVDITTYNQDNETLEVHPPPTTTYQDVILGTRKTYAIYDLLDTAMINNSRNLNIQLKWKRPPENGYIHYQPAQDRLQPHLLEMLIQLPANSVTKVSIQFERALLKWTEYTPDPNHGFYVSPSVLSALVPSMVAAKPVDWEESPLFNSLFPVSDGSNYFVRLYTEPLLVNLPTPDFSMPYNVICLTCTVVAVCYGSFYNLLTRTFHIEEPRTGGLAKRLANLIRRARGVPPL

SEQ ID NO: 9153 - protein, 290 aa, Homo sapiens
MAPKRQSPLPPQKKKPRPPPALGPEETSASAGLPKKGEKEQQEAIEHIDEVQNEIDRLNEQASEEILKVEQKYNKLRQPFFQKRSELIAKIPNFWVTTFVNHPQVSALLGEEDEEALHYLTRVEVTEFEDIKSGYRIDFYFDENPYFENKVLSKEFHLNESGDPSSKSTEIKWKSGKDLTKRSSQTQNKASRKRQHEEPESFFTWFTDHSDAGADELGEVIKDDIWPNPLQYYLVPDMDDEEGEGEEDDDDDEEEEGLEDIDEEGDEDEGEEDEDDDEGEEGEEDEGEDD

SEQ ID NO: 9154 - protein, 378 aa, Homo sapiens
MISFQESVTFQDVAVDFTAEEWQLLDCAERTLYWDVMLENYRNLISVGCPITKTKVILKVEQGQEPWMVEGANPHESSPESDYPLVDEPGKHRESKDNFLKSVLLTFNKILTMERIHHYNMSTSLNPMRKKSYKSFEKCLPPNLDLLKYNRSYTVENAYECSECGKAFKKKFHFIRHEKNHTRKKPFECNDCGKAYSRKAHLATHQKIHNGERPFVCNDCGKAFMHKAQLVVHQRLHTGEKPYECSQCGKTFTWNSSFNQHVKSHTLEKSFECKECGKTFRYSSSLYKHSRFHTGEKPYQCIICGKAFGNTSVLVTHQRIHTGEKPYSCIECGKAFIKKSHLLRHQITHTGEKPYECNRCGKAFSQKSNLIVHQKIHT

SEQ ID NO: 9155 - protein, 1890 aa, Homo sapiens
MVKLANPLYTEWILEAIQKIKKQKQRPSEERICHAVSTSHGLDKKTVSEQLELSVQDGSVLKVTNKGLASYKDPDNPGRFSSVKPGTFPKSAKGSRGSCNDLRNVDWNKLLRRAIEGLEEPNGSSLKNIEKYLRSQSDLTSTTNNPAFQQRLRLGAKRAVNNGRLLKDGPQYRVNYGSLDGKGAPQYPSAFPSSLPPVSLLPHEKDQPRADPIPICSFCLGTKESNREKKPEELLSCADCGSSGHPSCLKFCPELTTNVKALRWQCIECKTCSACRVQGRNADNMLFCDSCDRGFHMECCDPPLSRMPKGMWICQVCRPKKKGRKLLHEKAAQIKRRYAKPIGRPKNKLKQRLLSVTSDEGSMNAFTGRGSPGRGQKTKVCTTPSSGHAASGKDSSSRLAVTDPTRPGATTKITTTSTYISASTLKVNKKTKGLIDGLTKFFTPSPDGRRSRGEIIDFSKHYRPRKKVSQKQSCTSHVLATDTEIKINIKQESADVNVIGNKDVVTEEDLDVFKQAQELSWEKIECESGVEDCGRYPSVIEFGKYEIQTWYSSPYPQEYARLPKLYLCEFCLKYMKSKNILLRHSKKCGWFHPPANEIYRRKDLSVFEVDGNMSKIYCQNLCLLAKLFLDHKTLYYDVEPFLFYVLTKNDEKGCHLVGYFSKEKLCQQKYNVSCIMIMPQHQRQGFGRFLIDFSYLLSRREGQAGSPEKPLSDLGRLSYLAYWKSVILEYLYHHHERHISIKAISRATGMCPHDIATTLQHLHMIDKRDGRFVIIRREKLILSHMEKLKTCSRANELDPDSLRWTPILISNAAVSEEEREAEKEAERLMEQASCWEKEEQEILSTRANSRQSPAKVQSKNKYLHSPESRPVTGERGQLLELSKESSEEEEEEEDEEEEEEEEEEEEDEEEEEEEEEEEEEENIQSSPPRLTKPQSVAIKRKRPFVLKKKRGRKRRRINSSVTTETISETTEVLNEPFDNSDEERPMPQLEPTCEIEVEEDGRKPVLRKAFQHQPGKKRQTEEEEGKDNHCFKNADPCRNNMNDDSSNLKEGSKDNPEPLKCKQVWPKGTKRGLSKWRQNKERKTGFKLNLYTPPETPMEPDEQVTVEEQKETSEGKTSPSPIRIEEEVKETGEALLPQEENRREETCAPVSPNTSPGEKPEDDLIKPEEEEEEEEEEEEEEEEEEGEEEEGGGNVEKDPDGAKSQEKEEPEISTEKEDSARLDDHEEEEEEDEEPSHNEDHDADDEDDSHMESAEVEKEELPRESFKEVLENQETFLDLNVQPGHSNPEVLMDCGVDLTASCNSEPKELAGDPEAVPESDEEPPPGEQAQKQDQKNSKEVDTEFKEGNPATMEIDSETVQAVQSLTQESSEQDDTFQDCAETQEACRSLQNYTRADQSPQIATTLDDCQQSDHSSPVSSVHSHPGQSVRSVNSPSVPALENSYAQISPDQSAISVPSLQNMETSPMMDVPSVSDHSQQVVDSGFSDLGSIESTTENYENPSSYDSTMGGSICGNGSSQNSCSYSNLTSSSLTQSSCAVTQQMSNISGSCSMLQQTSISSPPTCSVKSPQGCVVERPPSSSQQLAQCSMAANFTPPMQLAEIPETSNANIGLYERMGQSDFGAGHYPQPSATFSLAKLQQLTNTLIDHSLPYSHSAAVTSYANSASLSTPLSNTGLVQLSQSPHSVPGGPQAQATMTPPPNLTPPPMNLPPPLLQRNMAASNIGISHSQRLQTQIASKGHISMRTKSASLSPAAATHQSQIYGRSQTVAMQGPARTLTMQRGMNMSVNLMPAPAYNVNSVNMNMNTLNAMNGYSMSQPMMNSGYHSNHGYMNQTPQYPMQMQMGMMGTQPYAQQPMQTPPHGNMMYTAPGHHGYMNTGMSKQSLNGSYMRR

SEQ ID NO: 9156 - protein, 1781 aa, Homo sapiens
MVKLANPLYTEWILEAIQKIKKQKQRPSEERICHAVSTSHGLDKKTVSEQLELSVQDGSVLKVTNKGLASYKDPDNPGRFSSVKPGTFPKSAKGSRGSCNDLRNVDWNKLLRRAIEGLEEPNGSSLKNIEKYLRSQSDLTSTTNNPAFQQRLRLGAKRAVNNGRLLKDGPQYRVNYGSLDGKGAPQYPSAFPSSLPPVSLLPHEKDQPRADPIPICSFCLGTKESNREKKPEELLSCADCGSSGHPSCLKFCPELTTNVKALRWQCIECKTCSACRVQGRNADNMLFCDSCDRGFHMECCDPPLSRMPKGMWICQVCRPKKKGRKLLHEKAAQIKRRYAKPIGRPKNKLKQRLLSVTSDEGSMNAFTGRGSPDTEIKINIKQESADVNVIGNKDVVTEEDLDVFKQAQELSWEKIECESGVEDCGRYPSVIEFGKYEIQTWYSSPYPQEYARLPKLYLCEFCLKYMKSKNILLRHSKKCGWFHPPANEIYRRKDLSVFEVDGNMSKIYCQNLCLLAKLFLDHKTLYYDVEPFLFYVLTKNDEKGCHLVGYFSKEKLCQQKYNVSCIMIMPQHQRQGFGRFLIDFSYLLSRREGQAGSPEKPLSDLGRLSYLAYWKSVILEYLYHHHERHISIKAISRATGMCPHDIATTLQHLHMIDKRDGRFVIIRREKLILSHMEKLKTCSRANELDPDSLRWTPILISNAAVSEEEREAEKEAERLMEQASCWEKEEQEILSTRANSRQSPAKVQSKNKYLHSPESRPVTGERGQLLELSKESSEEEEEEEDEEEEEEEEEEEEDEEEEEEEEEEEEEENIQSSPPRLTKPQSVAIKRKRPFVLKKKRGRKRRRINSSVTTETISETTEVLNEPFDNSDEERPMPQLEPTCEIEVEEDGRKPVLRKAFQHQPGKKRQTEEEEGKDNHCFKNADPCRNNMNDDSSNLKEGSKDNPEPLKCKQVWPKGTKRGLSKWRQNKERKTGFKLNLYTPPETPMEPDEQVTVEEQKETSEGKTSPSPIRIEEEVKETGEALLPQEENRREETCAPVSPNTSPGEKPEDDLIKPEEEEEEEEEEEEEEEEEEGEEEEGGGNVEKDPDGAKSQEKEEPEISTEKEDSARLDDHEEEEEEDEEPSHNEDHDADDEDDSHMESAEVEKEELPRESFKEVLENQETFLDLNVQPGHSNPEVLMDCGVDLTASCNSEPKELAGDPEAVPESDEEPPPGEQAQKQDQKNSKEVDTEFKEGNPATMEIDSETVQAVQSLTQESSEQDDTFQDCAETQEACRSLQNYTRADQSPQIATTLDDCQQSDHSSPVSSVHSHPGQSVRSVNSPSVPALENSYAQISPDQSAISVPSLQNMETSPMMDVPSVSDHSQQVVDSGFSDLGSIESTTENYENPSSYDSTMGGSICGNGSSQNSCSYSNLTSSSLTQSSCAVTQQMSNISGSCSMLQQTSISSPPTCSVKSPQGCVVERPPSSSQQLAQCSMAANFTPPMQLAEIPETSNANIGLYERMGQSDFGAGHYPQPSATFSLAKLQQLTNTLIDHSLPYSHSAAVTSYANSASLSTPLSNTGLVQLSQSPHSVPGGPQAQATMTPPPNLTPPPMNLPPPLLQRNMAASNIGISHSQRLQTQIASKGHISMRTKSASLSPAAATHQSQIYGRSQTVAMQGPARTLTMQRGMNMSVNLMPAPAYNVNSVNMNMNTLNAMNGYSMSQPMMNSGYHSNHGYMNQTPQYPMQMQMGMMGTQPYAQQPMQTPPHGNMMYTAPGHHGYMNTGMSKQSLNGSYMRR

SEQ ID NO: 9157 - protein, 536 aa, Homo sapiens
MATRAQPGPLSQAGSAGVAALATVGVASGPGPGRPGPLQDETLGVASVPSQWRAVQGIRWETKSCQTASIATASASAQARNHVDAQVQTEAPVPVSVQPPSQYDIPRLAAFLRRVEAMVIRELNKNWQSHAFDGFEVNWTEQQQMVSCLYTLGYPPAQAQGLHVTSISWNSTGSVVACAYGRLDHGDWSTLKSFVCAWNLDRRDLRPQQPSAVVEVPSAVLCLAFHPTQPSHVAGGLYSGEVLVWDLSRLEDPLLWRTGLTDDTHTDPVSQVVWLPEPGHSHRFQVLSVATDGKVLLWQGIGVGQLQLTEGFALVMQQLPRSTKLKKHPRGETEVGATAVAFSSFDPRLFILGTEGGFPLKCSLAAGEAALTRMPSSVPLRAPAQFTFSPHGGPIYSVSCSPFHRNLFLSAGTDGHVHLYSMLQAPPLTSLQLSLKYLFAVRWSPVRPLVFAAASGKGDVQLFDLQKSSQKPTVLIKQTQDESPVYCLEFNSQQTQLLAAGDAQGTVKVWQLSTEFTEQGPREAEDLDCLAAEVAA

SEQ ID NO: 9158 - protein, 112 aa, Homo sapiens
MDPNPRAALERQQLRLRERQKFFEDILQPETEFVFPLSHLHLESQRPPIGSISSMEVNVDTLEQVELIDLGDPDAADVFLPCEDPPPTPQSSGMPLCFGDFSASQPEPDVRL

SEQ ID NO: 9159 - protein, 429 aa, Homo sapiens
MTGKSVKDVDRYQAVLANLLLEEDNKFCADCQSKGPRWASWNIGVFICIRCAGIHRNLGVHISRVKSVNLDQWTQEQIQCMQEMGNGKANRLYEAYLPETFRRPQIDPAVEGFIRDKYEKKKYMDRSLDINAFRKEKDDKWKRGSEPVPEKKLEPVVFEKVKMPQKKEDPQLPRKSSPKSTAPVMDLLGLDAPVACSIANSKTSNTLEKDLDLLASVPSPSSSGSRKVVGSMPTAGSAGSVPENLNLFPEPGSKSEEIGKKQLSKDSILSLYGSQTPQMPTQAMFMAPAQMAYPTAYPSFPGVTPPNSIMGSMMPPPVGMVAQPGASGMVAPMAMPAGYMGGMQASMMGVPNGMMTTQQAGYMAGMAAMPQTVYGVQPAQQLQWNLTQMTQQMAGMNFYGANGMMNYGQSMSGGNGQAANQTLSPQMWK

SEQ ID NO: 9160 - protein, 2472 aa, Homo sapiens
MDPSGVKVLETAEDIQERRQQVLDRYHRFKELSTLRRQKLEDSYRFQFFQRDAEELEKWIQEKLQIASDENYKDPTNLQGKLQKHQAFEAEVQANSGAIVKLDETGNLMISEGHFASETIRTRLMELHRQWELLLEKMREKGIKLLQAQKLVQYLRECEDVMDWINDKEAIVTSEELGQDLEHVEVLQKKFEEFQTDMAAHEERVNEVNQFAAKLIQEQHPEEELIKTKQDEVNAAWQRLKGLALQRQGKLFGAAEVQRFNRDVDETISWIKEKEQLMASDDFGRDLASVQALLRKHEGLERDLAALEDKVKALCAEADRLQQSHPLSATQIQVKREELITNWEQIRTLAAERHARLNDSYRLQRFLADFRDLTSWVTEMKALINADELASDVAGAEALLDRHQEHKGEIDAHEDSFKSADESGQALLAAGHYASDEVREKLTVLSEERAALLELWELRRQQYEQCMDLQLFYRDTEQVDNWMSKQEAFLLNEDLGDSLDSVEALLKKHEDFEKSLSAQEEKITALDEFATKLIQNNHYAMEDVATRRDALLSRRNALHERAMRRRAQLADSFHLQQFFRDSDELKSWVNEKMKTATDEAYKDPSNLQGKVQKHQAFEAELSANQSRIDALEKAGQKLIDVNHYAKDEVAARMNEVISLWKKLLEATELKGIKLREANQQQQFNRNVEDIELWLYEVEGHLASDDYGKDLTNVQNLQKKHALLEADVAAHQDRIDGITIQARQFQDAGHFDAENIKKKQEALVARYEALKEPMVARKQKLADSLRLQQLFRDVEDEETWIREKEPIAASTNRGKDLIGVQNLLKKHQALQAEIAGHEPRIKAVTQKGNAMVEEGHFAAEDVKAKLHELNQKWEALKAKASQRRQDLEDSLQAQQYFADANEAESWMREKEPIVGSTDYGKDEDSAEALLKKHEALMSDLSAYGSSIQALREQAQSCRQQVAPTDDETGKELVLALYDYQEKSPREVTMKKGDILTLLNSTNKDWWKVEVNDRQGFVPAAYVKKLDPAQSASRENLLEEQGSIALRQEQIDNQTRITKEAGSVSLRMKQVEELYHSLLELGEKRKGMLEKSCKKFMLFREANELQQWINEKEAALTSEEVGADLEQVEVLQKKFDDFQKDLKANESRLKDINKVAEDLESEGLMAEEVQAVQQQEVYGMMPRDETDSKTASPWKSARLMVHTVATFNSIKELNERWRSLQQLAEERSQLLGSAHEVQRFHRDADETKEWIEEKNQALNTDNYGHDLASVQALQRKHEGFERDLAALGDKVNSLGETAERLIQSHPESAEDLQEKCTELNQAWSSLGKRADQRKAKLGDSHDLQRFLSDFRDLMSWINGIRGLVSSDELAKDVTGAEALLERHQEHRTEIDARAGTFQAFEQFGQQLLAHGHYASPEIKQKLDILDQERADLEKAWVQRRMMLDQCLELQLFHRDCEQAENWMAAREAFLNTEDKGDSLDSVEALIKKHEDFDKAINVQEEKIAALQAFADQLIAAGHYAKGDISSRRNEVLDRWRRLKAQMIEKRSKLGESQTLQQFSRDVDEIEAWISEKLQTASDESYKDPTNIQSKHQKHQAFEAELHANADRIRGVIDMGNSLIERGACAGSEDAVKARLAALADQWQFLVQKSAEKSQKLKEANKQQNFNTGIKDFDFWLSEVEALLASEDYGKDLASVNNLLKKHQLLEADISAHEDRLKDLNSQADSLMTSSAFDTSQVKDKRDTINGRFQKIKSMAASRRAKLNESHRLHQFFRDMDDEESWIKEKKLLVGSEDYGRDLTGVQNLRKKHKRLEAELAAHEPAIQGVLDTGKKLSDDNTIGKEEIQQRLAQFVEHWKELKQLAAARGQRLEESLEYQQFVANVEEEEAWINEKMTLVASEDYGDTLAAIQGLLKKHEAFETDFTVHKDRVNDVCTNGQDLIKKNNHHEENISSKMKGLNGKVSDLEKAAAQRKAKLDENSAFLQFNWKADVVESWIGEKENSLKTDDYGRDLSSVQTLLTKQETFDAGLQAFQQEGIANITALKDQLLAAKHVQSKAIEARHASLMKRWSQLLANSAARKKKLLEAQSHFRKVEDLFLTFAKKASAFNSWFENAEEDLTDPVRCNSLEEIKALREAHDAFRSSLSSAQADFNQLAELDRQIKSFRVASNPYTWFTMEALEETWRNLQKIIKERELELQKEQRRQEENDKLRQEFAQHANAFHQWIQETRTYLLDGSCMVEESGTLESQLEATKRKHQEIRAMRSQLKKIEDLGAAMEEALILDNKYTEHSTVGLAQQWDQLDQLGMRMQHNLEQQIQARNTTGVTEEALKEFSMMFKHFDKDKSGRLNHQEFKSCLRSLGYDLPMVEEGEPDPEFEAILDTVDPNRDGHVSLQEYMAFMISRETENVKSSEEIESAFRALSSEGKPYVTKEELYQNLTREQADYCVSHMKPYVDGKGRELPTAFDYVEFTRSLFVN

SEQ ID NO: 9161 - protein, 198 aa, Homo sapiens
MAPARLFALLLFFVGGVAESIRETEVIDPQDLLEGRYFSGALPDDEDVVGPGQESDDFELSGSGDLDDLEDSMIGPEVVHPLVPLDNHIPERAGSGSQVPTEPKKLEENEVIPKRISPVEESEDVSNKVSMSSTVQGSNIFERTEVLAALIVGGIVGILFAVFLILLLMYRMKKKDEGSYDLGKKPIYKKAPTNEFYA

SEQ ID NO: 9162 - protein, 345 aa, Homo sapiens
MTSVRENILFGMGNPLLDISAVVDKDFLDKYSLKPNDQILAEDKHKELFDELVKKFKVEYHAGGSTQNSIKVAQWMIQQPHKAATFFGCIGIDKFGEILKRKAAEAHVDAHYYEQNEQPTGTCAACITGDNRSLIANLAAANCYKKEKHLDLEKNWMLVEKARVCYIAGFFLTVSPESVLKVAHHASENNRIFTLNLSAPFISQFYKESLMKVMPYVDILFGNETEAATFAREQGFETKDIKEIAKKTQALPKMNSKRQRIVIFTQGRDDTIMATESEVTAFAVLDQDQKEIIDTNGAGDAFVGGFLSQLVSDKPLTECIRAGHYAASIIIRRTGCTFPEKPDFH

SEQ ID NO: 9163 - protein, 83 aa, Homo sapiens
MAAATASPRSLLVLLQVVVLALAQIRGPPGERGPPGPPGPPGVPGSDGIDGPPGPVGLPGEIGIRGPKGDPGPDGPSGPPGPP

SEQ ID NO: 9164 - protein, 2477 aa, Homo sapiens
MDPSGVKVLETAEDIQERRQQVLDRYHRFKELSTLRRQKLEDSYRFQFFQRDAEELEKWIQEKLQIASDENYKDPTNLQGKLQKHQAFEAEVQANSGAIVKLDETGNLMISEGHFASETIRTRLMELHRQWELLLEKMREKGIKLLQAQKLVQYLRECEDVMDWINDKEAIVTSEELGQDLEHVEVLQKKFEEFQTDMAAHEERVNEVNQFAAKLIQEQHPEEELIKTKQDEVNAAWQRLKGLALQRQGKLFGAAEVQRFNRDVDETISWIKEKEQLMASDDFGRDLASVQALLRKHEGLERDLAALEDKVKALCAEADRLQQSHPLSATQIQVKREELITNWEQIRTLAAERHARLNDSYRLQRFLADFRDLTSWVTEMKALINADELASDVAGAEALLDRHQEHKGEIDAHEDSFKSADESGQALLAAGHYASDEVREKLTVLSEERAALLELWELRRQQYEQCMDLQLFYRDTEQVDNWMSKQEAFLLNEDLGDSLDSVEALLKKHEDFEKSLSAQEEKITALDEFATKLIQNNHYAMEDVATRRDALLSRRNALHERAMRRRAQLADSFHLQQFFRDSDELKSWVNEKMKTATDEAYKDPSNLQGKVQKHQAFEAELSANQSRIDALEKAGQKLIDVNHYAKDEVAARMNEVISLWKKLLEATELKGIKLREANQQQQFNRNVEDIELWLYEVEGHLASDDYGKDLTNVQNLQKKHALLEADVAAHQDRIDGITIQARQFQDAGHFDAENIKKKQEALVARYEALKEPMVARKQKLADSLRLQQLFRDVEDEETWIREKEPIAASTNRGKDLIGVQNLLKKHQALQAEIAGHEPRIKAVTQKGNAMVEEGHFAAEDVKAKLHELNQKWEALKAKASQRRQDLEDSLQAQQYFADANEAESWMREKEPIVGSTDYGKDEDSAEALLKKHEALMSDLSAYGSSIQALREQAQSCRQQVAPTDDETGKELVLALYDYQEKSPREVTMKKGDILTLLNSTNKDWWKVEVNDRQGFVPAAYVKKLDPAQSASRENLLEEQGSIALRQEQIDNQTRITKEAGSVSLRMKQVEELYHSLLELGEKRKGMLEKSCKKFMLFREANELQQWINEKEAALTSEEVGADLEQVEVLQKKFDDFQKDLKANESRLKDINKVAEDLESEGLMAEEVQAVQQQEVYGMMPRDETDSKTASPWKSARLMVHTVATFNSIKELNERWRSLQQLAEERSQLLGSAHEVQRFHRDADETKEWIEEKNQALNTDNYGHDLASVQALQRKHEGFERDLAALGDKVNSLGETAERLIQSHPESAEDLQEKCTELNQAWSSLGKRADQRKAKLGDSHDLQRFLSDFRDLMSWINGIRGLVSSDELAKDVTGAEALLERHQEHRTEIDARAGTFQAFEQFGQQLLAHGHYASPEIKQKLDILDQERADLEKAWVQRRMMLDQCLELQLFHRDCEQAENWMAAREAFLNTEDKGDSLDSVEALIKKHEDFDKAINVQEEKIAALQAFADQLIAAGHYAKGDISSRRNEVLDRWRRLKAQMIEKRSKLGESQTLQQFSRDVDEIEAWISEKLQTASDESYKDPTNIQLSKLLSKHQKHQAFEAELHANADRIRGVIDMGNSLIERGACAGSEDAVKARLAALADQWQFLVQKSAEKSQKLKEANKQQNFNTGIKDFDFWLSEVEALLASEDYGKDLASVNNLLKKHQLLEADISAHEDRLKDLNSQADSLMTSSAFDTSQVKDKRDTINGRFQKIKSMAASRRAKLNESHRLHQFFRDMDDEESWIKEKKLLVGSEDYGRDLTGVQNLRKKHKRLEAELAAHEPAIQGVLDTGKKLSDDNTIGKEEIQQRLAQFVEHWKELKQLAAARGQRLEESLEYQQFVANVEEEEAWINEKMTLVASEDYGDTLAAIQGLLKKHEAFETDFTVHKDRVNDVCTNGQDLIKKNNHHEENISSKMKGLNGKVSDLEKAAAQRKAKLDENSAFLQFNWKADVVESWIGEKENSLKTDDYGRDLSSVQTLLTKQETFDAGLQAFQQEGIANITALKDQLLAAKHVQSKAIEARHASLMKRWSQLLANSAARKKKLLEAQSHFRKVEDLFLTFAKKASAFNSWFENAEEDLTDPVRCNSLEEIKALREAHDAFRSSLSSAQADFNQLAELDRQIKSFRVASNPYTWFTMEALEETWRNLQKIIKERELELQKEQRRQEENDKLRQEFAQHANAFHQWIQETRTYLLDGSCMVEESGTLESQLEATKRKHQEIRAMRSQLKKIEDLGAAMEEALILDNKYTEHSTVGLAQQWDQLDQLGMRMQHNLEQQIQARNTTGVTEEALKEFSMMFKHFDKDKSGRLNHQEFKSCLRSLGYDLPMVEEGEPDPEFEAILDTVDPNRDGHVSLQEYMAFMISRETENVKSSEEIESAFRALSSEGKPYVTKEELYQNLTREQADYCVSHMKPYVDGKGRELPTAFDYVEFTRSLFVN

SEQ ID NO: 9165 - protein, 689 aa, Homo sapiens
MAAATASPRSLLVLLQVVVLALAQIRGPPGERGPPGPPGPPGVPGSDGIDGDNGPPGKAGPPGPKGEPGKAGPDGPDGKPGIDGLTGAKGEPGPMGIPGVKGQPGLPGPPGLPGPGFAGPPGPPGPVGLPGEIGIRGPKGDPGPDGPSGPPGPPGKPGRPGTIQGLEGSADFLCPTNCPPGMKGPPGLQGVKGHAGKRGILGDPGHQGKPGPKGDVGASGEQGIPGPPGPQGIRGYPGMAGPKGETGPHGYKGMVGAIGATGPPGEEGPRGPPGRAGEKGDEGSPGIRGPQGITGPKGATGPPGINGKDGTPGTPGMKGSAGQAGQPGSPGHQGLAGVPGQPGTKGGPGDQGEPGPQGLPGFSGPPGKEGEPGPRGEIGPQGIMGQKGDQGERGPVGQPGPQGRQGPKGEQGPPGIPGPQGLPGVKGDKGSPGKTGPRGKVGDPGVAGLPGEKGEKGESGEPGPKGQQGVRGEPGYPGPSGDAGAPGVQGYPGPPGPRGLAGNRGVPGQPGRQGVEGRDATDQHIVDVALKMLQEQLAEVAVSAKREALGAVGMMGPPGPPGPPGYPGKQGPHGHPGPRGVPGIVGAVGQIGNTGPKGKRGEKGDPGEVGRGHPGMPGPPGIPGLPGRPGQAINGKDGDRGSPGAPGEAGRPGLPGPVGLPGFCEPAACLGASAYASARLTEPGSIKGP

SEQ ID NO: 9166 - protein, 622 aa, Homo sapiens
MRGLLCWPVLLLLLQPWETQLQLTGPRCHTGPLDLVFVIDSSRSVRPFEFETMRQFLMGLLRGLNVGPNATRVGVIQYSSQVQSVFPLRAFSRREDMERAIRDLVPLAQGTMTGLAIQYAMNVAFSVAEGARPPEERVPRVAVIVTDGRPQDRVAEVAAQARARGIEIYAVGVQRADVGSLRAMASPPLDEHVFLVESFDLIQEFGLQFQSRLCGKDQCAEGGHGCQHQCVNAWAMFHCTCNPGYKLAADNKSCLAIDLCAEGTHGCEHHCVNSPGSYFCHCQVGFVLQQDQRSCRAIDYCSFGNHSCQHECVSTPGGPRCHCREGHDLQPDGRSCQVRDLCNGVDHGCEFQCVSEGLSYRCLCPEGRQLQADGKSCNRCREGHVDLVLLVDGSKSVRPQNFELVKRFVNQIVDFLDVSPEGTRVGLVQFSSRVRTEFPLGRYGTAAEVKQAVLAVEYMERGTMTGLALRHMVEHSFSEAQGARPRALNVPRVGLVFTDGRSQDDISVWAARAKEEGIVMYAVGVGKAVEAELREIASEPAELHVSYAPDFGTMTHLLENLRGSICPEEGISAGTELRSPCECESLVEFQGRTLGALESLTLNLAQLTARLEDLENQLANQK

SEQ ID NO: 9167 - protein, 1066 aa, Homo sapiens
MPVFHTRTIESILEPVAQQISHLVIMHEEGEVDGKAIPDLTAPVAAVQAAVSNLVRVGKETVQTTEDQILKRDMPPAFIKVENACTKLVQAAQMLQSDPYSVPARDYLIDGSRGILSGTSDLLLTFDEAEVRKIIRVCKGILEYLTVAEVVETMEDLVTYTKNLGPGMTKMAKMIDERQQELTHQEHRVMLVNSMNTVKELLPVLISAMKIFVTTKNSKNQGIEEALKNRNFTVEKMSAEINEIIRVLQLTSWDEDAWASKDTEAMKRALASIDSKLNQAKGWLRDPSASPGDAGEQAIRQILDEAGKVGELCAGKERREILGTCKMLGQMTDQVADLRARGQGSSPVAMQKAQQVSQGLDVLTAKVENAARKLEAMTNSKQSIAKKIDAAQNWLADPNGGPEGEEQIRGALAEARKIAELCDDPKERDDILRSLGEISALTSKLADLRRQGKGDSPEARALAKQVATALQNLQTKTNRAVANSRPAKAAVHLEGKIEQAQRWIDNPTVDDRGVGQAAIRGLVAEGHRLANVMMGPYRQDLLAKCDRVDQLTAQLADLAARGEGESPQARALASQLQDSLKDLKARMQEAMTQEVSDVFSDTTTPIKLLAVAATAPPDAPNREEVFDERAANFENHSGKLGATAEKAAAVGTANKSTVEGIQASVKTARELTPQVVSAARILLRNPGNQAAYEHFETMKNQWIDNVEKMTGLVDEAIDTKSLLDASEEAIKKDLDKCKVAMANIQPQMLVAGATSIARRANRILLVAKREVENSEDPKFREAVKAASDELSKTISPMVMDAKAVAGNISDPGLQKSFLDSGYRILGAVAKVREAFQPQEPDFPPPPPDLEQLRLTDELAPPKPPLPEGEVPPPRPPPPEEKDEEFPEQKAGEVINQPMMMAARQLHDEARKWSSKGNDIIAAAKRMALLMAEMSRLVRGGSGTKRALIQCAKDIAKASDEVTRLAKEVAKQCTDKRIRTNLLQVCERIPTISTQLKILSTVKATMLGRTNISDEESEQATEMLVHNAQNLMQSVKETVREAEAASIKIRTDAGFTLRWVRKTPWYQ

SEQ ID NO: 9168 - protein, 581 aa, Homo sapiens
MRGLLCWPVLLLLLQPWETQLQLTGPRCHTGPLDLVFVIDSSRSVRPFEFETMRQFLMGLLRGLNVGPNATRVGVIQYSSQVQSVFPLRAFSRREDMERAIRDLVPLAQGTMTGLAIQYAMNVAFSVAEGARPPEERVPRVAVIVTDGRPQDRVAEVAAQARARGIEIYAVGVQRADVGSLRAMASPPLDEHVFLVESFDLIQEFGLQFQSRLCAIDLCAEGTHGCEHHCVNSPGSYFCHCQVGFVLQQDQRSCRAIDYCSFGNHSCQHECVSTPGGPRCHCREGHDLQPDGRSCQVRDLCNGVDHGCEFQCVSEGLSYRCLCPEGRQLQADGKSCNRCREGHVDLVLLVDGSKSVRPQNFELVKRFVNQIVDFLDVSPEGTRVGLVQFSSRVRTEFPLGRYGTAAEVKQAVLAVEYMERGTMTGLALRHMVEHSFSEAQGARPRALNVPRVGLVFTDGRSQDDISVWAARAKEEGIVMYAVGVGKAVEAELREIASEPAELHVSYAPDFGTMTHLLENLRGSICPEEGISAGTELRSPCECESLVEFQGRTLGALESLTLNLAQLTARLEDLENQLANQK

SEQ ID NO: 9169 - protein, 475 aa, Homo sapiens
MGMWASLDALWEMPAEKRIFGAVLLFSWTVYLWETFLAQRQRRIYKTTTHVPPELGQIMDSETFEKSRLYQLDKSTFSFWSGLYSETEGTLILLFGGIPYLWRLSGRFCGYAGFGPEYEITQSLVFLLLATLFSALTGLPWSLYNTFVIEEKHGFNQQTLGFFMKDAIKKFVVTQCILLPVSSLLLYIIKIGGDYFFIYAWLFTLVVSLVLVTIYADYIAPLFDKFTPLPEGKLKEEIEVMAKSIDFPLTKVYVVEGSKRSSHSNAYFYGFFKNKRIVLFDTLLEEYSVLNKDIQEDSGMEPRNEEEGNSEEIKAKVKNKKQGCKNEEVLAVLGHELGHWKLGHTVKNIIISQMNSFLCFFLFAVLIGRKELFAAFGFYDSQPTLIGLLIIFQFIFSPYNEVLSFCLTVLSRRFEFQADAFAKKLGKAKDLYSALIKLNKDNLGFPVSDWLFSMWHYSHPPLLERLQALKTMKQH

SEQ ID NO: 9170 - protein, 431 aa, Homo sapiens
MRALLARLLLCVLVVSDSKGSNELHQVPSNCDCLNGGTCVSNKYFSNIHWCNCPKKFGGQHCEIDKSKTCYEGNGHFYRGKASTDTMGRPCLPWNSATVLQQTYHAHRSDALQLGLGKHNYCRNPDNRRRPWCYVQVGLKLLVQECMVHDCADGKKPSSPPEELKFQCGQKTLRPRFKIIGGEFTTIENQPWFAAIYRRHRGGSVTYVCGGSLISPCWVISATHCFIDYPKKEDYIVYLGRSRLNSNTQGEMKFEVENLILHKDYSADTLAHHNDIALLKIRSKEGRCAQPSRTIQTICLPSMYNDPQFGTSCEITGFGKENSTDYLYPEQLKMTVVKLISHRECQQPHYYGSEVTTKMLCAADPQWKTDSCQGDSGGPLVCSLQGRMTLTGIVSWGRGCALKDKPGVYTRVSHFLPWIRSHTKEENGLAL

SEQ ID NO: 9171 - protein, 516 aa, Homo sapiens
MATTATCTRFTDDYQLFEELGKGAFSVVRRCVKKTSTQEYAAKIINTKKLSARDHQKLEREARICRLLKHPNIVRLHDSISEEGFHYLVFDLVTGGELFEDIVAREYYSEADASHCIHQILESVNHIHQHDIVHRDLKPENLLLASKCKGAAVKLADFGLAIEVQGEQQAWFGFAGTPGYLSPEVLRKDPYGKPVDIWACGVILYILLVGYPPFWDEDQHKLYQQIKAGAYDFPSPEWDTVTPEAKNLINQMLTINPAKRITADQALKHPWVCQRSTVASMMHRQETVECLRKFNARRKLKGAILTTMLVSRNFSVGRQSSAPASPAASAAGLAGQAAKSLLNKKSDGGVKEPQTTVVHNATDGIKGSTESCNTTTEDEDLKVRKQEIIKITEQLIEAINNGDFEAYTKICDPGLTSFEPEALGNLVEGMDFHKFYFENLLSKNSKPIHTTILNPHVHVIGEDAACIAYIRLTQYIDGQGRPRTSQSEETRVWHRRDGKWLNVHYHCSGAPAAPLQ

SEQ ID NO: 9172 - protein, 582 aa, Homo sapiens
MKSIILFVLSLLLILEKQAAVMGQKGGSKGQLPSGSSQFPHGQKGQHYFGQKDQQHTKSKGSFSIQHTYHVDINDHDWTRKSQQYDLNALHKATKSKQHLGGSQQLLNYKQEGRDHDKSKGHFHMIVIHHKGGQAHHGTQNPSQDQGNSPSGKGLSSQCSNTEKRLWVHGLSKEQASASGAQKGRTQGGSQSSYVLQTEELVVNKQQRETKNSHQNKGHYQNVVDVREEHSSKLQTSLHPAHQDRLQHGPKDIFTTQDELLVYNKNQHQTKNLSQDQEHGRKAHKISYPSSRTEERQLHHGEKSVQKDVSKGSISIQTEEKIHGKSQNQVTIHSQDQEHGHKENKISYQSSSTEERHLNCGEKGIQKGVSKGSISIQTEEQIHGKSQNQVRIPSQAQEYGHKENKISYQSSSTEERRLNSGEKDVQKGVSKGSISIQTEEKIHGKSQNQVTIPSQDQEHGHKENKMSYQSSSTEERRLNYGGKSTQKDVSQSSISFQIEKLVEGKSQIQTPNPNQDQWSGQNAKGKSGQSADSKQDLLSHEQKGRYKQESSESHNIVITEHEVAQDDHLTQQYNEDRNPIST

SEQ ID NO: 9173 - protein, 55 aa, Homo sapiens
MASPGCLWLLAVALLPWTCASRALQHLDPPAPLPLVIWHGMGERQLLQSLKHGCY

SEQ ID NO: 9174 - protein, 462 aa, Homo sapiens
MKPNIIFVLSLLLILEKQAAVMGQKGGSKGRLPSEFSQFPHGQKGQHYSGQKGKQQTESKGSFSIQYTYHVDANDHDQSRKSQQYDLNALHKTTKSQRHLGGSQQLLHNKQEGRDHDKSKGHFHRVVIHHKGGKAHRGTQNPSQDQGNSPSGKGISSQYSNTEERLWVHGLSKEQTSVSGAQKGRKQGGSQSSYVLQTEELVANKQQRETKNSHQNKGHYQNVVEVREEHSSKVQTSLCPAHQDKLQHGSKDIFSTQDELLVYNKNQHQTKNLNQDQQHGRKANKISYQSSSTEERRLHYGENGVQKDVSQSSIYSQTEEKAQGKSQKQITIPSQEQEHSQKANKISYQSSSTEERRLHYGENGVQKDVSQRSIYSQTEKLVAGKSQIQAPNPKQEPWHGENAKGESGQSTNREQDLLSHEQKGRHQHGSHGGLDIVIIEQEDDSDRHLAQHLNNDRNPLFT

SEQ ID NO: 9175 - protein, 111 aa, Homo sapiens
MGSSSFLVLMVSLVLVTLVAVEGVKEGIEKAGVCPADNVRCFKSDPPQCHTDQDCLGERKCCYLHCGFKCVIPVKELEEGGNKDEDVSRPYPEPGWEAKCPGSSSTRCPQK

SEQ ID NO: 9176 - protein, 123 aa, Homo sapiens
MRTQSLLLLGALLAVGSQLPAVFGRKKGEKSGGCPPDDGPCLLSVPDQCVEDSQCPLTRKCCYRACFRQCVPRVSVKLGSCPEDQLRCLSPMNHLCHKDSDCSGKKRCCHSACGRDCRDPARG

SEQ ID NO: 9177 - protein, 475 aa, Homo sapiens
MADMQNLVERLERAVGRLEAVSHTSDMHRGYADSPSKAGAAPYVQAFDSLLAGPVAEYLKISKEIGGDVQKHAEMVHTGLKLERALLVTASQCQQPAENKLSDLLAPISEQIKEVITFREKNRGSKLFNHLSAVSESIQALGWVAMAPKPGPYVKEMNDAAMFYTNRVLKEYKDVDKKHVDWVKAYLSIWTELQAYIKEFHTTGLAWSKTGPVAKELSGLPSGPSAGSCPPPPPPCPPPPPVSTISCSYESASRSSLFAQINQGESITHALKHVSDDMKTHKNPALKAQSGPVRSGPKPFSAPKPQTSPSPKRATKKEPAVLELEGKKWRVENQENVSNLVIEDTELKQVAYIYKCVNTTLQIKGKINSITVDNCKKLGLVFDDVVGIVEIINSKDVKVQVMGKVPTISINKTDGCHAYLSKNSLDCEIVSAKSSEMNVLIPTEGGDFNEFPVPEQFKTLWNGQKLVTTVTEIAG

SEQ ID NO: 9178 - protein, 487 aa, Homo sapiens
METVQLRNPPRRQLKKLDEDSLTKQPEEVFDVLEKLGEGSYGSVYKAIHKETGQIVAIKQVPVESDLQEIIKEISIMQQCDSPHVVKYYGSYFKNTDLWIVMEYCGAGSVSDIIRLRNKTLTEDEIATILQSTLKGLEYLHFMRKIHRDIKAGNILLNTEGHAKLADFGVAGQLTDTMAKRNTVIGTPFWMAPEVIQEIGYNCVADIWSLGITAIEMAEGKPPYADIHPMRAIFMIPTNPPPTFRKPELWSDNFTDFVKQCLVKSPEQRATATQLLQHPFVRSAKGVSILRDLINEAMDVKLKRQESQQREVDQDDEENSEEDEMDSGTMVRAVGDEMGTVRVASTMTDGANTMIEHDDTLPSQLGTMVINAEDEEEEGTMKRRDETMQPAKPSFLEYFEQKEKENQINSFGKSVPGPLKNSSDWKIPQDGDYEFLKSWTVEDLQKRLLALDPMMEQEIEEIRQKYQSKRQPILDAIEAKKRRQQNF

SEQ ID NO: 9179 - protein, 530 aa, Homo sapiens
MAKGEGAESGSAAGLLPTSILQSTERPAQVKKEPKKKKQQLSVCNKLCYALGGAPYQVTGCALGFFLQIYLLDVAQVGPFSASIILFVGRAWDAITDPLVGLCISKSPWTCLGRLMPWIIFSTPLAVIAYFLIWFVPDFPHGQTYWYLLFYCLFETMVTCFHVPYSALTMFISTEQTERDSATAYRMTVEVLGTVLGTAIQGQIVGQADTPCFQDLNSSTVASQSANHTHGTTSHRETQKAYLLAAGVIVCIYIICAVILILGVREQREPYEAQQSEPIAYFRGLRLVMSHGPYIKLITGFLFTSLAFMLVEGNFVLFCTYTLGFRNEFQNLLLAIMLSATLTIPIWQWFLTRFGKKTAVYVGISSAVPFLILVALMESNLIITYAVAVAAGISVAAAFLLPWSMLPDVIDDFHLKQPHFHGTEPIFFSFYVFFTKFASGVSLGISTLSLDFAGYQTRGCSQPERVKFTLNMLVTMAPIVLILLGLLLFKMYPIDEERRRQNKKALQALRDEASSSGCSETDSTELASIL

SEQ ID NO: 9180 - protein, 309 aa, Homo sapiens
MAPKFPDSVEELRAAGNESFRNGQYAEASALYGRALRVLQAQGSSDPEEESVLYSNRAACHLKDGNCRDCIKDCTSALALVPFSIKPLLRRASAYEALEKYPMAYVDYKTVLQIDDNVTSAVEGINRMTRALMDSLGPEWRLKLPSIPLVPVSAQKRWNSLPSENHKEMAKSKSKETTATKNRVPSAGDVEKARVLKEEGNELVKKGNHKKAIEKYSESLLCSNLESATYSNRALCYLVLKQYTEAVKDCTEALKLDGKNVKAFYRRAQAHKALKDYKSSFADISNLLQIEPRNGPAQKLRQEVKQNLH

SEQ ID NO: 9181 - protein, 402 aa, Homo sapiens
MTALPGPLWLLGLALCALGGGGPGLRPPPGCPQRRLGARERRDVQREILAVLGLPGRPRPRAPPAASRLPASAPLFMLDLYHAMAGDDDEDGAPAERRLGRADLVMSFVNMVERDRALGHQEPHWKEFRFDLTQIPAGEAVTAAEFRIYKVPSIHLLNRTLHVSMFQVVQEQSNRESDLFFLDLQTLRAGDEGWLVLDVTAASDCWLLKRHKDLGLRLYVETEDGHSVDPGLAGLLGQRAPRSQQPFVVTFFRASPSPIRTPRAVRPLRRRQPKKSNELPQANRLPGIFDDVHGSHGRQVCRRHELYVSFQDLGWLDWVIAPQGYSAYYCEGECSFPLDSCMNATNHAILQSLVHLMMPDAVPKACCAPTKLSATSVLYYDSSNNVILRKHRNMVVKACGCH

SEQ ID NO: 9182 - protein, 453 aa, Homo sapiens
MGRTREAGCVAAGVVIGAGACYCVYRLAWGRDENEKIWDEDEESTDTSEIGVETVKGAKTNAGAGSGAKLQGDSEVKPEVSLGLEDCPGVKEKAHSGSHSGGGLEAKAKALFNTLKEQASAKAGKGARVGTISGNRTLAPSLPCPGGRGGGCHPTRSGSRAGGRASGKSKGKARSKSTRAPATTWPVRRGKFNFPYKIDDILSAPDLQKVLNILERTNDPFIQEVALVTLGNNAAYSFNQNAIRELGGVPIIAKLIKTKDPIIREKTYNALNNLSVNAENQGKIKTYISQVCDDTMVCRLDSAVQMAGLRLLTNMTVTNHYQHLLSYSFPDFFALLFLGNHFTKIQIMKLIINFTENPAMTRELVSCKVPSELISLFNKEWDREILLNILTLFENINDNIKNEGLASSRKEFSRSSLFFLFKESGVCVKKIKALANHNDLVVKVKVLKVLTKL

SEQ ID NO: 9183 - protein, 314 aa, Homo sapiens
MATTKRVLYVGGLAEEVDDKVLHAAFIPFGDITDIQIPLDYETEKHRGFAFVEFELAEDAAAAIDNMNESELFGRTIRVNLAKPMRIKEGSSRPVWSDDDWLKKFSGKTLEENKEEEGSEPPKAETQEGEPIAKKARSNPQVYMDIKIGNKPAGRIQMLLRSDVVPMTAENFRCLCTHEKGFGFKGSSFHRIIPQFMCQGGDFTNHNGTGGKSIYGKKFDDENFILKHTGPGLLSMANSGPNTNGSQFFLTCDKTDWLDGKHVVFGEVTEGLDVLRQIEVAPDTKASKARGSRKNKDGQERNWGKSQKVESHTI

SEQ ID NO: 9184 - protein, 118 aa, Homo sapiens
MATPSLRGRLARFGNPRKPVLKPNKPLILANRVGERRREKGEATCITEMSVMMACWKQNEFRDDACRKEIQGFLDCAARAQEARKMRSIQETLGESGSLLPNKLNKLLQRFPNKPYLS

SEQ ID NO: 9185 - protein, 278 aa, Homo sapiens [sequence omitted]

SEQ ID NO: 9186 - protein, 449 aa, Homo sapiens
MMLSTEGREGFVVKVRGLPWSCSADEVMRFFSDCKIQNGTSGIRFIYTREGRPSGEAFVELESEEEVKLALKKDRETMGHRYVEVFKSNSVEMDWVLKHTGPNSPDTANDGFVRLRGLPFGCSKEEIVQFFSGLEIVPNGMTLPVDFQGRSTGEAFVQFASQEIAEKALKKHKERIGHRYIEIFKSSRAEVRTHYDPPRKLMAMQRPGPYDRPGAGRGYNSIGRGAGFERMRRGAYGGGYGGYDDYGGYNDGYGFGSDRFGRDLNYCFSGMSDHRYGDGGSSFQSTTGHCVHMRGLPYRATENDIYNFFSPLNPMRVHIEIGPDGRVTGEADVEFATHEDAVAAMAKDKANMQHRYVELFLNSTAGTSGGAYDHSYVELFLNSTAGASGGAYGSQMMGGMGLSNQSSYGGPASQQLSGGYGGGYGGQSSMSGYDQVLQENSSDYQSNLA

SEQ ID NO: 9187 - protein, 595 aa, Homo sapiens
MRAARAAPLLQLLLLLGPWLEAAGVAESPLPAVVLAILARNAEHSLPHYLGALERLDYPRARMALWCATDHNVDNTTEMLQEWLAAVGDDYAAVVWRPEGEPRFYPDEEGPKHWTKERHQFLMELKQEALTFARNWGADYILFADTDNILTNNQTLRLLMGQGLPVVAPMLDSQTYYSNFWCGITPQGYYRRTAEYFPTKNRQRRGCFRVPMVHSTFLASLRAEGADQLAFYPPHPNYTWPFDDIIVFAYACQAAGVSVHVCNEHRYGYMNVPVKSHQGLEDERVNFIHLILEALVDGPRMQASAHVTRPSKRPSKIGFDEVFVISLARRPDRRERMLASLWEMEISGRVVDAVDGWMLNSSAIRNLGVDLLPGYQDPYSGRTLTKGEVGCFLSHYSIWEEVVARGLARVLVFEDDVRFESNFRGRLERLMEDVEAEKLSWDLIYLGRKQVNPEKETAVEGLPGLVVAGYSYWTLAYALRLAGARKLLASQPLRRMLPVDEFLPIMFDQHPNEQYKAHFWPRDLVAFSAQPLLAAPTHYAGDAEWLSDTETSSPWDDDSGRLISWSGSQKTLRSPRLDLTGSSGHSLQPQPRDEL

SEQ ID NO: 9188 - protein, 492 aa, Homo sapiens
MAAGPIRVVLVLLGVLSVCAASGHGSVAEREAGGEAEWAEPWDGAVFRPPSALGAVGVTRSSGTPRPGREEAGDLPVLLWWSPGLFPHFPGDSERIECARGACVASRNRRALRDSRTRALLFYGTDFRASAAPLPRLAHQSWALLHEESPLNNFLLSHGPGIRLFNLTSTFSRHSDYPLSLQWLPGTAYLRRPVPPPMERAEWRRRGYAPLLYLQSHCDVPADRDRYVRELMRHIPVDSYGKCLQNRELPTARLQDTATATTEDPELLAFLSRYKFHLALENAICNDYMTEKLWRPMHLGAVPVYRGSPSVRDWMPNNHSVILIDDFESPQKLAEFIDFLDKNDEEYMKYLAYKQPGGITNQFLLDSLKHREWGVNDPLLPNYLNGFECFVCDYELARLDAEKAHAASPGDSPVFEPHIAQPSHMDCPVPTPGFGNVEEIPENDSWKEMWLQDYWQGLDQGEALTAMIHNNETEQTKFWDYLHEIFMKRQHL

SEQ ID NO: 9189 - protein, 101 aa, Homo sapiens
MAAPLSVEVEFGGGAELLFDGIKKHRVTLPGQEEPWDIRNLLIWIKKNLLKERPELFIQGDSVRPGILVLINDADWELLGELDYQLQDQDSVLFISTLHGG

SEQ ID NO: 9190 - protein, 644 aa, Homo sapiens
MNAAASSYPMASLYVGDLHSDVTEAMLYEKFSPAGPVLSIRVCRDMITRRSLGYAYVNFQQPADAERALDTMNFDVIKGKPIRIMWSQRDPSLRKSGVGNVFIKNLDKSIDNKALYDTFSAFGNILSCKVVCDENGSKGYAFVHFETQEAADKAIEKMNGMLLNDRKVFVGRFKSRKEREAELGAKAKEFTNVYIKNFGEEVDDESLKELFSQFGKTLSVKVMRDPNGKSKGFGFVSYEKHEDANKAVEEMNGKEISGKIIFVGRAQKKVERQAELKRKFEQLKQERISRYQGVNLYIKNLDDTIDDEKLRKEFSPFGSITSAKVMLEDGRSKGFGFVCFSSPEEATKAVTEMNGRIVGSKPLYVALAQRKEERKAHLTNQYMQRVAGMRALPANAILNQFQPAAGGYFVPAVPQAQGRPPYYTPNQLAQMRPNPRWQQGGRPQGFQGMPSAIRQSGPRPTLRHLAPTGSECPDRLAMDFGGAGAAQQGLTDSCQSGGVPTAVQNLAPRAAVAAAAPRAVAPYKYASSVRSPHPAIQPLQAPQPAVHVQGQEPLTASMLAAAPPQEQKQMLGERLFPLIQTMHSNLAGKITGMLLEIDNSELLHMLESPESLRSKVDEAVAVLQAHHAKKEAAQKVGAVAAATS

SEQ ID NO: 9191 - protein, 660 aa, Homo sapiens
MNAAASSYPMASLYVGDLHSDVTEAMLYEKFSPAGPVLSIRVCRDMITRRSLGYAYVNFQQPADAERALDTMNFDVIKGKPIRIMWSQRDPSLRKSGVGNVFIKNLDKSIDNKALYDTFSAFGNILSCKVVCDENGSKGYAFVHFETQEAADKAIEKMNGMLLNDRKVFVGRFKSRKEREAELGAKAKEFTNVYIKNFGEEVDDESLKELFSQFGKTLSVKVMRDPNGKSKGFGFVSYEKHEDANKAVEEMNGKEISGKIIFVGRAQKKVERQAELKRKFEQLKQERISRYQGVNLYIKNLDDTIDDEKLRKEFSPFGSITSAKVMLEDGRSKGFGFVCFSSPEEATKAVTEMNGRIVGSKPLYVALAQRKEERKAHLTNQYMQRVAGMRALPANAILNQFQPAAGGYFVPAVPQAQGRPPYYTPNQLAQMRPNPRWQQGGRPQGFQGMPSAIRQSGPRPTLRHLAPTGNAPASRGLPTTTQRVGSECPDRLAMDFGGAGAAQQGLTDSCQSGGVPTAVQNLAPRAAVAAAAPRAVAPYKYASSVRSPHPAIQPLQAPQPAVHVQGQEPLTASMLAAAPPQEQKQMLGERLFPLIQTMHSNLAGKITGMLLEIDNSELLHMLESPESLRSKVDEAVAVLQAHHAKKEAAQKVGAVAAATS

SEQ ID NO: 9192 - protein, 615 aa, Homo sapiens
MNAAASSYPMASLYVGDLHSDVTEAMLYEKFSPAGPVLSIRVCRDMITRRSLGYAYVNFQQPADAERALDTMNFDVIKGKPIRIMWSQRDPSLRKSGVGNVFIKNLDKSIDNKALYDTFSAFGNILSCKVVCDENGSKGYAFVHFETQEAADKAIEKMNGMLLNDRKVFVGRFKSRKEREAELGAKAKEFTNVYIKNFGEEVDDESLKELFSQFGKTLSVKVMRDPNGKSKGFGFVSYEKHEDANKAVEEMNGKEISGKIIFVGRAQKKVERQAELKRKFEQLKQERISRYQGVNLYIKNLDDTIDDEKLRKEFSPFGSITSAKVMLEDGRSKGFGFVCFSSPEEATKAVTEMNGRIVGSKPLYVALAQRKEERKAHLTNQYMQRVAGMRALPANAILNQFQPAAGGYFVPAVPQAQGRPPYYTPNQLAQMRPNPRWQQGGRPQGFQGMPSAIRQSGPRPTLRHLAPTGVPTAVQNLAPRAAVAAAAPRAVAPYKYASSVRSPHPAIQPLQAPQPAVHVQGQEPLTASMLAAAPPQEQKQMLGERLFPLIQTMHSNLAGKITGMLLEIDNSELLHMLESPESLRSKVDEAVAVLQAHHAKKEAAQKVGAVAAATS

SEQ ID NO: 9193 - protein, 218 aa, Homo sapiens
MRGTPKTHLLAFSLLCLLSKVRTQLCPTPCTCPWPPPRCPLGVPLVLDGCGCCRVCARRLGEPCDQLHVCDASQGLVCQPGAGPGGRGALCLCKQDPSFLALSLPCPLVSPAQNGARPGDPARPPVGWAWPPGCPTRTASADWRPSAACACPGPAHPPGVAVHKTVPSRAGLGMGTRCPPSPAGGPVPGPWADGRWSVPRPLAAGNTLAWVHHAEHQY

SEQ ID NO: 9194 - protein, 363 aa, Homo sapiens
MAQTPAFDKPKVELHVHLDGSIKPETILYYGRRRGIALPANTAEGLLNVIGMDKPLTLPDFLAKFDYYMPAIAGCREAIKRIAYEFVEMKAKEGVVYVEVRYSPHLLANSKVEPIPWNQAEGDLTPDEVVALVGQGLQEGERDFGVKARSILCCMRHQPNWSPKVVELCKKYQQQTVVAIDLAGDETIPGSSLLPGHVQAYQEAVKSGIHRTVHAGEVGSAEVVKEAVDILKTERLGHGYHTLEDQALYNRLRQENMHFEICPWSSYLTGAWKPDTEHAVIRLKNDQANYSLNTDDPLIFKSTLDTDYQMTKRDMGFTEEEFKRLNINAAKSSFLPEDEKRELLDLLYKAYGMPPSASAGQNL

SEQ ID NO: 9195 - protein, 346 aa, Homo sapiens
MESVSCSAAAVRTGDMESQRDLSLVPERLQRREQERQLEVERRKQKRQNQEVEKENSHFFVATFVRERAAVEELLERAESVERLEEAASRLQGLQKLINDSVFFLAAYDLRQGQEALARLQAALAERRRGLQPKKRFAFKTRGKDAASSTKVDAAPGIPPAVESIQDSPLPKKAEGDLGPSWVCGFSNLESQVLEKRASELHQRDVLLTELSNCTVRLYGNPNTLRLTKAHSCKLLCGPVSTSVFLEDCSDCVLAVACQQLRIHSTKDTRIFLQVTSRAIVEDCSGIQFAPYTWSYPEIDKDFESSGLDRSKNNWNDVDDFNWLARDMASPNWSILPEEERNIQWD

SEQ ID NO: 9196 - protein, 331 aa, Homo sapiens
MGSAGLSRLHGLFAVYKPPGLKWKHLRDTVELQLLKGLNARKPPAPKQRVRFLLGPMEGSEEKELTLTATSVPSFINHPLVCGPAFAHLKVGVGHRLDAQASGVLVLGVGHGCRLLTDMYNAHLTKDYTVRGLLGKATDDFREDGRLVEKTTYDHVTREKLDRILAVIQGSHQKALVMYSNLDLKTQEAYEMAVRGLIRPMNKSPMLITGIRCLYFAPPEFLLEVQCMHETQKELRKLVHEIGLELKTTAVCTQVRRTRDGFFTLDSALLRTQWDLTNIQDAIRAATPQVAAELEKSLSPGLDTKQLPSPGWSWDSQGPSSTLGLERGAGQ

SEQ ID NO: 9197 - protein, 1755 aa, Homo sapiens
MASELEPEVQAIDRSLLECSAEEIAGKWLQATDLTREVYQHLAHYVPKIYCRGPNPFPQKEDMLAQHVLLGPMEWYLCGEDPAFGFPKLEQANKPSHLCGRVFKVGEPTYSCRDCAVDPTCVLCMECFLGSIHRDHRYRMTTSGGGGFCDCGDTEAWKEGPYCQKHELNTSEIEEEEDPLVHLSEDVIARTYNIFAITFRYAVEILTWEKESELPADLEMVEKSDTYYCMLFNDEVHTYEQVIYTLQKAVNCTQKEAIGFATTVDRDGRRSVRYGDFQYCEQAKSVIVRNTSRQTKPLKVQVMHSSIVAHQNFGLKLLSWLGSIIGYSDGLRRILCQVGLQEGPDGENSSLVDRLMLSDSKLWKGARSVYHQLFMSSLLMDLKYKKLFAVRFAKNYQQLQRDFMEDDHERAVSVTALSVQFFTAPTLARMLITEENLMSIIIKTFMDHLRHRDAQGRFQFERYTALQAFKFRRVQSLILDLKYVLISKPTEWSDELRQKFLEGFDAFLELLKCMQGMDPITRQVGQHIEMEPEWEAAFTLQMKLTHVISMMQDWCASDEKVLIEAYKKCLAVLMQCHGGYTDGEQPITLSICGHSVETIRYCVSQEKVSIHLPVSRLLAGLHVLLSKSEVAYKFPELLPLSELSPPMLIEHPLRCLVLCAQVHAGMWRRNGFSLVNQIYYYHNVKCRREMFDKDVVMLQTGVSMMDPNHFLMIMLSRFELYQIFSTPDYGKRFSSEITHKDVVQQNNTLIEEMLYLIIMLVGERFSPGVGQVNATDEIKREIIHQLSIKPMAHSELVKSLPEDENKETGMESVIEAVAHFKKPGLTGRGMYELKPECAKEFNLYFYHFSRAEQSKAEEAQRKLKRQNREDTALPPPVLPPFCPLFASLVNILQSDVMLCIMGTILQWAVEHNGYAWSESMLQRVLHLIGMALQEEKQHLENVTEEHVVTFTFTQKISKPGEAPKNSPSILAMLETLQNAPYLEVHKDMIRWILKTFNAVKKMRESSPTSPVAETEGTIMEESSRDKDKAERKRKAEIARLRREKIMAQMSEMQRHFIDENKELFQQTLELDASTSAVLDHSPVASDMTLTALGPAQTQVPEQRQFVTCILCQEEQEVKVESRAMVLAAFVQRSTVLSKNRSKFIQDPEKYDPLFMHPDLSCGTHTSSCGHIMHAHCWQRYFDSVQAKEQRRQQRLRLHTSYDVENGEFLCPLCECLSNTVIPLLLPPRNIFNNRLNFSDQPNLTQWIRTISQQIKALQFLRKEESTPNNASTKNSENVDELQLPEGFRPDFRPKIPYSESIKEMLTTFGTATYKVGLKVHPNEEDPRVPIMCWGSCAYTIQSIERILSDEDKPLFGPLPCRLDDCLRSLTRFAAAHWTVASVSVVQGHFCKLFASLVPNDSHEELPCILDIDMFHLLVGLVLAFPALQCQDFSGISLGTGDLHIFHLVTMAHIIQILLTSCTEENGMDQENPPCEEESAVLALYKTLHQYTGSALKEIPSGWHLWRSVRAGIMPFLKCSALFFHYLNGVPSPPDIQVPGTSHFEHLCSYLSLPNNLICLFQENSEIMNSLIESWCRNSEVKRYLEGERDAIRYPRESNKLINLPEDYSSLINQASNFSCPKSGGDKSRAPTLCLVCGSLLCSQSYCCQTELEGEDVGACTAHTYSCGSGVGIFLRVRECQVLFLAGKTKGCFYSPPYLDDYGETDQGLRRGNPLHLCKERFKKIQKLWHQHSVTEEIGHAQEANQTLVGIDWQHL

SEQ ID NO: 9198 - protein, 1755 aa, Homo sapiens
MASELEPEVQAIDRSLLECSAEEIAGKWLQATDLTREVYQHLAHYVPKIYCRGPNPFPQKEDMLAQHVLLGPMEWYLCGEDPAFGFPKLEQANKPSHLCGRVFKVGEPTYSCRDCAVDPTCVLCMECFLGSIHRDHRYRMTTSGGGGFCDCGDTEAWKEGPYCQKHELNTSEIEEEEDPLVHLSEDVIARTYNIFAITFRYAVEILTWEKESELPADLEMVEKSDTYYCMLFNDEVHTYEQVIYTLQKAVNCTQKEAIGFATTVDRDGRRSVRYGDFQYCEQAKSVIVRNTSRQTKPLKVQVMHSSIVAHQNFGLKLLSWLGSIIGYSDGLRRILCQVGLQEGPDGENSSLVDRLMLSDSKLWKGARSVYHQLFMSSLLMDLKYKKLFAVRFAKNYERLQSDYVTDDHDREFSVADLSVQIFTVPSLARMLITEENLMSIIIKTFMDHLRHRDAQGRFQFERYTALQAFKFRRVQSLILDLKYVLISKPTEWSDELRQKFLEGFDAFLELLKCMQGMDPITRQVGQHIEMEPEWEAAFTLQMKLTHVISMMQDWCASDEKVLIEAYKKCLAVLMQCHGGYTDGEQPITLSICGHSVETIRYCVSQEKVSIHLPVSRLLAGLHVLLSKSEVAYKFPELLPLSELSPPMLIEHPLRCLVLCAQVHAGMWRRNGFSLVNQIYYYHNVKCRREMFDKDVVMLQTGVSMMDPNHFLMIMLSRFELYQIFSTPDYGKRFSSEITHKDVVQQNNTLIEEMLYLIIMLVGERFSPGVGQVNATDEIKREIIHQLSIKPMAHSELVKSLPEDENKETGMESVIEAVAHFKKPGLTGRGMYELKPECAKEFNLYFYHFSRAEQSKAEEAQRKLKRQNREDTALPPPVLPPFCPLFASLVNILQSDVMLCIMGTILQWAVEHNGYAWSESMLQRVLHLIGMALQEEKQHLENVTEEHVVTFTFTQKISKPGEAPKNSPSILAMLETLQNAPYLEVHKDMIRWILKTFNAVKKMRESSPTSPVAETEGTIMEESSRDKDKAERKRKAEIARLRREKIMAQMSEMQRHFIDENKELFQQTLELDASTSAVLDHSPVASDMTLTALGPAQTQVPEQRQFVTCILCQEEQEVKVESRAMVLAAFVQRSTVLSKNRSKFIQDPEKYDPLFMHPDLSCGTHTSSCGHIMHAHCWQRYFDSVQAKEQRRQQRLRLHTSYDVENGEFLCPLCECLSNTVIPLLLPPRNIFNNRLNFSDQPNLTQWIRTISQQIKALQFLRKEESTPNNASTKNSENVDELQLPEGFRPDFRPKIPYSESIKEMLTTFGTATYKVGLKVHPNEEDPRVPIMCWGSCAYTIQSIERILSDEDKPLFGPLPCRLDDCLRSLTRFAAAHWTVASVSVVQGHFCKLFASLVPNDSHEELPCILDIDMFHLLVGLVLAFPALQCQDFSGISLGTGDLHIFHLVTMAHIIQILLTSCTEENGMDQENPPCEEESAVLALYKTLHQYTGSALKEIPSGWHLWRSVRAGIMPFLKCSALFFHYLNGVPSPPDIQVPGTSHFEHLCSYLSLPNNLICLFQENSEIMNSLIESWCRNSEVKRYLEGERDAIRYPRESNKLINLPEDYSSLINQASNFSCPKSGGDKSRAPTLCLVCGSLLCSQSYCCQTELEGEDVGACTAHTYSCGSGVGIFLRVRECQVLFLAGKTKGCFYSPPYLDDYGETDQGLRRGNPLHLCKERFKKIQKLWHQHSVTEEIGHAQEANQTLVGIDWQHL

SEQ ID NO: 9199 - protein, 466 aa, Homo sapiens
MSYPGYPPTGYPPFPGYPPAGQESSFPPSGQYPYPSGFPPMGGGAYPQVPSSGYPGAGGYPAPGGYPAPGGYPGAPQPGGAPSYPGVPPGQGFGVPPGGAGFSGYPQPPSQSYGGGPAQVPLPGGFPGGQMPSQYPGGQPTYPSQPATVTQVTQGTIRPAANFDAIRDAEILRKAMKGFGTDEQAIVDVVANRSNDQRQKIKAAFKTSYGKDLIKDLKSELSGNMEELILALFMPPTYYDAWSLRKAMQGAGTQERVLIEILCTRTNQEIREIVRCYQSEFGRDLEKDIRSDTSGHFERLLVSMCQGNRDENQSINHQMAQEDAQRLYQAGEGRLGTDESCFNMILATRSFPQLRATMEAYSRMANRDLLSSVSREFSGYVESGLKTILQCALNRPAFFAERLYYAMKGAGTDDSTLVRIVVTRSEIDLVQIKQMFAQMYQKTLGTMIAGDTSGDYRRLLLAIVGQ

SEQ ID NO: 9200 - protein, 504 aa, Homo sapiens
MAGLKRRVPLHSLRYFISMVGLFSKPGLLPWYARNPPGWSQLFLGTVCKGDFTRVIATKCQKGQKSQKKPSHLGPLDGSWQERLADVVTPLWRLSYEEQLKVKFAAQKKILQRLESYIQMLNGVSVTTAVPKSERLSCLLHPIIPSPVINGYRNKSTFSVNRGPDGNPKTVGFYLGTWRDGNVVCVQSNHLKNIPEKHSQVAQYYEVFLRQSPLEPCLVFHEGGYWRELTVRTNSQGHTMAIITFHPQKLSQEELHVQKEIVKEFFIRGPGAACGLTSLYFQESTMTRCSHQQSPYQLLFGEPYIFEELLSLKIRISPDAFFQINTAGAEMLYRTVGELTGVNSDTILLDICCGTGVIGLSLAQHTSRVLGIELLEQAVEDARWTAAFNGITNSEFHTGQAEKILPGLLKSKEDGQSIVAVVNPARAGLHYKVIQAIRNFRAIHTLVFVSCKLHGESTRNVIELCCPPDPAKKLLGEPFVLQQAVPVDLFPHTPHCELVLLFTR

SEQ ID NO: 9201 - protein, 898 aa, Homo sapiens
MFSQQQQQQLQQQQQQLQQLQQQQLQQQQLQQQQLLQLQQLLQQSPPQAPLPMAVSRGLPPQQPQQPLLNLQGTNSASLLNGSMLQRALLLQQLQGLDQFAMPPATYDTAGLTMPTATLGNLRGYGMASPGLAAPSLTPPQLATPNLQQFFPQATRQSLLGPPPVGVPMNPSQFNLSGRNPQKQARTSSSTTPNRKDSSSQTMPVEDKSDPPEGSEEAAEPRMDTPEDQDLPPCPEDIAKEKRTPAPEPEPCEASELPAKRLRSSEEPTEKEPPGQLQVKAQPQARMTVPKQTQTPDLLPEALEAQVLPRFQPRVLQVQAQVQSQTQPRIPSTDTQVQPKLQKQAQTQTSPEHLVLQQKQVQPQLQQEAEPQKQVQPQVQPQAHSQGPRQVQLQQEAEPLKQVQPQVQPQAHSQPPRQVQLQLQKQVQTQTYPQVHTQAQPSVQPQEHPPAQVSVQPPEQTHEQPHTQPQVSLLAPEQTPVVVHVCGLEMPPDAVEAGGGMEKTLPEPVGTQVSMEEIQNESACGLDVGECENRAREMPGVWGAGGSLKVTILQSSDSRAFSTVPLTPVPRPSDSVSSTPAATSTPSKQALQFFCYICKASCSSQQEFQDHMSEPQHQQRLGEIQHMSQACLLSLLPVPRDVLETEDEEPPPRRWCNTCQLYYMGDLIQHRRTQDHKIAKQSLRPFCTVCNRYFKTPRKFVEHVKSQGHKDKAKELKSLEKEIAGQDEDHFITVDAVGCFEGDEEEEEDDEDEEEIEVEEELCKQVRSRDISREEWKGSETYSPNTAYGVDFLVPVMGYICRICHKFYHSNSGAQLSHCKSLGHFENLQKYKAAKNPSPTTRPVSRRCAINARNALTALFTSSGRPPSQPNTQDKTPSKVTARPSQPPLPRRSTRLKT

SEQ ID NO: 9202 - protein, 137 aa, Homo sapiens
MVHLTTLLCKAYRGGHLTIRLALGGCTNRPFYRIVAAHNKCPRDGRFVEQLGSYDPLPNSHGEKLVALNLDRIRHWIGCGAHLSKPMEKLLGLAGFFPLHPMMITNAERLRRKRAREVLLASQKTDAEATDTEATET

SEQ ID NO: 9203 - protein, 260 aa, Homo sapiens
MGLLDLCEEVFGTADLYRVLGVRREASDGEVRRGYHKVSLQVHPDRVGEGDKEDATRRFQILGKVYSVLSDREQRAVYDEQGTVDEDSPVLTQDRDWEAYWRLLFKKISLEDIQAFEKTYKGSEEELADIKQAYLDFKGDMDQIMESVLCVQYTEEPRIRNIIQQAIDAGEVPSYNAFVKESKQKMNARKRRAQEEAKEAEMSRKELGLDEGVDSLKAAIQSRQKDRQKEMDNFLAQMEAKYCKSSKGGGKKSALKKEKK

SEQ ID NO: 9204 - protein, 106 aa, Homo sapiens
MPFLDIQKRFGLNIDRWLTIQSGEQPYKMAGRCHAFEKEWIECAHGIGYTRAEKECKIEYDDFVECLLRQKTMRRAGTIRKQRDKLIKEGKYTPPPHHIGKGEPRP

SEQ ID NO: 9205 - protein, 577 aa, Homo sapiens
MAGLTVRDPAVDRSLRSVFVGNIPYEATEEQLKDIFSEVGPVVSFRLVYDRETGKPKGYGFCEYQDQETALSAMRNLNGREFSGRALRVDNAASEKNKEELKSLGTGAPVIESPYGETISPEDAPESISKAVASLPPEQMFELMKQMKLCVQNSPQEARNMLLQNPQLAYALLQAQVVMRIVDPEIALKILHRQTNIPTLIAGNPQPVHGAGPGSGSNVSMNQQNPQAPQAQSLGGMHVNGAPPLMQASMQGGVPAPGQMPAAVTGPGPGSLAPGGGMQAQVGMPGSGPVSMERGQVPMQDPRAAMQRGSLPANVPTPRGLLGDAPNDPRGGTLLSVTGEVEPRGYLGPPHQGPPMHHVPGHESRGPPPHELRGGPLPEPRPLMAEPRGPMLDQRGPPLDGRGGRDPRGIDARGMEARAMEARGLDARGLEARAMEARAMEARAMEARAMEARAMEVRGMEARGMDTRGPVPGPRGPIPSGMQGPSPINMGAVVPQGSRQVPVMQGTGMQGASIQGGSQPGGFSPGQNQVTPQDHEKAALIMQVLQLTADQIAMLPPEQRQSILILKEQIQKSTGAP

SEQ ID NO: 9206 - protein, 310 aa, Homo sapiens
MADAAATAGAGGSGTRSGSKQSTNPADNYHLARRRTLQVVVSSLLTEAGFESAEKASVETLTEMLQSYISEIGRSAKSYCEHTARTQPTLSDIVVTLVEMGFNVDTLPAYAKRSQRMVITAPPVTNQPVTPKALTAGQNRPHPPHIPSHFPEFPDPHTYIKTPTYREPVSDYQVLREKAASQRRDVERALTRFMAKTGETQSLFKDDVSTFPLIAARPFTIPYLTALLPSELEMQQMEETDSSEQDEQTDTENLALHISMEDSGAEKENTSVLQQNPSLSGSRNGEENIIDNPYLRPVKKPKIRRKKSLS

SEQ ID NO: 9207 - protein, 644 aa, Homo sapiens
MEETMKLATMEDTVEYCLFLIPDESRDSDKHKEILQKYIERIITRFAPMLVPYIWQNQPFNLKYKPGKGGVPAHMFGVTKFGDNIEDEWFIVYVIKQITKEFPELVARIEDNDGEFLLIEAADFLPKWLDPENSTNRVFFCHGELCIIPAPRKSGAESWLPTTPPTIPQALNIITAHSEKILASESIRAAVNRRIRGYPEKIQASLHRAHCFLPAGIVAVLKQRPRLVAAAVQAFYLRDPIDLRACRVFKTFLPETRIMTSVTFTKCLYAQLVQQRFVPDRRSGYRLPPPSDPQYRAHELGMKLAHGFEILCSKCSPHFSDCKKSLVTASPLWASFLESLKKNDYFKGLIEGSAQYRERLEMAENYFQLSVDWPESSLAMSPGEEILTLLQTIPFDIEDLKKEAANLPPEDDDQWLDLSPDQLDQLLQEAVGKKESESVSKEEKEQNYDLTEVSESMKAFISKVSTHKGAELPREPSEAPITFDADSFLNYFDKILGPRPNESDSDDLDDEDFECLDSDDDLDFETHEPGEEASLKGTLDNLKSYMAQMDQELAHTCISKSFTTRNQVEPVSQTTDNNSDEEDSGTGESVMAPVDVDLNLVSNILESYSSQAGLAGPASNLLQSMGVQLPDNTDHRPTSKPTKN

SEQ ID NO: 9208 - protein, 696 aa, Homo sapiens
MSGGRFDFDDGGAYCGGWEGGKAHGHGLCTGPKGQGEYSGSWNFGFEVAGVYTWPSGNTFEGYWSQGKRHGLGIETKGRWLYKGEWTHGFKGRYGIRQSSSSGAKYEGTWNNGLQDGYGTETYADGGTYQGQFTNGMRHGYGVRQSVPYGMAVVVRSPLRTSLSSLRSEHSNGTVAPDSPASPASDGPALPSPAIPRGGFALSLLANAEAAARAPKGGGLFQRGALLGKLRRAESRTSVGSQRSRVSFLKSDLSSGASDAASTASLGEAAEGADEAAPFEADIDATTTETYMGEWKNDKRSGFGVSERSSGLRYEGEWLDNLRHGYGCTTLPDGHREEGKYRHNVLVKDTKRRMLQLKSNKVRQKVEHSVEGAQRAAAIARQKAEIAASRTSHAKAKAEAAEQAALAANQESNIARTLARELAPDFYQPGPEYQKRRLLQEILENSESLLEPPDRGAGAAGLPQPPRESPQLHERETPRPEGGSPSPAGTPPQPKRPRPGVSKDGLLSPGAWNGEPSGEGSRSVTPSEGAGRRSPARPATERMAIEALQAPPAPSREPEVALYQGYHSYAVRTTPPEPPPFEDQPEPEVSGSESAPSSPATAPLQAPTLRGPEPARETPAKLEPKPIIPKAEPRAKARKTEARGLTKAGAKKKARKEAALAAEAEVEVEEVPNTILICMVILLNIGLAILFVHLLT

SEQ ID NO: 9209 - protein, 292 aa, Homo sapiens
MELLCCEGTRHAPRAGPDPRLLGDQRVLQSLLRLEERYVPRASYFQCVQREIKPHMRKMLAYWMLEVCEEQRCEEEVFPLAMNYLDRYLSCVPTRKAQLQLLGAVCMLLASKLRETTPLTIEKLCIYTDHAVSPRQLRDWEVLVLGKLKWDLAAVIAHDFLAFILHRLSLPRDRQALVKKHAQTFLALCATDYTFAMYPPSMIATGSIGAAVQGLGACSMSGDELTELLAGITGTEVDCLRACQEQIEAALRESLREASQTSSSPAPKAPRGSSSQGPSQTSTPTDVTAIHL

SEQ ID NO: 9210 - protein, 200 aa, Homo sapiens
MPLGLLWLGLALLGALHAQAQDSTSDLIPAPPLSKVPLQQNFQDNQFQGKWYVVGLAGNAILREDKDPQKMYATIYELKEDKSYNVTSVLFREKAQKCDYWIRTFVPGCQPGEFTLGNIKSYPGLTSYLVRVVSTNYNQHAMVFFKKVSQNREYFKITLYGRTKELTSELKENFIRFSKSLGLPENHIVFPVPIDQCIDG

SEQ ID NO: 9211 - protein, 399 aa, Homo sapiens
MSLQYGAEETPLAGSYGAADSFPKDFGYGVEEEEEEAAAAGGGVGAGAGGGCGPGGADSSKPRILLMGLRRSGKSSIQKVVFHKMSPNETLFLESTNKIYKDDISNSSFVNFQIWDFPGQMDFFDPTFDYEMIFRGTGALIYVIDAQDDYMEALTRLHITVSKAYKVNPDMNFEVFIHKVDGLSDDHKIETQRDIHQRANDDLADAGLEKLHLSFYLTSIYDHSIFEAFSKVVQKLIPQLPTLENLLNIFISNSGIEKAFLFDVVSKIYIATDSSPVDMQSYELCCDMIDVVIDVSCIYGLKEDGSGSAYDKESMAIIKLNNTTVLYLKEVTKFLALVCILREESFERKGLIDYNFHCFRKAIHEVFEVGVTSHRSCGHQTSASSLKALTHNGTPRNAI

SEQ ID NO: 9212 - protein, 465 aa, Homo sapiens
MASQLTQRGALFLLFFLTPAVTPTWYAGSGYYPDESYNEVYAEEVPQAPALDYRVPRWCYTLNIQDGEATCYSPKGGNYHSSLGTRCELSCDRGFRLIGRRSVQCLPSRRWSGTAYCRQMRCHALPFITSGTYTCTNGVLLDSRCDYSCSSGYHLEGDRSRICMEDGRWSGGEPVCVDIDPPKIRCPHSREKMAEPEKLTARVYWDPPLVKDSADGTITRVTLRGPEPGSHFPEGEHVIRYTAYDRAYNRASCKFIVKVQVRRCPTLKPPQHGYLTCTSAGDNYGATCEYHCDGGYDRQGTPSRVCQSSRQWSGSPPICAPMKINVNVNSAAGLLDQFYEKQRLLIISAPDPSNRYYKMQISMLQQSTCGLDLRHVTIIELVGQPPQEVGRIREQQLSANIIEELRQFQRLTRSYFNMVLIDKQGIDRDRYMEPVTPEEIFTFIDDYLLSNQELTQRREQRDICE

SEQ ID NO: 9213 - protein, 534 aa, Homo sapiens; identical to SEQ ID NO: 2217

SEQ ID NO: 9214 - protein, 253 aa, Homo sapiens
MAAAFRKAAKSRQREHRERSQPGFRKHLGLLEKKKDYKLRADDYRKKQEYLKALRKKALEKNPDEFYYKMTRVKLQDGVHIIKETKEEVTPEQLKLMRTQDVKYIEMKRVAEAKKIERLKSELHLLDFQGKQQNKHVFFFDTKKEVEQFDVATHLQTAPELVDRVFNRPRIETLQKEKVKGVTNQTGLKRIAKERQKQYNCLTQRIEREKKLFVIAQKIQTRKDLMDKTQKVKVKKETVNSPAIYKFQSRRKR

SEQ ID NO: 9215 - protein, 280 aa, Homo sapiens
MSESFDCAKCNESLYGRKYIQTDSGPYCVPCYDNTFANTCAECQQLIGHDSRELFYEDRHFHEGCFRCCRCQRSLADEPFTCQDSELLCNDCYCSAFSSQCSACGETVMPGSRKLEYGGQTWHEHCFLCSGCEQPLGSRSFVPDKGAHYCVPCYENKFAPRCARCSKTLTQGGVTYRDQPWHRECLVCTGCQTPLAGQQFTSRDEDPYCVACFGELFAPKCSSCKRPIVGLGGGKYVSFEDRHWHHNCFSCARCSTSLVGQGFVPDGDQVLCQGCSQAGP

SEQ ID NO: 9216 - protein, 501 aa, Homo sapiens
METILEQQRRYHEEKERLMDVMAKEMLTKKSTLRDQINSDHRTRAMQDRYMEVSGNLRDLYDDKDGLRKEELNAISGPNEFAEFYNRLKQIKEFHRKHPNEICVPMSVEFEELLKARENPSEEAQNLVEFTDEEGYGRYLDLHDCYLKYINLKASEKLDYITYLSIFDQLFDIPKERKNAEYKRYLEMLLEYLQDYTDRVKPLQDQNELFGKIQAEFEKKWENGTFPGWPKETSSALTHAGAHLDLSAFSSWEELASLGLDRLKSALLALGLKCGGTLEERAQRLFSTKGKSLESLDTSLFAKNPKSKGTKRDTERNKDIAFLEAQIYEYVEILGEQRHLTHENVQRKQARTGEEREEEEEEQISESESEDEENEIIYNPKNLPLGWDGKPIPYWLYKLHGLNINYNCEICGNYTYRGPKAFQRHFAEWRHAHGMRCLGIPNTAHFANVTQIEDAVSLWAKLKLQKASERWQPDTEEEYEDSSGNVVNKKTYEDLKRQGLL

SEQ ID NO: 9217 - protein, 245 aa, Homo sapiens
MASPSRRLQTKPVITCFKSVLLIYTFIFWITGVILLAVGIWGKVSLENYFSLLNEKATNVPFVLIATGTVIILLGTFGCFATCRASAWMLKLYAMFLTLVFLVELVAAIVGFVFRHEIKNSFKNNYEKALKQYNSTGDYRSHAVDKIQNTLHCCGVTDYRDWTDTNYYSEKGFPKSCCKLEDCTPQRDADKVNNEGCFIKVMTIIESEMGVVAGISFGVACFQLIGIFLAYCLSRAITNNQYEIV

SEQ ID NO: 9218 - protein, 993 aa, Homo sapiens
MDQSVAIQETLAEGEYCVIAVQGVLCEGDSRQSRLLGLVRYRLEHGGQEHALFLYTHRRMAITGDDVSLDQIVPVSRDFTLEEVSPDGELYILGSDVTVQLDTAELSLVFQLPFGSQTRMFLHEVARACPGFDSATRDPEFLWLSRYRCAELELEMPTPRGCNSALVTWPGYATIGGGRYPSRKKRWGLEEARPQGAGSVLFWGGAMEKTGFRLMERAHGGGFVWGRSARDGRRDEELEEAGREMSAAAGSRERNTAGGSNFDGLRPNGKGVPMDQSSRGQDKPESLQPRQNKSKSEITDMVRSSTITVSDKAHILSMQKFGLRDTIVKSHLLQKEEDYTYIQNFRFFAGTYNVNGQSPKECLRLWLSNGIQAPDVYCVGFQELDLSKEAFFFHDTPKEEEWFKAVSEGLHPDAKYAKVKLIRLVGIMLLLYVKQEHAAYISEVEAETVGTGIMGRMGNKGGVAIRFQFHNTSICVVNSHLAAHIEEYERRNQDYKDICSRMQFCQPDPSLPPLTISNHDVILWLGDLNYRIEELDVEKVKKLIEEKDFQMLYAYDQLKIQVAAKTVFEGFTEGELTFQPTYKYDTGSDDWDTSEKCRAPAWCDRILWKGKNITQLSYQSHMALKTSDHKPVSSVFDIGVRVVNDELYRKTLEEIVRSLDKMENANIPSVSLSKREFCFQNVKYMQLKVESFTIHNGQVPCHFEFINKPDEESYCKQWLNANPSRGFLLPDSDVEIDLELFVNKMTATKLNSGEDKIEDILVLHLDRGKDYFLSVSGNYLPSCFGSPIHTLCYMREPILDLPLETISELTLMPVWTGDDGSQLDSPMEIPKELWMMVDYLYRNAVQQEDLFQQPGLRSEFEHIRDCLDTGMIDNLSASNHSVAEALLLFLESLPEPVICYSTYHNCLECSGNYTASKQVISTLPIFHKNVFHYLMAFLRELLKNSAKNHLDENILASIFGSLLLRNPAGHQKLDMTEKKKAQEFIHQFLCNPL

SEQ ID NO: 9219 - protein, 913 aa, Homo sapiens
MDQSVAIQETLAEGEYCVIAVQGVLCEGDSRQSRLLGLVRYRLEHGGQEHALFLYTHRRMAITGDDVSLDQIVPVSRDFTLEEVSPDGELYILGSDVTVQLDTAELSLVFQLPFGSQTRMFLHEVARACPGFDSATRDPEFLWLSRYRCAELELEMPTPRGCNSALVTWPGYATIGGGGSNFDGLRPNGKGVPMDQSSRGQDKPESLQPRQNKSKSEITDMVRSSTITVSDKAHILSMQKFGLRDTIVKSHLLQKEEDYTYIQNFRFFAGTYNVNGQSPKECLRLWLSNGIQAPDVYCVGFQELDLSKEAFFFHDTPKEEEWFKAVSEGLHPDAKYAKVKLIRLVGIMLLLYVKQEHAAYISEVEAETVGTGIMGRMGNKGGVAIRFQFHNTSICVVNSHLAAHIEEYERRNQDYKDICSRMQFCQPDPSLPPLTISNHDVILWLGDLNYRIEELDVEKVKKLIEEKDFQMLYAYDQLKIQVAAKTVFEGFTEGELTFQPTYKYDTGSDDWDTSEKCRAPAWCDRILWKGKNITQLSYQSHMALKTSDHKPVSSVFDIGVRVVNDELYRKTLEEIVRSLDKMENANIPSVSLSKREFCFQNVKYMQLKVESFTIHNGQVPCHFEFINKPDEESYCKQWLNANPSRGFLLPDSDVEIDLELFVNKMTATKLNSGEDKIEDILVLHLDRGKDYFLSVSGNYLPSCFGSPIHTLCYMREPILDLPLETISELTLMPVWTGDDGSQLDSPMEIPKELWMMVDYLYRNAVQQEDLFQQPGLRSEFEHIRDCLDTGMIDNLSASNHSVAEALLLFLESLPEPVICYSTYHNCLECSGNYTASKQVISTLPIFHKNVFHYLMAFLRELLKNSAKNHLDENILASIFGSLLLRNPAGHQKLDMTEKKKAQEFIHQFLCNPL

SEQ ID NO: 9220 - protein, 388 aa, Homo sapiens
MKWMVVVLVCLQLLEAAVVKVPLKKFKSIRETMKEKGLLGEFLRTHKYDPAWKYRFGDLSVTYEPMAYMDAAYFGEISIGTPPQNFLVLFDTGSSNLWVPSVYCQSQACTSHSRFNPSESSTYSTNGQTFSLQYGSGSLTGFFGYDTLTVQSIQVPNQEFGLSENEPGTNFVYAQFDGIMGLAYPALSVDEATTAMQGMVQEGALTSPVFSVYLSNQQGSSGGAVVFGGVDSSLYTGQIYWAPVTQELYWQIGIEEFLIGGQASGWCSEGCQAIVDTGTSLLTVPQQYMSALLQATGAQEDEYGQFLVNCNSIQNLPSLTFIINGVEFPLPPSSYILSNNGYCTVGVEPTYLSSQNGQPLWILGDVFLRSYYSVYDLGNNRVGFATAA

SEQ ID NO: 9221 - protein, 437 aa, Homo sapiens
MEKELRSTILFNAYKKEIFTTNNGYKSMQKKLRSNWKIQSLKDEITSEKLNGVKLWITAGPREKFTAAEFEILKKYLDTGGDVFVMLGEGGESRFDTNINFLLEEYGIMVNNDAVVRNVYHKYFHPKEALVSSGVLNREISRAAGKAVPGIIDEESSGNNAQALTFVYPFGATLSVMKPAVAVLSTGSVCFPLNRPILAFYHSKNQGGKLAVLGSCHMFSDQYLDKEENSKIMDVVFQWLTTGDIHLNQIDAEDPEISDYMMLPYTATLSKRNRECLQESDEIPRDFTTLFDLSIFQLDTTSFHSVIEAHEQLNVKHEPLQLIQPQFETPLPTLQPAVFPPSFRELPPPPLELFDLDETFSSEKARLAQITNKCTEEDLEFYVRKCGDILGVTSKLPKDQQDAKHILEHVFFQVVEFKKLNQEHDIDTSETAFQNNF

SEQ ID NO: 9222 - protein, 195 aa, Homo sapiens
MKLASGFLVLWLSLGGGLAQSDTSPDTEESYSDWGLRHLRGSFESVNSYFDSFLELLGGKNGVCQYRCRYGKAPMPRPGYKPQEPNGCGSYFLGLKVPESMDLGIPAMTKCCNQLDVCYDTCGANKYRCDAKFRWCLHSICSDLKRSLGFVSKVEAACDSLVDTVFNTVWTLGCRPFMNSQRAACICAEEEKEEL

SEQ ID NO: 9223 - protein, 1148 aa, Homo sapiens
MESLLLPVLLLLAILWTQAAALINLKYSVEEEQRAGTVIANVAKDAREAGFALDPRQASAFRVVSNSAPHLVDINPSSGLLVTKQKIDRDLLCRQSPKCIISLEVMSSSMEICVIKVEIKDLNDNAPSFPAAQIELEISEAASPGTRIPLDSAYDPDSGSFGVQTYELTPNELFGLEIKTRGDGSRFAELVVEKSLDRETQSHYSFRITALDGGDPPRLGTVGLSIKVTDSNDNNPVFSESTYAVSVPENSPPNTPVIRLNASDPDEGTNGQVVYSFYGYVNDRTRELFQIDPHSGLVTVTGALDYEEGHVYELDVQAKDLGPNSIPAHCKVTVSVLDTNDNPPVINLLSVNSELVEVSESAPPGYVIALVRVSDRDSGLNGRVQCRLLGNVPFRLQEYESFSTILVDGRLDREQHDQYNLTIQARDGGVPMLQSAKSFTVLITDENDNHPHFSKPYYQVIVQENNTPGAYLLSVSARDPDLGLNGSVSYQIVPSQVRDMPVFTYVSINPNSGDIYALRSFNHEQTKAFEFKVLAKDGGLPSLQSNATVRVIILDVNDNTPVITAPPLINGTAEVYIPRNSGIGYLVTVVKAEDYDEGENGRVTYDMTEGDRGFFEIDQVNGEVRTTRTFGESSKSSYELIVVAHDHGKTSLSASALVLIYLSPALDAQESMGSVNLSLIFIIALGSIAGILFVTMIFVAIKCKRDNKEIRTYNCSNCLTITCLLGCFIKGQNSKCLHCISVSPISEEQDKKTEEKVSLRGKRIAEYSYGHQKKSSKKKKISKNDIRLVPRDVEETDKMNVVSCSSLTSSLNYFDYHQQTLPLGCRRSESTFLNVENQNTRNTSANHIYHHSFNSQGPQQPDLIINGVPLPETENYSFDSNYVNSRAHLIKSSSTFKDLEGNSLKDSGHEESDQTDSEHDVQRSLYCDTAVNDVLNTSVTSMGSQMPDHDQNEGFHCREECRILGHSDRCWMPRNPMPIRSKSPEHVRNIIALSIEATAADVEAYDDCGPTKRTFATFGKDVSDHPAEERPTLKGKRTVDVTICSPKVNSVIREAGNGCEAISPVTSPLHLKSSLPTKPSVSYTIALAPPARDLEQYVNNVNNGPTRPSEAEPRGADSEKVMHEVSPILKEGRNKESPGVKRLKDIVL

SEQ ID NO: 9224 - protein, 47 aa, Homo sapiens
MLRQLGRRRPEPAGGGNVSAKPGAPPQPAVSARGGFPKDAGDGAAEP

SEQ ID NO: 9225 - protein, 279 aa, Homo sapiens
MSPARRCRGMRAAVAASVGLSEGPAGSRSGRLFRPPSPAPAAPGARLLRLPGSGAVQAASPERAGWTEALRAAVAELRAGAVVAVPTDTLYGLACAASCSAALRAVYRLKGRSEAKPLAVCLGRVADVYRYCRVRVPEGLLKDLLPGPVTLVMERSEELNKDLNPFTPLVGIRIPDHAFMQDLAQMFEGPLALTSANLSSQASSLNVEEFQDLWPQLSLVIDGGQIGDGQSPECRLGSTVVDLSVPGKFGIIRPGCALESTTAILQQKYGLLPSHASYL

SEQ ID NO: 9226 - protein, 1008 aa, Homo sapiens
METCAGPHPLRLFLCRMQLCLALLLGPWRPGTAEEVILLDSKASQAELGWTALPSNGWEEISGVDEHDRPIRTYQVCNVLEPNQDNWLQTGWISRGRGQRIFVELQFTLRDCSSIPGAAGTCKETFNVYYLETEADLGRGRPRLGGSRPRKIDTIAADESFTQGDLGERKMKLNTEVREIGPLSRRGFHLAFQDVGACVALVSVRVYYKQCRATVRGLATFPATAAESAFSTLVEVAGTCVAHSEGEPGSPPRMHCGADGEWLVPVGRCSCSAGFQERGDFCEACPPGFYKVSPRRPLCSPCPEHSRALENASTFCVCQDSYARSPTDPPSASCTRPPSAPRDLQYSLSRSPLVLRLRWLPPADSGGRSDVTYSLLCLRCGREGPAGACEPCGPRVAFLPRQAGLRERAATLLHLRPGARYTVRVAALNGVSGPAAAAGTTYAQVTVSTGPGAPWEEDEIRRDRVEPQSVSLSWREPIPAGAPGANDTEYEIRYYEKGQSEQTYSMVKTGAPTVTVTNLKPATRYVFQIRAASPGPSWEAQSFNPSIEVQTLGEAASGSRDQSPAIVVTVVTISALLVLGSVMSVLAIWRRPCSYGKGGGDAHDEEELYFHFKVPTRRTFLDPQSCGDLLQAVHLFAKELDAKSVTLERSLGGGRFGELCCGCLQLPGRQELLVAVHMLRDSASDSQRLGFLAEALTLGQFDHSHIVRLEGVVTRGSTLMIVTEYMSHGALDGFLRRHEGQLVAGQLMGLLPGLASAMKYLSEMGYVHRGLAARHVLVSSDLVCKISGFGRGPRDRSEAVYTTMSGRSPALWAAPETLQFGHFSSASDVWSFGIIMWEVMAFGERPYWDMSGQDVIKAVEDGFRLPPPRNCPNLLHRLMLDCWQKDPGERPRFSQIHSILSKMVQDPEPPKCALTTCPRPPTPLADRAFSTFPSFGSVGAWLEALDLCRYKDSFAAAGYGSLEAVAEMTAQDLVSLGISLAEHREALLSGISALQARVLQLQGQGVQV

SEQ ID NO: 9227 - protein, 1096 aa, Homo sapiens
MEQPGAAASGAGGGSEEPGGGRSNKRSAGNRAANEEETKNKPKLNIQIKTLADDVRDRITSFRKSTVKKEKPLIQHPIDSQVAMSEFPAAQPLYDERSLNLSEKEVLDLFEKMMEDMNLNEEKKAPLRNKDFTTKREMVVQYISATAKSGGLKNSKHECTLSSQEYVHELRSGISDEKLLNCLESLRVSLTSNPVSWVNNFGHEGLGLLLDELEKLLDKKQQENIDKKNQYKLIQCLKAFMNNKFGLQRILGDERSLLLLARAIDPKQPNMMTEIVKILSAICIVGEENILDKLLGAITTAAERNNRERFSPIVEGLENQEALQLQVACMQFINALVTSPYELDFRIHLRNEFLRSGLKTMLPDLKEKENDELDIQLKVFDENKEDDLTELSHRLNDIRAEMDDMNEVYHLLYNMLKDTAAENYFLSILQHFLLIRNDYYIRPQYYKIIEECVSQIVLHCSGMDPDFKYRQRLDIDLTHLIDSCVNKAKVEESEQKAAEFSKKFDEEFTARQEAQAELQKRDEKIKELEAEIQQLRTQAQVLSSSSGIPGPPAAPPLPGVGPPPPPPAPPLPGGAPLPPPPPPLPGMMGIPPPPPPPLLFGGPPPPPPLGGVPPPPGISLNLPYGMKQKKMYKPEVSMKRINWSKIEPTELSENCFWLRVKEDKFENPDLFAKLALNFATQIKVQKNAEALEEKKTGPTKKKVKELRILDPKTAQNLSIFLGSYRMPYEDIRNVILEVNEDMLSEALIQNLVKHLPEQKILNELAELKNEYDDLCEPEQFGVVMSSVKMLQPRLSSILFKLTFEEHINNIKPSIIAVTLACEELKKSESFNRLLELVLLVGNYMNSGSRNAQSLGFKINFLCKIRDTKSADQKTTLLHFIADICEEKYRDILKFPEELEHVESASKVSAQILKSNLASMEQQIVHLERDIKKFPQAENQHDKFVEKMTSFTKTAREQYEKLSTMHNNMMKLYENLGEYFIFDSKTVSIEEFFGDLNNFRTLFLEAVRENNKRREMEEKTRRAKLAKEKAEQEKLERQKKKKQLIDINKEGDETGVMDNLLEALQSGAAFRDRRKRIPRNPVVNHPCATRANPRSAT

SEQ ID NO: 9228 - protein, 351 aa, Homo sapiens
MAAAAGRSLLLLLSSRGGGGGGAGGCGALTAGCFPGLGVSRHRQQQHHRTVHQRIASWQNLGAVYCSTVVPSDDVTVVYQNGLPVISVRLPSRRERCQFTLKPISDSVGVFLRQLQEEDRGIDRVAIYSPDGVRVAASTGIDLLLLDDFKLVINDLTYHVRPPKRDLLSHENAATLNDVKTLVQQLYTTLCIEQHQLNKERELIERLEDLKEQLAPLEKVRIEISRKAEKRTTLVLWGGLAYMATQFGILARLTWWEYSWDIMEPVTYFITYGSAMAMYAYFVMTRQEYVYPEARDRQYLLFFHKGAKKSRFDLEKYNQLKDAIAQAEMDLKRLRDPLQVHLPLRQIGEKD

SEQ ID NO: 9229 - protein, 1103 aa, Homo sapiens [sequence omitted]

SEQ ID NO: 9230 - protein, 731 aa, Homo sapiens
MVKPKYKGRSTINPSKASTNPDRVQGAGGQNMRDRATIRRLNMYRQKERRNSRGKIIKPLQYQSTVASGTVARVEPNIKWFGNTRVIKQSSLQKFQEEMDTVMKDPYKVVMKQSKLPMSLLHDRIRPHNLKVHILDTESFETTFGPKSQRKRPNLFASDMQSLIENAEMSTESYDQGKDRDLVTEDTGVRNEAQEEIYKKGQSKRIWGELYKVIDSSDVVVQVLDARDPMGTRSPHIETYLKKEKPWKHLIFVLNKCDLVPTWATKRWVAVLSQDYPTLAFHASLTNPFGKGAFIQLLRQFGKLHTDKKQISVGFIGYPNVGKSSVINTLRSKKVCNVAPIAGETKVWQYITLMRRIFLIDCPGVVYPSEDSETDIVLKGVVQVEKIKSPEDHIGAVLERAKPEYISKTYKIDSWENAEDFLEKLAFRTGKLLKGGEPDLQTVGKMVLNDWQRGRIPFFVKPPNAEPLVAPQLLPSSSLEVVPEAAQNNPGEEVTETAGEGSESIIKEETEENSHCDANTEMQQILTRVRQNFGKINVVPQFSGDDLVPVEVSDLEEELESFSDEEEEEQEQQRDDAEESSSEPEEENVGNDTKAVIKALDEKIAKYQKFLDKAKAKKFSAVRISKGLSEKIFAKPEEQRKTLEEDVDDRAPSKKGKKRKAQREEEQEHSNKAPRALTSKERRRAVRQQRPKKVGVRYYETHNVKNRNRNKKKTNDSEGQKHKRKKFRQKQ

SEQ ID NO: 9231 - protein, 469 aa, Homo sapiens
MLCLCLYVPVIGEAQTEFQYFESKGLPAELKSIFKLSVFIPSQEFSTYRQWKQKIVQAGDKDLDGQLDFEEFVHYLQDHEKKLRLVFKSLDKKNDGRIDAQEIMQSLRDLGVKISEQQAEKILKSMDKNGTMTIDWNEWRDYHLLHPVENIPEIILYWKHSTIFDVGENLTVPDEFTVEERQTGMWWRHLVAGGGAGAVSRTCTAPLDRLKVLMQVHASRSNNMGIVGGFTQMIREGGARSLWRGNGINVLKIAPESAIKFMAYEQIKRLVGSDQETLRIHERLVAGSLAGAIAQSSIYPMEVLKTRMALRKTGQYSGMLDCARRILAREGVAAFYKGYVPNMLGIIPYAGIDLAVYETLKNAWLQHYAVNSADPGVFVLLACGTMSSTCGQLASYPLALVRTRMQAQASIEGAPEVTMSSLFKHILRTEGAFGLYRGLAPNFMKVIPAVSISYVVYENLKITLGVQSR

SEQ ID NO: 9232 - protein, 192 aa, Homo sapiens
MAMHNKAAPPQIPDTRRELAELVKRKQELAETLANLERQIYAFEGSYLEDTQMYGNIIRGWDRYLTNQKNSNSKNDRRNRKFKEAERLFSKSSVTSAAAVSALAGVQDQLIEKREPGSGTESDTSPDFHNQENEPSQEDPEDLDGSVQGVKPQKAASSTSSGSHHSSHKKRKNKNRHRMNVSPKTGWHQLHL

SEQ ID NO: 9233 - protein, 506 aa, Homo sapiens
MAEADFKMVSEPVAHGVAEEEMASSTSDSGEESDSSSSSSSTSDSSSSSSTSGSSSGSGSSSSSSGSTSSRSRLYRKKRVPEPSRRARRAPLGTNFVDRLPQAVRNRVQALRNIQDECDKVDTLFLKAIHDLERKYAELNKPLYDRRFQIINAEYEPTEEECEWNSEDEEFSSDEEVQDNTPSEMPPLEGEEEENPKENPEVKAEEKEVPKEIPEVKDEEKEVPKEIPEVKAEEKADSKDCMEATPEVKEDPKEVPQVKADDKEQPKATEAKARAAVRETHKRVPEERLQDSVDLKRARKGKPKREDPKGIPDYWLIVLKNVDKLGPMIQKYDEPILKFLSDVSLKFSKPGQPVSYTFEFHFLPNPYFRNEVLVKTYIIKAKPDHNDPFFSWGWEIEDCKGCKIDWRRGKDVTVTTTQSRTTATGEIEIQPRVVPNASFFNFFSPPEIPMIGKLEPREDAILDEDFEIGQILHDNVILKSIYYYTGEVNGTYYQFGKHYGNKKYRK

SEQ ID NO: 9234 - protein, 258 aa, Homo sapiens
MAWRALHPLLLLLLLFPGSQAQSKAQVLQSVAGQTLTVRCQYPPTGSLYEKKGWCKEASALVCIRLVTSSKPRTMAWTSRFTIWDDPDAGFFTVTMTDLREEDSGHYWCRIYRPSDNSVSKSVRFYLVVSPASASTQTSWTPRDLVSSQTQTQSCVPPTAGARQAPESPSTIPVPSQPQNSTLRPGPAAPIALVPVFCGLLVAKSLVLSALLVWWVLRNRHMQHQGRSLLHPAQPRPQAHRHFPLSHRAPGGTYGGKP

SEQ ID NO: 9235 - protein, 270 aa, Homo sapiens
MAWRALHPLLLLLLLFPGSQAQSKAQVLQSVAGQTLTVRCQYPPTGSLYEKKGWCKEASALVCIRLVTSSKPRTMAWTSRFTIWDDPDAGFFTVTMTDLREEDSGHYWCRIYRPSDNSVSKSVRFYLVVSPASASTQTSWTPRDLVSSQTQTQSCVPPTAGARQAPESPSTIPVPSHPSSPLPVPLPSRPQNSTLRPGPAAPIALVPVFCGLLVAKSLVLSALLVWWVLRNRHMQHQGRSLLHPAQPRPQAHRHFPLSHRAPGGTYGGKP

SEQ ID NO: 9236 - protein, 1310 aa, Homo sapiens
MDLLSGTYIFAVLLACVVFHSGAQEKNYTIREEMPENVLIGDLLKDLNLSLIPNKSLTTAMQFKLVYKTGDVPLIRIEEDTGEIFTTGARIDREKLCAGIPRDEHCFYEVEVAILPDEIFRLVKIRFLIEDINDNAPLFPATVINISIPENSAINSKYTLPAAVDPDVGINGVQNYELIKSQNIFGLDVIETPEGDKMPQLIVQKELDREEKDTYVMKVKVEDGGFPQRSSTAILQVSVTDTNDNHPVFKETEIEVSIPENAPVGTSVTQLHATDADIGENAKIHFSFSNLVSNIARRLFHLNATTGLITIKEPLDREETPNHKLLVLASDGGLMPARAMVLVNVTDVNDNVPSIDIRYIVNPVNDTVVLSENIPLNTKIALITVTDKDADHNGRVTCFTDHEIPFRLRPVFSNQFLLETAAYLDYESTKEYAIKLLAADAGKPPLNQSAMLFIKVKDENDNAPVFTQSFVTVSIPENNSPGIQLTKVSAMDADSGPNAKINYLLGPDAPPEFSLDCRTGMLTVVKKLDREKEDKYLFTILAKDNGVPPLTSNVTVFVSIIDQNDNSPVFTHNEYNFYVPENLPRHGTVGLITVTDPDYGDNSAVTLSILDENDDFTIDSQTGVIRPNISFDREKQESYTFYVKAEDGGRVSRSSSAKVTINVVDVNDNKPVFIVPPSNCSYELVLPSTNPGTVVFQVIAVDNDTGMNAEVRYSIVGGNTRDLFAIDQETGNITLMEKCDVTDLGLHRVLVKANDLGQPDSLFSVVIVNLFVNESVTNATLINELVRKSTEAPVTPNTEIADVSSPTSDYVKILVAAVAGTITVVVVIFITAVVRCRQAPHLKAAQKNKQNSEWATPNPENRQMIMMKKKKKKKKHSPKNLLLNFVTIEETKADDVDSDGNRVTLDLPIDLEEQTMGKYNWVTTPTTFKPDSPDLARHYKSASPQPAFQIQPETPLNSKHHIIQELPLDNTFVACDSISKCSSSSSDPYSVSDCGYPVTTFEVPVSVHTRPSQRRVTFHLPEGSQESSSDGGLGDHDAGSLTSTSHGLPLGYPQEEYFDRATPSNRTEGDGNSDPESTFIPGLKKAAEITVQPTVEEASDNCTQECLIYGHSDACWMPASLDHSSSSQAQASALCHSPPLSQASTQHHSPRVTQTIALCHSPPVTQTIALCHSPPPIQVSALHHSPPLVQATALHHSPPSAQASALCYSPPLAQAAAISHSSPLPQVIALHRSQAQSSVSLQQGWVQGADGLCSVDQGVQGSATSQFYTMSERLHPSDDSIKVIPLTTFTPRQQARPSRGDSPIMEEHPL

SEQ ID NO: 9237 - protein, 276 aa, Homo sapiens
MAWRALHPLLLLLLLFPGSQAQSKAQVLQSVAGQTLTVRCQYPPTGSLYEKKGWCKEASALVCIRLVTSSKPRTMAWTSRFTIWDDPDAGFFTVTMTDLREEDSGHYWCRIYRPSDNSVSKSVRFYLVVSPASASTQTSWTPRDLVSSQTQTQSCVPPTAGARQAPESPSTIPVPSQPQNSTLRPGPAAPIALVPVFCGLLVAKSLVLSALLVWWGDIWWKTMMELRSLDTQKATCHLQQVTDLPWTSVSSPVEREILYHTVARTKISDDDDEHTL

SEQ ID NO: 9238 - protein, 919 aa, Homo sapiens [sequence omitted]

SEQ ID NO: 9239 - protein, 872 aa, Homo sapiens
MTAPWRRLRSLVWEYWAGLLVCAFWIPDSRGMPHVIRIGGIFEYADGPNAQVMNAEEHAFRFSANIINRNRTLLPNTTLTYDIQRIHFHDSFEATKKACDQLALGVVAIFGPSQGSCTNAVQSICNALEVPHIQLRWKHHPLDNKDTFYVNLYPDYASLSHAILDLVQYLKWRSATVVYDDSTGLIRLQELIMAPSRYNIRLKIRQLPIDSDDSRPLLKEMKRGREFRIIFDCSHTMAAQILKQAMAMGMMTEYYHFIFTTLDLYALDLEPYRYSGVNLTGFRILNVDNPHVSAIVEKWSMERLQAAPRSESGLLDGVMMTDAALLYDAVHIVSVCYQRAPQMTVNSLQCHRHKAWRFGGRFMNFIKEAQWEGLTGRIVFNKTSGLRTDFDLDIISLKEDGLEKVGVWSPADGLNITEVAKGRGPNVTDSLTNRSLIVTTVLEEPFVMFRKSDRTLYGNDRFEGYCIDLLKELAHILGFSYEIRLVEDGKYGAQDDKGQWNGMVKELIDHKADLAVAPLTITHVREKAIDFSKPFMTLGVSILYRKPNGTNPSVFSFLNPLSPDIWMYVLLAYLGVSCVLFVIARFSPYEWYDAHPCNPGSEVVENNFTLLNSFWFGMGSLMQQGSELMPKALSTRIIGGIWWFFTLIIISSYTANLAAFLTVERMESPIDSADDLAKQTKIEYGAVKDGATMTFFKKSKISTFEKMWAFMSSKPSALVKNNEEGIQRALTADYALLMESTTIEYVTQRNCNLTQIGGLIDSKGYGIGTPMGSPYRDKITIAILQLQEEDKLHIMKEKWWRGSGCPEEENKEASALGIQKIGGIFIVLAAGLVLSVLVAVGEFVYKLRKTAEREQVSLRAWSLHRMGNGDSR

SEQ ID NO: 9240 - protein, 1347 aa, Homo sapiens
MDLLSGTYIFAVLLACVVFHSGAQEKNYTIREEMPENVLIGDLLKDLNLSLIPNKSLTTAMQFKLVYKTGDVPLIRIEEDTGEIFTTGARIDREKLCAGIPRDEHCFYEVEVAILPDEIFRLVKIRFLIEDINDNAPLFPATVINISIPENSAINSKYTLPAAVDPDVGINGVQNYELIKSQNIFGLDVIETPEGDKMPQLIVQKELDREEKDTYVMKVKVEDGGFPQRSSTAILQVSVTDTNDNHPVFKETEIEVSIPENAPVGTSVTQLHATDADIGENAKIHFSFSNLVSNIARRLFHLNATTGLITIKEPLDREETPNHKLLVLASDGGLMPARAMVLVNVTDVNDNVPSIDIRYIVNPVNDTVVLSENIPLNTKIALITVTDKDADHNGRVTCFTDHEIPFRLRPVFSNQFLLETAAYLDYESTKEYAIKLLAADAGKPPLNQSAMLFIKVKDENDNAPVFTQSFVTVSIPENNSPGIQLTKVSAMDADSGPNAKINYLLGPDAPPEFSLDCRTGMLTVVKKLDREKEDKYLFTILAKDNGVPPLTSNVTVFVSIIDQNDNSPVFTHNEYNFYVPENLPRHGTVGLITVTDPDYGDNSAVTLSILDENDDFTIDSQTGVIRPNISFDREKQESYTFYVKAEDGGRVSRSSSAKVTINVVDVNDNKPVFIVPPSNCSYELVLPSTNPGTVVFQVIAVDNDTGMNAEVRYSIVGGNTRDLFAIDQETGNITLMEKCDVTDLGLHRVLVKANDLGQPDSLFSVVIVNLFVNESVTNATLINELVRKSTEAPVTPNTEIADVSSPTSDYVKILVAAVAGTITVVVVIFITAVVRCRQAPHLKAAQKNKQNSEWATPNPENRQMIMMKKKKKKKKHSPKNLLLNFVTIEETKADDVDSDGNRVTLDLPIDLEEQTMGKYNWVTTPTTFKPDSPDLARHYKSASPQPAFQIQPETPLNSKHHIIQELPLDNTFVACDSISKCSSSSSDPYSVSDCGYPVTTFEVPVSVHTRPPMKEVVRSCTPMKESTTMEIWIHPQPQRKSEGKVAGKSQRRVTFHLPEGSQESSSDGGLGDHDAGSLTSTSHGLPLGYPQEEYFDRATPSNRTEGDGNSDPESTFIPGLKKAAEITVQPTVEEASDNCTQECLIYGHSDACWMPASLDHSSSSQAQASALCHSPPLSQASTQHHSPRVTQTIALCHSPPVTQTIALCHSPPPIQVSALHHSPPLVQATALHHSPPSAQASALCYSPPLAQAAAISHSSPLPQVIALHRSQAQSSVSLQQGWVQGADGLCSVDQGVQGSATSQFYTMSERLHPSDDSIKVIPLTTFTPRQQARPSRGDSPIMEEHPL

SEQ ID NO: 9241 - protein, 384 aa, Homo sapiens
MAFLMKKKKFKFQTTFTLEELTAVPFVNGVLFCKVRLLDGGDFVSLSSREEVQENCVRWRKRFTFVCKMSANPATGLLDPCVFRVSVRKELKGGKAYSKLGFADLNLAEFAGSGSTVRCCLLEGYDTKNTRQDNSILKVTIGMFLLSGDPCFKTPPSTAKSISIPGQDSSLQLTCKGGGTSSGGSSTNSLTGSRPPKARPTILSSGLPEEPDQNLSSPEEVFHSGHSRNSSYASQQSKISGYSTEHSRSSSLSDLTHRRNTSTSSSASGGLGMTVEGPEGSEREHRPPEKPPRPPRPLHLSDRSFRRKKDSVESHPTWVDDTRIDADAIVEKIVQSQDFTDGSNTEDSNLRLFVSRDGSATLSGIQLATRVSSGVYEPVVIESH

SEQ ID NO: 9242 - protein, 1337 aa, Homo sapiens
MDLLSGTYIFAVLLACVVFHSGAQEKNYTIREEMPENVLIGDLLKDLNLSLIPNKSLTTAMQFKLVYKTGDVPLIRIEEDTGEIFTTGARIDREKLCAGIPRDEHCFYEVEVAILPDEIFRLVKIRFLIEDINDNAPLFPATVINISIPENSAINSKYTLPAAVDPDVGINGVQNYELIKSQNIFGLDVIETPEGDKMPQLIVQKELDREEKDTYVMKVKVEDGGFPQRSSTAILQVSVTDTNDNHPVFKETEIEVSIPENAPVGTSVTQLHATDADIGENAKIHFSFSNLVSNIARRLFHLNATTGLITIKEPLDREETPNHKLLVLASDGGLMPARAMVLVNVTDVNDNVPSIDIRYIVNPVNDTVVLSENIPLNTKIALITVTDKDADHNGRVTCFTDHEIPFRLRPVFSNQFLLETAAYLDYESTKEYAIKLLAADAGKPPLNQSAMLFIKVKDENDNAPVFTQSFVTVSIPENNSPGIQLTKVSAMDADSGPNAKINYLLGPDAPPEFSLDCRTGMLTVVKKLDREKEDKYLFTILAKDNGVPPLTSNVTVFVSIIDQNDNSPVFTHNEYNFYVPENLPRHGTVGLITVTDPDYGDNSAVTLSILDENDDFTIDSQTGVIRPNISFDREKQESYTFYVKAEDGGRVSRSSSAKVTINVVDVNDNKPVFIVPPSNCSYELVLPSTNPGTVVFQVIAVDNDTGMNAEVRYSIVGGNTRDLFAIDQETGNITLMEKCDVTDLGLHRVLVKANDLGQPDSLFSVVIVNLFVNESVTNATLINELVRKSTEAPVTPNTEIADVSSPTSDYVKILVAAVAGTITVVVVIFITAVVRCRQAPHLKAAQKNKQNSEWATPNPENRQMIMMKKKKKKKKHSPKNLLLNFVTIEETKADDVDSDGNRVTLDLPIDLEEQTMGKYNWVTTPTTFKPDSPDLARHYKSASPQPAFQIQPETPLNSKHHIIQELPLDNTFVACDSISKCSSSSSDPYSVSDCGYPVTTFEVPVSVHTRPPMKEVVRSCTPMKESTTMEIWIHPQPQSQRRVTFHLPEGSQESSSDGGLGDHDAGSLTSTSHGLPLGYPQEEYFDRATPSNRTEGDGNSDPESTFIPGLKKAAEITVQPTVEEASDNCTQECLIYGHSDACWMPASLDHSSSSQAQASALCHSPPLSQASTQHHSPRVTQTIALCHSPPVTQTIALCHSPPPIQVSALHHSPPLVQATALHHSPPSAQASALCYSPPLAQAAAISHSSPLPQVIALHRSQAQSSVSLQQGWVQGADGLCSVDQGVQGSATSQFYTMSERLHPSDDSIKVIPLTTFTPRQQARPSRGDSPIMEEHPL

SEQ ID NO: 9243 - protein, 863 aa, Homo sapiens
MARLGNCSLTWAALIILLLPGSLEECGHISVSAPIVHLGDPITASCIIKQNCSHLDPEPQILWRLGAELQPGGRQQRLSDGTQESIITLPHLNHTQAFLSCCLNWGNSLQILDQVELRAGYPPAIPHNLSCLMNLTTSSLICQWEPGPETHLPTSFTLKSFKSRGNCQTQGDSILDCVPKDGQSHCCIPRKHLLLYQNMGIWVQAENALGTSMSPQLCLDPMDVVKLEPPMLRTMDPSPEAAPPQAGCLQLCWEPWQPGLHINQKCELRHKPQRGEASWALVGPLPLEALQYELCGLLPATAYTLQIRCIRWPLPGHWSDWSPSLELRTTERAPTVRLDTWWRQRQLDPRTVQLFWKPVPLEEDSGRIQGYVVSWRPSGQAGAILPLCNTTELSCTFHLPSEAQEVALVAYNSAGTSRPTPVVFSESRGPALTRLHAMARDPHSLWVGWEPPNPWPQGYVIEWGLGPPSASNSNKTWRMEQNGRATGFLLKENIRPFQLYEIIVTPLYQDTMGPSQHVYAYSQEMAPSHAPELHLKHIGKTWAQLEWVPEPPELGKSPLTHYTIFWTNAQNQSFSAILNASSRGFVLHGLEPASLYHIHLMAASQAGATNSTVLTLMTLTPEGSELHIILGLFGLLLLLTCLCGTAWLCCSPNRKNPLWPSVPDPAHSSLGSWVPTIMEELPGPRQGQWLGQTSEMSRALTPHPCVQDAFQLPGLGTPPITKLTVLEEDEKKPVPWESHNSSETCGLPTLVQTYVLQGDPRAVSTQPQSQSGTSDQVLYGQLLGSPTSPGPGHYLRCDSTQPLLAGLTPSPKSYENLWFQASPLGTLVTPAPSQEDDCVFGPLLNFPLLQGIRVHGMEALGSF

SEQ ID NO: 9244 - protein, 230 aa, Homo sapiens
MEPLRLLILLFVTELSGAHNTTVFQGVAGQSLQVSCPYDSMKHWGRRKAWCRQLGEKGPCQRVVSTHNLWLLSFLRRWNGSTAITDDTLGGTLTITLRNLQPHDAGLYQCQSLHGSEADTLRKVLVEVLADPLDHRDAGDLWFPGESESFEDAHVEHSISRSLLEGEIPFPPTSILLLLACIFLIKILAASALWAAAWHGQKPGTHPPSELDCGHDPGYQLQTLPGLRDT

SEQ ID NO: 9245 - protein, 479 aa, Homo sapiens
MEKGLTLPQDCRDFVHSLKMRSKYALFLVFVVIVFVFIEKENKIISRVSDKLKQIPQALADANSTDPALILAENASLLSLSELDSAFSQLQSRLRNLSLQLGVEPAMEAAGEEEEEQRKEEEPPRPAVAGPRRHVLLMATTRTGSSFVGEFFNQQGNIFYLFEPLWHIERTVSFEPGGANAAGSALVYRDVLKQLFLCDLYVLEHFITPLPEDHLTQFMFRRGSSRSLCEDPVCTPFVKKVFEKYHCKNRRCGPLNVTLAAEACRRKEHMALKAVRIRQLEFLQPLAEDPRLDLRVIQLVRDPRAVLASRMVAFAGKYKTWKKWLDDEGQDGLREEEVQRLRGNCESIRLSAELGLRQPAWLRGRYMLVRYEDVARGPLQKAREMYRFAGIPLTPQVEDWIQKNTQAAHDGSGIYSTQKNSSEQFEKWRFSMPFKLAQVVQAACGPAMRLFGYKLARDAAALTNRSVSLLEERGTFWVT

SEQ ID NO: 9246 - protein, 257 aa, Homo sapiens
MLRVAWRTLSLIRTRAVTQVLVPGLPGGGSAKFPFNQWGLQPRSLLLQAARGYVVRKPAQSRLDDDPPPSTLLKDYQNVPGIEKVDDVVKRLLSLEMANKKEMLKIKQEQFMKKIVANPEDTRSLEARIIALSVKIRSYEEHLEKHRKDKAHKRYLLMSIDQRKKMLKNLRNTNYDVFEKICWGLGIEYTFPPLYYRRAHRRFVTKKALCIRVFQETQKLKKRRRALKAAAAAQKQAKRRNPDSPAKAIPKTLKDSQ

SEQ ID NO: 9247 - protein, 222 aa, Homo sapiens
MEPLRLLILLFVTELSGAHNTTVFQGVAGQSLQVSCPYDSMKHWGRRKAWCRQLGEKGPCQRVVSTHNLWLLSFLRRWNGSTAITDDTLGGTLTITLRNLQPHDAGLYQCQSLHGSEADTLRKVLVEVLADPLDHRDAGDLWFPGESESFEDAHVEHSISRPSQGSHLPSCLSKEPLGRRNPLPTHFHPSPPGLHLSHQDSSSQRPLGCSLAWTEARDTSTQ

SEQ ID NO: 9248 - protein, 199 aa, Homo sapiens
MGLTLLLLLLLGLEGQGIVGSLPEVLQAPVGSSILVQCHYRLQDVKAQKVWCRFLPEGCQPLVSSAVDRRAPAGRRTFLTDLGGGLLQVEMVTLQEEDAGEYGCMVDGARGPQILHRVSLNILPPEEEEETHKIGSLAENAFSDPAGSANPLEPSQDEKSIPLIWGAVLLVGLLVAAVVLFAVMAKRKQESLLSGPPRQ

SEQ ID NO: 9249 - protein, 435 aa, Homo sapiens
MKRRASDRGAGETSARAKALGSGISGNNAKRAGPFILGPRLGNSPVPSIVQCLARKDGTDDFYQLKILTLEERGDQGIESQEERQGKMLLHTEYSLLSLLHTQDGVVHHHGLFQDRTCEIVEDTESSRMVKKMKKRICLVLDCLCAHDFSDKTADLINLQHYVIKEKRLSERETVVIFYDVVRVVEALHQKNIVHRDLKLGNMVLNKRTHRITITNFCLGKHLVSEGDLLKDQRGSPAYISPDVLSGRPYRGKPSDMWALGVVLFTMLYGQFPFYDSIPQELFRKIKAAEYTIPEDGRVSENTVCLIRKLLVLDPQQRLAAADVLEALSAIIASWQSLSSLSGPLQVVPDIDDQMSNADSSQEAKVTEECSQYEFENYMRQQLLLAEEKSSIHDARSWVPKRQFGSAPPVRRLGHDAQPMTSLDTAILAQRYLRK

SEQ ID NO: 9250 - protein, 299 aa, Homo sapiens
MSSNKEQRSAVFVILFALITILILYSSNSANEVFHYGSLRGRSRRPVNLKKWSITDGYVPILGNKTLPSRCHQCVIVSSSSHLLGTKLGPEIERAECTIRMNDAPTTGYSADVGNKTTYRVVAHSSVFRVLRRPQEFVNRTPETVFIFWGPPSKMQKPQGSLVRVIQRAGLVFPNMEAYAVSPGRMRQFDDLFRGETGKDREKSHSWLSTGWFTMVIAVELCDHVHVYGMVPPNYCSQRPRLQRMPYHYYEPKGPDECVTYIQNEHSRKGNHHRFITEKRVFSSWAQLYGITFSHPSWT

SEQ ID NO: 9251 - protein, 808 aa, Homo sapiens
MESGPRAELGAGAPPAVVARTPPEPRPSPEGDPSPPPPPMSALVPDTPPDTPPAMKNATSSKQLPLEPESPSGQVGPRPAPPQEESPSSEAKSRGPTPPAMGPRDARPPRRSSQPSPTAVPASDSPPTKQEVKKAGERHKLAKERREERAKYLAAKKAVWLEKEEKAKALREKQLQERRRRLEEQRLKAEQRRAALEERQRQKLEKNKERYEAAIQRSVKKTWAEIRQQRWSWAGALHHSSPGHKTSGSRCSVSAVNLPKHVDSIINKRLSKSSATLWNSPSRNRSLQLSAWESSIVDRLMTPTLSFLARSRSAVTLPRNGRDQAVPVCPRSASASPLTPCSVTRSVHRCAPAGERGERRKPNAGGSPAPVRRRPEASPVQKKEKKDKERENEKEKSALARERSLKKRQSLPASPRARLSASTASELSPKSKARPSSPSTSWHRPASPCPSPGPGHTLPPKPPSPRGTTASPKGRVRRKEEAKESPSAAGPEDKSQSKRRASNEKESAAPASPAPSPAPSPTPAPPQKEQPPAETPTDAAVLTSPPAPAPPVTPSKPMAGTTDREEATRLLAEKRRQAREQREREEQERRLQAERDKRMREEQLAREAEARAEREAEARRREEQEAREKAQAEQEEQERLQKQKEEAEARSREEAERQRLEREKHFQQQEQERQERRKRLEEIMKRTRKSEVSETKKQDSKEANANGSSPEPVKAVEARSPGLQKEAVQKEEPIPQEPQWSLPSKELPASLVNGLQPLPAHQENGFSTNGPSGDKSLSRTPETLLPFAEAEAFLKKAVVQSPQVTEVL

SEQ ID NO: 9252 - protein, 841 aa, Homo sapiens
MESGPRAELGAGAPPAVVARTPPEPRPSPEGDPSPPPPPMSALVPDTPPDTPPAMKNATSSKQLPLEPESPSGQVGPRPAPPQEESPSSEAKSRGPTPPAMGPRDARPPRRSSQPSPTAVPASDSPPTKQEVKKAGERHKLAKERREERAKYLAAKKAVWLEKEEKAKALREKQLQERRRRLEEQRLKAEQRRAALEERQRQKLEKNKERYEAAIQRSVKKTWAEIRQQRWSWAGALHHSSPGHKTSGSRCSVSAVNLPKHVDSIINKRLSKSSATLWNSPSRNRSLQLSAWESSIVDRLMTPTLSFLARSRSAVTLPRNGRDQGRGCDPGRGPTWGRAGASLARGPQPDRTHPSAAVPVCPRSASASPLTPCSVTRSVHRCAPAGERGERRKPNAGGSPAPVRRRPEASPVQKKEKKDKERENEKEKSALARERSLKKRQSLPASPRARLSASTASELSPKSKARPSSPSTSWHRPASPCPSPGPGHTLPPKPPSPRGTTASPKGRVRRKEEAKESPSAAGPEDKSQSKRRASNEKESAAPASPAPSPAPSPTPAPPQKEQPPAETPTDAAVLTSPPAPAPPVTPSKPMAGTTDREEATRLLAEKRRQAREQREREEQERRLQAERDKRMREEQLAREAEARAEREAEARRREEQEAREKAQAEQEEQERLQKQKEEAEARSREEAERQRLEREKHFQQQEQERQERRKRLEEIMKRTRKSEVSETKQKQDSKEANANGSSPEPVKAVEARSPGLQKEAVQKEEPIPQEPQWSLPSKELPASLVNGLQPLPAHQENGFSTNGPSGDKSLSRTPETLLPFAEAEAFLKKAVVQSPQVTEVL

SEQ ID NO: 9253 - protein, 194 aa, Homo sapiens
MEEKLKKTKIIFVVGGPGSGKGTQCEKIVQKYGYTHLSTGDLLRSEVSSGSARGKKLSEIMEKGQLVPLETVLDMLRDAMVAKVNTSKGFLIDGYPREVQQGEEFERRIGQPTLLLYVDAGPETMTQRLLKRGETSGRVDDNEETIKKRLETYYKATEPVIAFYEKRGIVRKVNAEGSVDSVFSQVCTHLDALK

SEQ ID NO: 9254 - protein, 180 aa, Homo sapiens
MSRQANRGTESKKMSSELFTLTYGALVTQLCKDYENDEDVNKQLDKMGFNIGVRLIEDFLARSNVGRCHDFRETADVIAKVAFKMYLGITPSITNWSPAGDEFSLILENNPLVDFVELPDNHSSLIYSNLLCGVLRGALEMVQMAVEAKFVQDTLKGDGVTEIRMRFIRRIEDNLPAGEE

SEQ ID NO: 9255 - protein, 268 aa, Homo sapiens
MAAIRMGKLTTMPAGLIYASVSVHAAKQEESKKQLVKPEQLPIYTAPPLQSKYVEEQPGHLQMGFASIRTATGCYIGWCKGVYVFVKNGIMDTVQFGKDAYVYLKNPPRDFLPKMGVITVSGLAGLVSARKGSKFKKITYPLGLATLGATVCYPVQSVIIAKVTAKKVYATSQQIFGAVKSLWTKSSKEESLPKPKEKTKLGSSSEIEVPAKTTHVLKHSVPLPTELSSEAKTKSESTSGATQFMPDPKLMDHGQSHPEDIDMYSTRS

SEQ ID NO: 9256 - protein, 1451 aa, Homo sapiens
MASLAALALSLLLRLQLPPLPGARAQSAAGGCSFDEHYSNCGYSVALGTNGFTWEQINTWEKPMLDQAVPTGSFMMVNSSGRASGQKAHLLLPTLKENDTHCIDFHYYFSSRDRSSPGALNVYVKVNGGPQGNPVWNVSGVVTEGWVKAELAISTFWPHFYQVIFESVSLKGHPGYIAVDEVRVLAHPCRKAPHFLRLQNVEVNVGQNATFQCIAGGKWSQHDKLWLQQWNGRDTALMVTRVVNHRRFSATVSVADTAQRSVSKYRCVIRSDGGSGVSNYAELIVKEPPTPIAPPELLAVGATYLWIKPNANSIIGDGPIILKEVEYRTTTGTWAETHIVDSPNYKLWHLDPDVEYEIRVLLTRPGEGGTGPPGPPLTTRTKCADPVHGPQNVEIVDIRARQLTLQWEPFGYAVTRCHSYNLTVQYQYVFNQQQYEAEEVIQTSSHYTLRGLRPFMTIRLRLLLSNPEGRMESEELVVQTEEDVPGAVPLESIQGGPFEEKIYIQWKPPNETNGVITLYEINYKAVGSLDPSADLSSQRGKVFKLRNETHHLFVGLYPGTTYSFTIKASTAKGFGPPVTTRIATKISAPSMPEYDTDTPLNETDTTITVMLKPAQSRGAPVSVYQLVVKEERLQKSRRAADIIECFSVPVSYRNASSLDSLHYFAAELKPANLPVTQPFTVGDNKTYNGYWNPPLSPLKSYSIYFQALSKANGETKINCVRLATKGASTQNSNTVEPEKQVDNTVKMAGVIAGLLMFIIILLGVMLTIKRRKLAKKQKETQSGAQREMGPVASADKPTTKLSASRNDEGFSSSSQDVNGFTDGSRGELSQPTLTIQTHPYRTCDPVEMSYPRDQFQPAIRVADLLQHITQMKRGQGYGFKEEYEALPEGQTASWDTAKEDENRNKNRYGNIISYDHSRVRLLVLDGDPHSDYINANYIDGYHRPRHYIATQGPMQETVKDFWRMIWQENSASIVMVTNLVEVGRHPAEHTVGNATLGRAASPGMVKCVRYWPDDTEVYGDIKVTLIETEPLAEYVIRTFTVQKKGYHEIRELRLFHFTSWPDHGVPCYATGLLGFVRQVKFLNPPEAGPIVVHCSAGAGRTGCFIAIDTMLDMAENEGVVDIFNCVRELRAQRVNLVQTEEQYVFVHDAILEACLCGNTAIPVCEFRSLYYNISRLDPQTNSSQIKDEFQTLNIVTPRVRPEDCSIGLLPRNHDKNRSMDVLPLDRCLPFLISVDGESSNYINAALMDSHKQPAAFVVTQHPLPNTVADFWRLVFDYNCSSVVMLNEMDTAQFCMQYWPEKTSGCYGPIQVEFVSADIDEDIIHRIFRICNMARPQDGYRIVQHLQYIGWPAYRDTPPSKRSLLKVVRRLEKWQEQYDGREGRTVVHCLNGGGRSGTFCAICSVCEMIQQQNIIDVFHIVKTLRNNKSNMVETLEQYKFVYEVALEYLSSF

SEQ ID NO: 9257 - protein, 1441 aa, Homo sapiens
MASLAALALSLLLRLQLPPLPGARAQSAAGGCSFDEHYSNCGYSVALGTNGFTWEQINTWEKPMLDQAVPTGSFMMVNSSGRASGQKAHLLLPTLKENDTHCIDFHYYFSSRDRSSPGALNVYVKVNGGPQGNPVWNVSGVVTEGWVKAELAISTFWPHFYQVIFESVSLKGHPGYIAVDEVRVLAHPCRKAPHFLRLQNVEVNVGQNATFQCIAGGKWSQHDKLWLQQWNGRDTALMVTRVVNHRRFSATVSVADTAQRSVSKYRCVIRSDGGSGVSNYAELIVKEPPTPIAPPELLAVGATYLWIKPNANSIIGDGPIILKEVEYRTTTGTWAETHIVDSPNYKLWHLDPDVEYEIRVLLTRPGEGGTGPPGPPLTTRTKCADPVHGPQNVEIVDIRARQLTLQWEPFGYAVTRCHSYNLTVQYQYVFNQQQYEAEEVIQTSSHYTLRGLRPFMTIRLRLLLSNPEGRMESEELVVQTEEDVPGAVPLESIQGGPFEEKIYIQWKPPNETNGVITLYEINYKAVGSLDPSADLSSQRGKVFKLRNETHHLFVGLYPGTTYSFTIKASTAKGFGPPVTTRIATKISAPSMPEYDTDTPLNETDTTITVMLKPAQSRGAPVSVYQLVVKEERLQKSRRAADIIECFSVPVSYRNASSLDSLHYFAAELKPANLPVTQPFTVGDNKTYNGYWNPPLSPLKSYSIYFQALSKANGETKINCVRLATKGASTQNSNTVEPEKQVDNTVKMAGVIAGLLMFIIILLGVMLTIKRRRNAYSYSYYLKLAKKQKETQSGAQREMGPVASADKPTTKLSASRNDEGFSSSSQDVNGFTDGSRGELSQPTLTIQTHPYRTCDPVEMSYPRDQFQPAIRVADLLQHITQMKRGQGYGFKEEYEALPEGQTASWDTAKEDENRNKNRYGNIISYDHSRVRLLVLDGDPHSDYINANYIDGYHRPRHYIATQGPMQETVKDFWRMIWQENSASIVMVTNLVEVGRVKCVRYWPDDTEVYGDIKVTLIETEPLAEYVIRTFTVQKKGYHEIRELRLFHFTSWPDHGVPCYATGLLGFVRQVKFLNPPEAGPIVVHCSAGAGRTGCFIAIDTMLDMAENEGVVDIFNCVRELRAQRVNLVQTEEQYVFVHDAILEACLCGNTAIPVCEFRSLYYNISRLDPQTNSSQIKDEFQTLNIVTPRVRPEDCSIGLLPRNHDKNRSMDVLPLDRCLPFLISVDGESSNYINAALMDSHKQPAAFVVTQHPLPNTVADFWRLVFDYNCSSVVMLNEMDTAQFCMQYWPEKTSGCYGPIQVEFVSADIDEDIIHRIFRICNMARPQDGYRIVQHLQYIGWPAYRDTPPSKRSLLKVVRRLEKWQEQYDGREGRTVVHCLNGGGRSGTFCAICSVCEMIQQQNIIDVFHIVKTLRNNKSNMVETLEQYKFVYEVALEYLSSF

SEQ ID NO: 9258 - protein, 385 aa, Homo sapiens
MAARPLSRMLRRLLRSSARSCSSGAPVTQPCPGESARAASEEVSRRRQFLREHAAPFSAFLTDSFGRQHSYLRISLTEKCNLRCQYCMPEEGVPLTPKANLLTTEEILTLARLFVKEGIDKIRLTGGEPLIRPDVVDIVAQLQRLEGLRTIGVTTNGINLARLLPQLQKAGLSAINISLDTLVPAKFEFIVRRKGFHKVMEGIHKAIELGYNPVKVNCVVMRGLNEDELLDFAALTEGLPLDVRFIEYMPFDGNKWNFKKMVSYKEMLDTVRQQWPELEKVPEEESSTAKAFKIPGFQGQISFITSMSEHFCGTCNRLRITADGNLKVCLFGNSEVSLRDHLRAGASEQELLRIIGAAVGRKKRQHAGMFSISQMKNRPMILIGG

SEQ ID NO: 9259 - protein, 475 aa, Homo sapiens
MAVVSEDDFQHSSNSTYRTTSSSLRADQEALLEKLLDRPPPGLQRPEDRFCGTYIIFFSLGIGSLLPWNFFITAKEYWMFKLRNSSSPATGEDPEGSDILNYFESYLAVASTVPSMLCLVANFLLVNRVAVHIRVLASLTVILAIFMVITALVKVDTSSWTRGFFAVTIVCMVILSGASTVFSSSIYGMTGSFPMRNSQALISGGAMGGTVSAVASLVDLAASSDVRNSALAFFLTATVFLVLCMGLYLLLSRLEYARYYMRPVLAAHVFSGEEELPQDSLSAPSVASRFIDSHTPPLRPILKKTASLGFCVTYVFFITSLIYPAICTNIESLNKGSGSLWTTKFFIPLTTFLLYNFADLCGRQLTAWIQVPGPNSKALPGFVLLRTCLIPLFVLCNYQPRVHLKTVVFQSDVYPALLSSLLGLSNGYLSTLALLYGPKIVPRELAEATGVVMSFYVCLGLTLGSACSTLLVHLI

SEQ ID NO: 9260 - protein, 1440 aa, Homo sapiens
MASLAALALSLLLRLQLPPLPGARAQSAAGGCSFDEHYSNCGYSVALGTNGFTWEQINTWEKPMLDQAVPTGSFMMVNSSGRASGQKAHLLLPTLKENDTHCIDFHYYFSSRDRSSPGALNVYVKVNGGPQGNPVWNVSGVVTEGWVKAELAISTFWPHFYQVIFESVSLKGHPGYIAVDEVRVLAHPCRKAPHFLRLQNVEVNVGQNATFQCIAGGKWSQHDKLWLQQWNGRDTALMVTRVVNHRRFSATVSVADTAQRSVSKYRCVIRSDGGSGVSNYAELIVKEPPTPIAPPELLAVGATYLWIKPNANSIIGDGPIILKEVEYRTTTGTWAETHIVDSPNYKLWHLDPDVEYEIRVLLTRPGEGGTGPPGPPLTTRTKCADPVHGPQNVEIVDIRARQLTLQWEPFGYAVTRCHSYNLTVQYQYVFNQQQYEAEEVIQTSSHYTLRGLRPFMTIRLRLLLSNPEGRMESEELVVQTEEDVPGAVPLESIQGGPFEEKIYIQWKPPNETNGVITLYEINYKAVGSLDPSADLSSQRGKVFKLRNETHHLFVGLYPGTTYSFTIKASTAKGFGPPVTTRIATKISAPSMPEYDTDTPLNETDTTITVMLKPAQSRGAPVSVYQLVVKEERLQKSRRAADIIECFSVPVSYRNASSLDSLHYFAAELKPANLPVTQPFTVGDNKTYNGYWNPPLSPLKSYSIYFQALSKANGETKINCVRLATKGASTQNSNTVEPEKQVDNTVKMAGVIAGLLMFIIILLGVMLTIKRRRNAYSYSYYLKLAKKQKETQSGAQREMGPVASADKPTTKLSASRNDEGFSSSSQDVNGFNGSRGELSQPTLTIQTHPYRTCDPVEMSYPRDQFQPAIRVADLLQHITQMKRGQGYGFKEEYEALPEGQTASWDTAKEDENRNKNRYGNIISYDHSRVRLLVLDGDPHSDYINANYIDGYHRPRHYIATQGPMQETVKDFWRMIWQENSASIVMVTNLVEVGRVKCVRYWPDDTEVYGDIKVTLIETEPLAEYVIRTFTVQKKGYHEIRELRLFHFTSWPDHGVPCYATGLLGFVRQVKFLNPPEAGPIVVHCSAGAGRTGCFIAIDTMLDMAENEGVVDIFNCVRELRAQRVNLVQTEEQYVFVHDAILEACLCGNTAIPVCEFRSLYYNISRLDPQTNSSQIKDEFQTLNIVTPRVRPEDCSIGLLPRNHDKNRSMDVLPLDRCLPFLISVDGESSNYINAALMDSHKQPAAFVVTQHPLPNTVADFWRLVFDYNCSSVVMLNEMDTAQFCMQYWPEKTSGCYGPIQVEFVSADIDEDIIHRIFRICNMARPQDGYRIVQHLQYIGWPAYRDTPPSKRSLLKVVRRLEKWQEQYDGREGRTVVHCLNGGGRSGTFCAICSVCEMIQQQNIIDVFHIVKTLRNNKSNMVETLEQYKFVYEVALEYLSSF

SEQ ID NO: 9261 - protein, 860 aa, Homo sapiens
MEIGSAGPAGAQPLLMVPRRPGYGTMGKPIKLLANCFQVEIPKIDVYLYEVDIKPDKCPRRVNREVVDSMVQHFKVTIFGDRRPVYDGKRSLYTANPLPVATTGVDLDVTLPGEGGKDRPFKVSIKFVSRVSWHLLHEVLTGRTLPEPLELDKPISTNPVHAVDVVLRHLPSMKYTPVGRSFFSAPEGYDHPLGGGREVWFGFHQSVRPAMWKMMLNIDVSATAFYKAQPVIQFMCEVLDIHNIDEQPRPLTDSHRVKFTKEIKGLKVEVTHCGTMRRKYRVCNVTRRPASHQTFPLQLENGQTVERTVAQYFREKYTLQLKYPHLPCLQVGQEQKHTYLPLEVCNIVAGQRCIKKLTDNQTSTMIKATARSAPDRQEEISRLVRSANYETDPFVQEFQFKVRDEMAHVTGRVLPAPMLQYGGRNRTVATPSHGVWDMRGKQFHTGVEIKMWAIACFATQRQCREEILKGFTDQLRKISKDAGMPIQGQPCFCKYAQGADSVEPMFRHLKNTYSGLQLIIVILPGKTPVYAEVKRVGDTLLGMATQCVQVKNVIKTSPQTLSNLCLKINVKLGGINNILVPHQRPSVFQQPVIFLGADVTHPPAGDGKKPSIAAVVGSMDAHPSRYCATVRVQRPRQEIIQDLASMVRELLIQFYKSTRFKPTRIIFYRDGVSEGQFRQVLYYELLAIREACISLEKDYQPGITYIVVQKRHHTRLFCADRTERVGRSGNIPAGTTVDTDITHPYEFDFYLCSHAGIQGTSRPSHYHVLWDDNCFTADELQLLTYQLCHTYVRCTRSVSIPAPAYYAHLVAFRARYHLVDKEHDSAEGSHVSGQSNGRDPQALAKAVQIHQDTLRTMYFA

SEQ ID NO: 9262 - protein, 934 aa, Homo sapiens
MGARSGARGALLLALLLCWDPRLSQAGTDSGSEVLPDSFPSAPAEPLPYFLQEPQDAYIVKNKPVELRCRAFPATQIYFKCNGEWVSQNDHVTQEGLDEATGLRVREVQIEVSRQQVEELFGLEDYWCQCVAWSSAGTTKSRRAYVRIAYLRKNFDQEPLGKEVPLDHEVLLQCRPPEGVPVAEVEWLKNEDVIDPTQDTNFLLTIDHNLIIRQARLSDTANYTCVAKNIVAKRRSTTATVIVYVNGGWSSWAEWSPCSNRCGRGWQKRTRTCTNPAPLNGGAFCEGQAFQKTACTTICPVDGAWTEWSKWSACSTECAHWRSRECMAPPPQNGGRDCSGTLLDSKNCTDGLCMQMLEASGDAALYAGLVVAIFVVVAILMAVGVVVYRRNCRDFDTDITDSSAALTGGFHPVNFKTARPSNPQLLHPSVPPDLTASAGIYRGPVYALQDSTDKIPMTNSPLLDPLPSLKVKVYSSSTTGSGPGLADGADLLGVLPPGTYPSDFARDTHFLHLRSASLGSQQLLGLPRDPGSSVSGTFGCLGGRLSIPGTGVSLLVPNGAIPQGKFYEMYLLINKAESTLPLSEGTQTVLSPSVTCGPTGLLLCRPVILTMPHCAEVSARDWIFQLKTQAHQGHWEEVVTLDEETLNTPCYCQLEPRACHILLDQLGTYVFTGESYSRSAVKRLQLAVFAPALCTSLEYSLRVYCLEDTPVALKEVLELERTLGGYLVEEPKPLMFKDSYHNLRLSLHDLPHAHWRSKLLAKYQEIPFYHIWSGSQKALHCTFTLERHSLASTELTCKICVRQVEGEGQIFQLHTTLAETPAGSLDTLCSAPGSTVTTQLGPYAFKIPLSIRQKICNSLDAPNSRGNDWRMLAQKLSMDRYLNYFATKASPTGVILDLWEALQQDDGDLNSLASALEEMGKSEMLVAVATDGDC

SEQ ID NO: 9263 - protein, 1463 aa, Homo sapiens
MASLAALALSLLLRLQLPPLPGARAQSAAGGCSFDEHYSNCGYSVALGTNGFTWEQINTWEKPMLDQAVPTGSFMMVNSSGRASGQKAHLLLPTLKENDTHCIDFHYYFSSRDRSSPGALNVYVKVNGGPQGNPVWNVSGVVTEGWVKAELAISTFWPHFYQVIFESVSLKGHPGYIAVDEVRVLAHPCRKAPHFLRLQNVEVNVGQNATFQCIAGGKWSQHDKLWLQQWNGRDTALMVTRVVNHRRFSATVSVADTAQRSVSKYRCVIRSDGGSGVSNYAELIVKEPPTPIAPPELLAVGATYLWIKPNANSIIGDGPIILKEVEYRTTTGTWAETHIVDSPNYKLWHLDPDVEYEIRVLLTRPGEGGTGPPGPPLTTRTKCADPVHGPQNVEIVDIRARQLTLQWEPFGYAVTRCHSYNLTVQYQYVFNQQQYEAEEVIQTSSHYTLRGLRPFMTIRLRLLLSNPEGRMESEELVVQTEEDVPGAVPLESIQGGPFEEKIYIQWKPPNETNGVITLYEINYKAVGSLDPSADLSSQRGKVFKLRNETHHLFVGLYPGTTYSFTIKASTAKGFGPPVTTRIATKISAPSMPEYDTDTPLNETDTTITVMLKPAQSRGAPVSVYQLVVKEERLQKSRRAADIIECFSVPVSYRNASSLDSLHYFAAELKPANLPVTQPFTVGDNKTYNGYWNPPLSPLKSYSIYFQALSKANGETKINCVRLATKAPMGSAQVTPGTPLCLLTTGASTQNSNTVEPEKQVDNTVKMAGVIAGLLMFIIILLGVMLTIKRRRNAYSYSYYLSQRKLAKKQKETQSGAQREMGPVASADKPTTKLSASRNDEGFSSSSQDVNGFTDGSRGELSQPTLTIQTHPYRTCDPVEMSYPRDQFQPAIRVADLLQHITQMKRGQGYGFKEEYEALPEGQTASWDTAKEDENRNKNRYGNIISYDHSRVRLLVLDGDPHSDYINANYIDGYHRPRHYIATQGPMQETVKDFWRMIWQENSASIVMVTNLVEVGRVKCVRYWPDDTEVYGDIKVTLIETEPLAEYVIRTFTVQKKGYHEIRELRLFHFTSWPDHGVPCYATGLLGFVRQVKFLNPPEAGPIVVHCSAGAGRTGCFIAIDTMLDMAENEGVVDIFNCVRELRAQRVNLVQTEEQYVFVHDAILEACLCGNTAIPVCEFRSLYYNISRLDPQTNSSQIKDEFQTLNIVTPRVRPEDCSIGLLPRNHDKNRSMDVLPLDRCLPFLISVDGESSNYINAALMDSHKQPAAFVVTQHPLPNTVADFWRLVFDYNCSSVVMLNEMDTAQFCMQYWPEKTSGCYGPIQVEFVSADIDEDIIHRIFRICNMARPQDGYRIVQHLQYIGWPAYRDTPPSKRSLLKVVRRLEKWQEQYDGREGRTVVHCLNGGGRSGTFCAICSVCEMIQQQNIIDVFHIVKTLRNNKSNMVETLEQYKFVYEVALEYLSSF

SEQ ID NO: 9264 - protein, 1460 aa, Homo sapiens
MASLAALALSLLLRLQLPPLPGARAQSAAGGCSFDEHYSNCGYSVALGTNGFTWEQINTWEKPMLDQAVPTGSFMMVNSSGRASGQKAHLLLPTLKENDTHCIDFHYYFSSRDRSSPGALNVYVKVNGGPQGNPVWNVSGVVTEGWVKAELAISTFWPHFYQVIFESVSLKGHPGYIAVDEVRVLAHPCRKAPHFLRLQNVEVNVGQNATFQCIAGGKWSQHDKLWLQQWNGRDTALMVTRVVNHRRFSATVSVADTAQRSVSKYRCVIRSDGGSGVSNYAELIVKEPPTPIAPPELLAVGATYLWIKPNANSIIGDGPIILKEVEYRTTTGTWAETHIVDSPNYKLWHLDPDVEYEIRVLLTRPGEGGTGPPGPPLTTRTKCADPVHGPQNVEIVDIRARQLTLQWEPFGYAVTRCHSYNLTVQYQYVFNQQQYEAEEVIQTSSHYTLRGLRPFMTIRLRLLLSNPEGRMESEELVVQTEEDVPGAVPLESIQGGPFEEKIYIQWKPPNETNGVITLYEINYKAVGSLDPSADLSSQRGKVFKLRNETHHLFVGLYPGTTYSFTIKASTAKGFGPPVTTRIATKISAPSMPEYDTDTPLNETDTTITVMLKPAQSRGAPVSVYQLVVKEERLQKSRRAADIIECFSVPVSYRNASSLDSLHYFAAELKPANLPVTQPFTVGDNKTYNGYWNPPLSPLKSYSIYFQALSKANGETKINCVRLATKAPMGSAQVTPGTPLCLLTTGASTQNSNTVEPEKQVDNTVKMAGVIAGLLMFIIILLGVMLTIKRRRNAYSYSYYLKLAKKQKETQSGAQREMGPVASADKPTTKLSASRNDEGFSSSSQDVNGFTDGSRGELSQPTLTIQTHPYRTCDPVEMSYPRDQFQPAIRVADLLQHITQMKRGQGYGFKEEYEALPEGQTASWDTAKEDENRNKNRYGNIISYDHSRVRLLVLDGDPHSDYINANYIDGYHRPRHYIATQGPMQETVKDFWRMIWQENSASIVMVTNLVEVGRVKCVRYWPDDTEVYGDIKVTLIETEPLAEYVIRTFTVQKKGYHEIRELRLFHFTSWPDHGVPCYATGLLGFVRQVKFLNPPEAGPIVVHCSAGAGRTGCFIAIDTMLDMAENEGVVDIFNCVRELRAQRVNLVQTEEQYVFVHDAILEACLCGNTAIPVCEFRSLYYNISRLDPQTNSSQIKDEFQTLNIVTPRVRPEDCSIGLLPRNHDKNRSMDVLPLDRCLPFLISVDGESSNYINAALMDSHKQPAAFVVTQHPLPNTVADFWRLVFDYNCSSVVMLNEMDTAQFCMQYWPEKTSGCYGPIQVEFVSADIDEDIIHRIFRICNMARPQDGYRIVQHLQYIGWPAYRDTPPSKRSLLKVVRRLEKWQEQYDGREGRTVVHCLNGGGRSGTFCAICSVCEMIQQQNIIDVFHIVKTLRNNKSNMVETLEQYKFVYEVALEYLSSF

SEQ ID NO: 9265 - protein, 1431 aa, Homo sapiens
MASLAALALSLLLRLQLPPLPGARAQSAAGGCSFDEHYSNCGYSVALGTNGFTWEQINTWEKPMLDQAVPTGSFMMVNSSGRASGQKAHLLLPTLKENDTHCIDFHYYFSSRDRSSPGALNVYVKVNGGPQGNPVWNVSGVVTEGWVKAELAISTFWPHFYQVIFESVSLKGHPGYIAVDEVRVLAHPCRKAPHFLRLQNVEVNVGQNATFQCIAGGKWSQHDKLWLQQWNGRDTALMVTRVVNHRRFSATVSVADTAQRSVSKYRCVIRSDGGSGVSNYAELIVKEPPTPIAPPELLAVGATYLWIKPNANSIIGDGPIILKEVEYRTTTGTWAETHIVDSPNYKLWHLDPDVEYEIRVLLTRPGEGGTGPPGPPLTTRTKCADPVHGPQNVEIVDIRARQLTLQWEPFGYAVTRCHSYNLTVQYQYVFNQQQYEAEEVIQTSSHYTLRGLRPFMTIRLRLLLSNPEGRMESEELVVQTEEDVPGAVPLESIQGGPFEEKIYIQWKPPNETNGVITLYEINYKAVGSLDPSADLSSQRGKVFKLRNETHHLFVGLYPGTTYSFTIKASTAKGFGPPVTTRIATKISAPSMPEYDTDTPLNETDTTITVMLKPAQSRGAPVSVYQLVVKEERLQKSRRAADIIECFSVPVSYRNASSLDSLHYFAAELKPANLPVTQPFTVGDNKTYNGYWNPPLSPLKSYSIYFQALSKANGETKINCVRLATKGASTQNSNTVEPEKQVDNTVKMAGVIAGLLMFIIILLGVMLTIKRRKLAKKQKETQSGAQREMGPVASADKPTTKLSASRNDEGFSSSSQDVNGFTDGSRGELSQPTLTIQTHPYRTCDPVEMSYPRDQFQPAIRVADLLQHITQMKRGQGYGFKEEYEALPEGQTASWDTAKEDENRNKNRYGNIISYDHSRVRLLVLDGDPHSDYINANYIDGYHRPRHYIATQGPMQETVKDFWRMIWQENSASIVMVTNLVEVGRVKCVRYWPDDTEVYGDIKVTLIETEPLAEYVIRTFTVQKKGYHEIRELRLFHFTSWPDHGVPCYATGLLGFVRQVKFLNPPEAGPIVVHCSAGAGRTGCFIAIDTMLDMAENEGVVDIFNCVRELRAQRVNLVQTEEQYVFVHDAILEACLCGNTAIPVCEFRSLYYNISRLDPQTNSSQIKDEFQTLNIVTPRVRPEDCSIGLLPRNHDKNRSMDVLPLDRCLPFLISVDGESSNYINAALMDSHKQPAAFVVTQHPLPNTVADFWRLVFDYNCSSVVMLNEMDTAQFCMQYWPEKTSGCYGPIQVEFVSADIDEDIIHRIFRICNMARPQDGYRIVQHLQYIGWPAYRDTPPSKRSLLKVVRRLEKWQEQYDGREGRTVVHCLNGGGRSGTFCAICSVCEMIQQQNIIDVFHIVKTLRNNKSNMVETLEQYKFVYEVALEYLSSF

SEQ ID NO: 9266 - protein, 568 aa, Homo sapiens
MPSTDLLMLKAFEPYLEILEVYSTKAKNYVNGHCTKYEPWQLIAWSVVWTLLIVWGYEFVFQPESLWSRFKKKCFKLTRKMPIIGRKIQDKLNKTKDDISKNMSFLKVDKEYVKALPSQGLSSSAVLEKLKEYSSMDAFWQEGRASGTVYSGEEKLTELLVKAYGDFAWSNPLHPDIFPGLRKIEAEIVRIACSLFNGGPDSCGCVTSGGTESILMACKAYRDLAFEKGIKTPEIVAPQSAHAAFNKAASYFGMKIVRVPLTKMMEVDVRAMRRAISRNTAMLVCSTPQFPHGVIDPVPEVAKLAVKYKIPLHVDACLGGFLIVFMEKAGYPLEHPFDFRVKGVTSISADTHKYGYAPKGSSLVLYSDKKYRNYQFFVDTDWQGGIYASPTIAGSRPGGISAACWAALMHFGENGYVEATKQIIKTARFLKSELENIKGIFVFGNPQLSVIALGSRDFDIYRLSNLMTAKGWNLNQLQFPPSIHFCITLLHARKRVAIQFLKDIRESVTQIMKNPKAKTTGMGAIYGMAQTTVDRNMVAELSSVFLDSLYSTDTVTQGSQMNGSPKPH

SEQ ID NO: 9267 - protein, 658 aa, Homo sapiens
MDRGTLPLAVALLLASCSLSPTSLAETVHCDLQPVGPERGEVTYTTSQVSKGCVAQAPNAILEVHVLFLEFPTGPSQLELTLQASKQNGTWPREVLLVLSVNSSVFLHLQALGIPLHLAYNSSLVTFQEPPGVNTTELPSFPKTQILEWAAERGPITSAAELNDPQSILLRLGQAQGSLSFCMLEASQDMGRTLEWRPRTPALVRGCHLEGVAGHKEAHILRVLPGHSAGPRTVTVKVELSCAPGDLDAVLILQGPPYVSWLIDANHNMQIWTTGEYSFKIFPEKNIRGFKLPDTPQGLLGEARMLNASIVASFVELPLASIVSLHASSCGGRLQTSPAPIQTTPPKDTCSPELLMSLIQTKCADDAMTLVLKKELVAHLKCTITGLTFWDPSCEAEDRGDKFVLRSAYSSCGMQVSASMISNEAVVNILSSSSPQRKKVHCLNMDSLSFQLGLYLSPHFLQASNTIEPGQQSFVQVRVSPSVSEFLLQLDSCHLDLGPEGGTVELIQGRAAKGNCVSLLSPSPEGDPRFSFLLHFYTVPIPKTGTLSCTVALRPKTGSQDQEVHRTVFMRLNIISPDLSGCTSKGLVLPAVLGITFGAFLIGALLTAALWYIYSHTRSPSKREPVVAVAAPASSESSSTNHSIGSTQSTPCSTSSMA

SEQ ID NO: 9268 - protein, 857 aa, Homo sapiens
MEAGPSGAAAGAYLPPLQQVFQAPRRPGIGTVGKPIKLLANYFEVDIPKIDVYHYEVDIKPDKCPRRVNREVVEYMVQHFKPQIFGDRKPVYDGKKNIYTVTALPIGNERVDFEVTIPGEGKDRIFKVSIKWLAIVSWRMLHEALVSGQIPVPLESVQALDVAMRHLASMRYTPVGRSFFSPPEGYYHPLGGGREVWFGFHQSVRPAMWKMMLNIDVSATAFYKAQPVIEFMCEVLDIRNIDEQPKPLTDSQRVRFTKEIKGLKVEVTHCGQMKRKYRVCNVTRRPASHQTFPLQLESGQTVECTVAQYFKQKYNLQLKYPHLPCLQVGQEQKHTYLPLEVCNIVAGQRCIKKLTDNQTSTMIKATARSAPDRQEEISRLMKNASYNLDPYIQEFGIKVKDDMTEVTGRVLPAPILQYGGRNRAIATPNQGVWDMRGKQFYNGIEIKVWAIACFAPQKQCREEVLKNFTDQLRKISKDAGMPIQGQPCFCKYAQGADSVEPMFRHLKNTYSGLQLIIVILPGKTPVYAEVKRVGDTLLGMATQCVQVKNVVKTSPQTLSNLCLKINVKLGGINNILVPHQRSAVFQQPVIFLGADVTHPPAGDGKKPSITAVVGSMDAHPSRYCATVRVQRPRQEIIEDLSYMVRELLIQFYKSTRFKPTRIIFYRDGVPEGQLPQILHYELLAIRDACIKLEKDYQPGITYIVVQKRHHTRLFCADKNERIGKSGNIPAGTTVDTNITHPFEFDFYLCSHAGIQGTSRPSHYYVLWDDNRFTADELQILTYQLCHTYVRCTRSVSIPAPAYYARLVAFRARYHLVDKEHDSGEGSHISGQSNGRDPQALAKAVQVHQDTLRTMYFA

SEQ ID NO: 9269 - protein, 1223 aa, Homo sapiens
MAPLRALLSYLLPLHCALCAAAGSRTPELHLSGKLSDYGVTVPCSTDFRGRFLSHVVSGPAAASAGSMVVDTPPTLPRHSSHLRVARSPLHPGGTLWPGRVGRHSLYFNVTVFGKELHLRLRPNRRLVVPGSSVEWQEDFRELFRQPLRQECVYTGGVTGMPGAAVAISNCDGLAGLIRTDSTDFFIEPLERGQQEKEASGRTHVVYRREAVQQEWAEPDGDLHNEAFGLGDLPNLLGLVGDQLGDTERKRRHAKPGSYSIEVLLVVDDSVVRFHGKEHVQNYVLTLMNIVDEIYHDESLGVHINIALVRLIMVGYRQSLSLIERGNPSRSLEQVCRWAHSQQRQDPSHAEHHDHVVFLTRQDFGPSGYAPVTGMCHPLRSCALNHEDGFSSAFVIAHETGHVLGMEHDGQGNGCADETSLGSVMAPLVQAAFHRFHWSRCSKLELSRYLPSYDCLLDDPFDPAWPQPPELPGINYSMDEQCRFDFGSGYQTCLAFRTFEPCKQLWCSHPDNPYFCKTKKGPPLDGTECAPGKWCFKGHCIWKSPEQTYGQDGGWSSWTKFGSCSRSCGGGVRSRSRSCNNPSPAYGGRLCLGPMFEYQVCNSEECPGTYEDFRAQQCAKRNSYYVHQNAKHSWVPYEPDDDAQKCELICQSADTGDVVFMNQVVHDGTRCSYRDPYSVCARGECVPVGCDKEVGSMKADDKCGVCGGDNSHCRTVKGTLGKASKQAGALKLVQIPAGARHIQIEALEKSPHRIVVKNQVTGSFILNPKGKEATSRTFTAMGLEWEDAVEDAKESLKTSGPLPEAIAILALPPTEGGPRSSLAYKYVIHEDLLPLIGSNNVLLEEMDTYEWALKSWAPCSKACGGGIQFTKYGCRRRRDHHMVQRHLCDHKKRPKPIRRRCNQHPCSQPVWVTEEWGACSRSCGKLGVQTRGIQCLLPLSNGTHKVMPAKACAGDRPEARRPCLRVPCPAQWRLGAWSQCSATCGEGIQQRQVVCRTNANSLGHCEGDRPDTVQVCSLPACGGNHQNSTVRADVWELGTPEGQWVPQSEPLHPINKISSTEPCTGDRSVFCQMEVLDRYCSIPGYHRLCCVSCIKKASGPNPGPDPGPTSLPPFSTPGSPLPGPQDPADAAEPPGKPTGSEDHQHGRATQLPGALDTSSPGTQHPFAPETPIPGASWSISPTTPGGLPWGWTQTPTPVPEDKGQPGEDLRHPGTSLPAASPVT

SEQ ID NO: 9270 - protein, 1226 aa, Homo sapiens
MAPLRALLSYLLPLHCALCAAAGSRTPELHLSGKLSDYGVTVPCSTDFRGRFLSHVVSGPAAASAGSMVVDTPPTLPRHSSHLRVARSPLHPGGTLWPGRVGRHSLYFNVTVFGKELHLRLRPNRRLVVPGSSVEWQEDFRELFRQPLRQECVYTGGVTGMPGAAVAISNCDGLAGLIRTDSTDFFIEPLERGQQEKEASGRTHVVYRREAVQQEWAEPDGDLHNEAFGLGDLPNLLGLVGDQLGDTERKRRHAKPGSYSIEVLLVVDDSVVRFHGKEHVQNYVLTLMNIVDEIYHDESLGVHINIALVRLIMVGYRQSLSLIERGNPSRSLEQVCRWAHSQQRQDPSHAEHHDHVVFLTRQDFGPSGMQGYAPVTGMCHPLRSCALNHEDGFSSAFVIAHETGHVLGMEHDGQGNGCADETSLGSVMAPLVQAAFHRFHWSRCSKLELSRYLPSYDCLLDDPFDPAWPQPPELPGINYSMDEQCRFDFGSGYQTCLAFRTFEPCKQLWCSHPDNPYFCKTKKGPPLDGTECAPGKWCFKGHCIWKSPEQTYGQDGGWSSWTKFGSCSRSCGGGVRSRSRSCNNPSPAYGGRLCLGPMFEYQVCNSEECPGTYEDFRAQQCAKRNSYYVHQNAKHSWVPYEPDDDAQKCELICQSADTGDVVFMNQVVHDGTRCSYRDPYSVCARGECVPVGCDKEVGSMKADDKCGVCGGDNSHCRTVKGTLGKASKQAGALKLVQIPAGARHIQIEALEKSPHRIVVKNQVTGSFILNPKGKEATSRTFTAMGLEWEDAVEDAKESLKTSGPLPEAIAILALPPTEGGPRSSLAYKYVIHEDLLPLIGSNNVLLEEMDTYEWALKSWAPCSKACGGGIQFTKYGCRRRRDHHMVQRHLCDHKKRPKPIRRRCNQHPCSQPVWVTEEWGACSRSCGKLGVQTRGIQCLLPLSNGTHKVMPAKACAGDRPEARRPCLRVPCPAQWRLGAWSQCSATCGEGIQQRQVVCRTNANSLGHCEGDRPDTVQVCSLPACGGNHQNSTVRADVWELGTPEGQWVPQSEPLHPINKISSTEPCTGDRSVFCQMEVLDRYCSIPGYHRLCCVSCIKKASGPNPGPDPGPTSLPPFSTPGSPLPGPQDPADAAEPPGKPTGSEDHQHGRATQLPGALDTSSPGTQHPFAPETPIPGASWSISPTTPGGLPWGWTQTPTPVPEDKGQPGEDLRHPGTSLPAASPVT

SEQ ID NO: 9271 - protein, 555 aa, Homo sapiens
MAARLLLLGILLLLLPLPVPAPCHTAARSECKRSHKFVPGAWLAGEGVDVTSLRRSGSFPVDTQRFLRPDGTCTLCENALQEGTLQRLPLALTNWRAQGSGCQRHVTRAKVSSTEAVARDAARSIRNDWKVGLDVTPKPTSNVHVSVAGSHSQAANFAAQKTHQDQYSFSTDTVECRFYSFHVVHTPPLHPDFKRALGDLPHHFNASTQPAYLRLISNYGTHFIRAVELGGRISALTALRTCELALEGLTDNEVEDCLTVEAQVNIGIHGSISAEAKACEEKKKKHKMTASFHQTYRERHSEVVGGHHTSINDLLFGIQAGPEQYSAWVNSLPGSPGLVDYTLEPLHVLLDSQDPRREALRRALSQYLTDRARWRDCSRPCPPGRQKSPRDPCQCVCHGSAVTTQDCCPRQRGLAQLEVTFIQAWGLWGDWFTATDAYVKLFFGGQELRTSTVWDNNNPIWSVRLDFGDVLLATGGPLRLQVWDQDSGRDDDLLGTCDQAPKSGSHEVRCNLNHGHLKFRYHARCLPHLGGGTCLDYVPQMLLGEPPGNRSGAVW

SEQ ID NO: 9272 - protein, 861 aa, Homo sapiens
MEALGPGPPASLFQPPRRPGLGTVGKPIRLLANHFQVQIPKIDVYHYDVDIKPEKRPRRVNREVVDTMVRHFKMQIFGDRQPGYDGKRNMYTAHPLPIGRDRVDMEVTLPGEGKDQTFKVSVQWVSVVSLQLLLEALAGHLNEVPDDSVQALDVITRHLPSMRYTPVGRSFFSPPEGYYHPLGGGREVWFGFHQSVRPAMWNMMLNIDVSATAFYRAQPIIEFMCEVLDIQNINEQTKPLTDSQRVKFTKEIRGLKVEVTHCGQMKRKYRVCNVTRRPASHQTFPLQLENGQAMECTVAQYFKQKYSLQLKYPHLPCLQVGQEQKHTYLPLEVCNIVAGQRCIKKLTDNQTSTMIKATARSAPDRQEEISRLVKSNSMVGGPDPYLKEFGIVVHNEMTELTGRVLPAPMLQYGGRNKTVATPNQGVWDMRGKQFYAGIEIKVWAVACFAPQKQCREDLLKSFTDQLRKISKDAGMPIQGQPCFCKYAQGADSVEPMFKHLKMTYVGLQLIVVILPGKTPVYAEVKRVGDTLLGMATQCVQVKNVVKTSPQTLSNLCLKINAKLGGINNVLVPHQRPSVFQQPVIFLGADVTHPPAGDGKKPSIAAVVGSMDGHPSRYCATVRVQTSRQEISQELLYSQEVIQDLTNMVRELLIQFYKSTRFKPTRIIYYRGGVSEGQMKQVAWPELIAIRKACISLEEDYRPGITYIVVQKRHHTRLFCADKTERVGKSGNVPAGTTVDSTITHPSEFDFYLCSHAGIQGTSRPSHYQVLWDDNCFTADELQLLTYQLCHTYVRCTRSVSIPAPAYYARLVAFRARYHLVDKDHDSAEGSHVSGQSNGRDPQALAKAVQIHHDTQHTMYFA

SEQ ID NO: 9273 - protein, 114 aa, Homo sapiens
MVIRVYIASSSGSTAIKKKQQDVLGFLEANKIGFEEKDIAANEENRKWMRENVPENSRPATGYPLPPQIFNESQYRGDYDAFFEARENNAVYAFLGLTAPPGSKEAEVQAKQQA

SEQ ID NO: 9274 - protein, 120 aa, Homo sapiens
MSSSAGSGHQPSQSRAIPTRTVAISDAAQLPHDYCTTPGGTLFSTTPGGTRIIYDRKFLLDRRNSPMAQTPPCHLPNIPGVTSPGTLIEDSKVEVNNLNNLNNHDRKHAVGDDAQFEMDI

SEQ ID NO: 9275 - protein, 375 aa, Homo sapiens
MSRARSHLRAALFLAAASARGITTQVAARRGLSAWPVPQEPSMEYQDAVRMLNTLQTNAGYLEQVKRQRGDPQTQLEAMELYLARSGLQVEDLDRLNIIHVTGTKGKGSTCAFTECILRSYGLKTGFFSSPHLVQVRERIRINGQPISPELFTKYFWRLYHRLEETKDGSCVSMPPYFRFLTLMAFHVFLQEKVDLAVVEVGIGGAYDCTNIIRKPVVCGVSSLGIDHTSLLGDTVEKIAWQKGGIFKQGVPAFTVLQPEGPLAVLRDRAQQISVLGSQRHPGQGSCGSCPWHLCSSPHPTCGSGFGTRSGRAGRRCCGAGPSPGTWTVRTPPAARRPACAGSARRCRAARGRAVAPRFESCSSMLPGTGTRRPC

SEQ ID NO: 9276 - protein, 289 aa, Homo sapiens
MSGFSTEERAAPFSLEYRVFLKNEKGQYISPFHDIPIYADKDVFHMVVEVPRWSNAKMEIATKDPLNPIKQDVKKGKLRYVANLFPYKGYIWNYGAIPQTWEDPGHNDKHTGCCGDNDPIDVCEIGSKVCARGEIIGVKVLGILAMIDEGETDWKVIAINVDDPDAANYNDINDVKRLKPGYLEATVDWFRRYKVPDGKPENEFAFNAEFKDKDFAIDIIKSTHDHWKALVTKKTNGKGISCMNTTLSESPFKCDPDAARAIVDALPPPCESACTVPTDVDKWFHHQKN

SEQ ID NO: 9277 - protein, 2715 aa, Homo sapiens
MKMKIQKKEKQLSNLKVLNHSPMSDASVNFDYKSPSPFDCSTDQEEKIEDVASHCLPQKDLYTAEEEAATLFPRKMTSHNGMEDSGGGGTGVKKKRKKKEPGDQEGAAKGSKDREPKPKRKREPKEPKEPRKAKEPKKAKEHKEPKQKDGAKKARKPREASGTKEAKEKRSCTDSAARTKSRKASKEQGPTPVEKKKKGKRKSETTVESLELDQGLTNPSLRSPEESTESTDSQKRRSGRQVKRRKYNEDLDFKVVDDDGETIAVLGAGRTSALSASTLAWQAEEPPEDDANIIEKILASKTVQEVHPGEPPFDLELFYVKYRNFSYLHCKWATMEELEKDPRIAQKIKRFRNKQAQMKHIFTEPDEDLFNPDYVEVDRILEVAHTKDAETGEEVTHYLVKWCSLPYEESTWELEEDVDPAKVKEFESLQVLPEIKHVERPASDSWQKLEKSREYKNSNQLREYQLEGMNWLLFNWYNRKNCILADEMGLGKTIQSITFLSEIFLRGIHGPFLIIAPLSTITNWEREFRTWTEMNAIVYHGSQISRQMIQQYEMVYRDAQGNPLSGVFKFHVVITTFEMILADCPELKKIHWSCVIIDEAHRLKNRNCKLLEGLKLMALEHKVLLTGTPLQNSVEELFSLLNFLEPSQFPSETAFLEEFGDLKTEEQVKKLQSILKPMMLRRLKDDVEKNLAPKQETIIEVELTNIQKKYYRAILEKNFSFLTKGANQHNMPNLINTMMELRKCCNHPYLINGAEEKILEDFRKTHSPDAPDFQLQAMIQAAGKLVLIDKLLPKLIAGGHKVLIFSQMVRCLDILEDYLIQRRYTYERIDGRVRGNLRQAAIDRFCKPDSDRFVFLLCTRAGGLGINLTAADTCIIFDSDWNPQNDLQAQARCHRIGQSKAVKVYRLITRNSYEREMFDKASLKLGLDKAVLQDINRKGGTNGVQQLSKMEVEDLLRKGAYGALMDEEDEGSKFCEEDIDQILQRRTHTITIQSEGKGSTFAKASFVASGNRTDISLDDPNFWQKWAKIAELDTEAKNEKESLVIDRPRVRKQTKHYNSFEEDELMEFSELDSDSDERPTRSRRLNDKARRYLRAECFRVEKNLLIFGWGRWKDILTHGRFKWHLNEKDMEMICRALLVYCVKHYKGDEKIKSFIWELITPTKDGQAQTLQNHSGLSAPVPRGRKGKKTKNQLLIPELKDADWLATCNPEVVLHDDGYKKHLKQHCNKVLLRVRMLYYLKAEILGEAAEKAFEGSPARELDVPLPDIDYMEIPVDWWDAEADKSLLIGVFKHGYERYNAMRADPALCFLEKVGMPDEKSLSAEQGVTDGTSDIPERGNTDKEDNAEDKVDGLQKQTESSSDGGDGVFSEKKDDSRAAQDGSDPDKSPWPVSSALTARLRRLVTVYQRCNRKELCRPEILGPGNQGYWVQEEMFRRTSEMDLINKEAQKRWTRREQADFYRTVSSFGVVYDQEKKTFDWTQFRIISRLDKKSDESLEQYFYSFVAMCRNVCRLPTWKDGGPPDTTIYVEPITEERAARTLYRIELLRKVREQVLKCPQLHERLQLCRPSLYLPVWWECGKHDRDLLIGTAKHGLNRTDCYIMNDPQLSFLDAYRNYAQHKRSGTQAPGNLCCLYQTNSKLYESLTYSQMSRTSESLENEPENLVRVESRDDHLSLPDVTCENFISKVQDVISINHDESLLPESLESMMYGKKVLSQEPSSFQESPSTNTESRKDVITISISKDGNCQSGGPEAEIASGPTFMGSLEAGGVAQANIKNGKHLLMSISKEGELCCSEAGQRPENIGQLEAKCLASPSLNPGNESGFVDMCSLSVCDSKRNLSSDQQLIDLLENKSLESKLILSQNHSDEEEEEEENEEENLAMAVGMGERPEVLHLTEPTTNISREKNQGFQDETKKGSLEVANQTPGLQRAFPAPAACQCHCKHMERWMHGLENDEFEIEKPKAYIPDLFKSKTNTIAMEGEPTAIPSQPFKVKHELLKEPWKESAEGQNVFPTYPLEGSELKSEDMDFENKDDYDRDGNCHSQDYPGKYSEEESKSSTSGITGDIGDELQEARAPTIAQLLQEKTLYSFSEWPKDRVIINRLDNICHVVLKGKWPSSQQYEPSGTLPTPVLTSSAGSRTSLSEPEAAEHSFSNGAALAAQIHKESFLAPVFTKDEQKHRRPYEFEVERDAKARGLEQFSATHGHTPIILNGWHGESAMDLSCSSEGSPGATSPFPVSASTPKIGAISSLQGALGMDLSGILQAGLIHPVTGQIVNGSLRRDDAATRRRRGRRKHVEGGMDLIFLKEQTLQAGILEVHEDPGQATLSTTHPEGPGPATSAPEPATAASSQAEKSIPSKSLLDWLRQQADYSLEVPGFGANFSDKPKQRRPRCKEPGKLDVSSLSGEERVPAIPKEPGLRGFLPENKFNHTLAEPILRDTGPRRRGRRPRSELLKAPSIVADSPSGMGPLFMNGLIAGMDLVGLQNMRNMPGIPLTGLVGFPAGFATMPTGEEVKSTLSMLPMMLPGMAAVPQMFGVGGLLSPPMATTCTSTAPASLSSTTKSGTAVTEKTAEDKPSSHDVKTDTLAEDKPGPGPFSDQSEPAITTSSPVAFNPFLIPGVSPGLIYPSMFLSPGMGMALPAMQQARHSEIVGLESQKRKKKKTKGDNPNSHPEPAPSCEREPSGDENCAEPSAPLPAEREHGAQAGEGALKDSNNDTN

SEQ ID NO: 9278 - protein, 201 aa, Homo sapiens
MEYLIGIQGPDYVLVASDRVAASNIVQMKDDHDKMFKMSEKILLLCVGEAGDTVQFAEYIQKNVQLYKMRNGYELSPTAAANFTRRNLADCLRSRTPYHVNLLLAGYDEHEGPALYYMDYLAALAKAPFAAHGYGAFLTLSILDRYYTPTISRERAVELLRKCLEELQKRFILNLPTFSVRIIDKNGIHDLDNISFPKQGS

SEQ ID NO: 9279 - protein, 198 aa, Homo sapiens
MSFIFEWIYNGFSSVLQFLGLYKKSGKLVFLGLDNAGKTTLLHMLKDDRLGQHVPTLHPTSEELTIAGMTFTTFDLGGHEQARRVWKNYLPAINGIVFLVDCADHSRLVESKVELNALMTDETISNVPILILGNKIDRTDAISEEKLREIFGLYGQTTGKGNVTLKELNARPMEVFMCSVLKRQGYGEGFRWLSQYID

SEQ ID NO: 9280 - protein, 587 aa, Homo sapiens
MSRARSHLRAALFLAAASARGITTQVAARRGLSAWPVPQEPSMEYQDAVRMLNTLQTNAGYLEQVKRQRGDPQTQLEAMELYLARSGLQVEDLDRLNIIHVTGTKGKGSTCAFTECILRSYGLKTGFFSSPHLVQVRERIRINGQPISPELFTKYFWRLYHRLEETKDGSCVSMPPYFRFLTLMAFHVFLQEKVDLAVVEVGIGGAYDCTNIIRKPVVCGVSSLGIDHTSLLGDTVEKIAWQKGGIFKQGVPAFTVLQPEGPLAVLRDRAQQISCPLYLCPMLEALEEGGPPLTLGLEGEHQRSNAALALQLAHCWLQRQDRHGAGEPKASRPGLLWQLPLAPVFQPTSHMRLGLRNTEWPGRTQVLRRGPLTWYLDGAHTASSAQACVRWFRQALQGRERPSGGPEVRVLLFNATGDRDPAALLKLLQPCQFDYAVFCPNLTEVSSTGNADQQNFTVTLDQVLLRCLEHQQHWNHLDEEQASPDLWSAPSPEPGGSASLLLAPHPPHTCSASSLVFSCISHALQWISQGRDPIFQPPSPPKGLLTHPVAHSGASILREAAAIHVLVTGSLHLVGGVLKLLEPALSQ

SEQ ID NO: 9281 - protein, 712 aa, Homo sapiens
MASDCEPALNQAEGRNPTLERYLGALREAKNDSEQFAALLLVTKAVKAGDIDAKTRRRIFDAVGFTFPNRLLTTKEAPDGCPDHVLRALGVALLACFCSDPELAAHPQVLNKIPILSTFLTARGDPDDAARRSMIDDTYQCLTAVAGTPRGPRHLIAGGTVSALCQAYLGHGYGFDQALALLVGLLAAAETQCWKEAEPDLLAVLRGLSEDFQKAEDASKFELCQLLPLFLPPTTVPPECYRDLQAGLARILGSKLSSWQRNPALKLAARLAHACGSDWIPAGSSGSKFLALLVNLACVEVRLALEETGTEVKEDVVTACYALMELGIQECTRCEQSLLKEPQKVQLVSVMKEAIGAVIHYLLQVGSEKQKEPFVFASVRILGAWLAEETSSLRKEVCQLLPFLVRYAKTLYEEAEEANDLSQQVANLAISPTTPGPTWPGDALRLLLPGWCHLTVEDGPREILIKEGAPSLLCKYFLQQWELTSPGHDTSVLPDSVEIGLQTCCHIFLNLVVTAPGLIKRDACFTSLMNTLMTSLPALVQQQGRLLLAANVATLGLLMARLLSTSPALQGTPASRGFFAAAILFLSQSHVARATPGSDQAVLALSPEYEGIWADLQELWFLGMQAFTGCVPLLPWLAPAALRSRWPQELLQLLGSVSPNSVKPEMVAAYQGVLVELARANRLCREAMRLQAGEETASHYRMAALEQCLSEP

SEQ ID NO: 9282 - protein, 372 aa, Homo sapiens
MSGRSGKKKMSKLSRSARAGVIFPVGRLMRYLKKGTFKYRISVGAPVYMAAVIEYLAAEILELAGNAARDNKKARIAPRHILLAVANDEELNQLLKGVTIASGGVLPRIHPELLAKKRGTKGKSETILSPPPEKRGRKATSGKKGGKKSKAAKPRTSKKSKPKDSDKEGTSNSTSEDGPGDGFTILSSKSLVLGQKLSLTQSDISHIGSMRVEGIVHPTTAEIDLKEDIGKALEKAGGKEFLETVKELRKSQGPLEVAEAAVSQSSGLAAKFVIHCHIPQWGSDKCEEQLEETIKNCLSAAEDKKLKSVAFPPFPSGRNCFPKQTAAQVTLKAISAHFDDSSASSLKNVYFLLFDSESIGIYVQEMAKLDAK

SEQ ID NO: 9283 - protein, 463 aa, Homo sapiens
MAGAPGPLRLALLLLGMVGRAGPRPQGATVSLWETVQKWREYRRQCQRSLTEDPPPATDLFCNRTFDEYACWPDGEPGSFVNVSCPWYLPWASSVPQGHVYRFCTAEGLWLQKDNSSLPWRDLSECEESKRGERSSPEEQLLFLYIIYTVGYALSFSALVIASAILLGFRHLHCTRNYIHLNLFASFILRALSVFIKDAALKWMYSTAAQQHQWDGLLSYQDSLSCRLVFLLMQYCVAANYYWLLVEGVYLYTLLAFSVLSEQWIFRLYVSIGWGVPLLFVVPWGIVKYLYEDEGCWTRNSNMNYWLIIRLPILFAIGVNFLIFVRVICIVVSKLKANLMCKTDIKCRLAKSTLTLIPLLGTHEVIFAFVMDEHARGTLRFIKLFTELSFTSFQGLMVAILYCFVNNEVQLEFRKSWERWRLEHLHIQRDSSMKPLKCPTSSLSSGATAGSSMYTATCQASCS

SEQ ID NO: 9284 - protein, 372 aa, Homo sapiens
MAKQYDSVECPFCDEVSKYEKLAKIGQGTFGEVFKARHRKTGQKVALKKVLMENEKEGFPITALREIKILQLLKHENVVNLIEICRTKASPYNRCKGSIYLVFDFCEHDLAGLLSNVLVKFTLSEIKRVMQMLLNGLYYIHRNKILHRDMKAANVLITRDGVLKLADFGLARAFSLAKNSQPNRYTNRVVTLWYRPPELLLGERDYGPPIDLWGAGCIMAEMWTRSPIMQGNTEQHQLALISQLCGSITPEVWPNVDNYELYEKLELVKGQKRKVKDRLKAYVRDPYALDLIDKLLVLDPAQRIDSDDALNHDFFWSDPMPSDLKGMLSTHLTSMFEYLAPPRRKGSQITQQSTNQSRNPATTNQTEFERVF

SEQ ID NO: 9285 - protein, 1290 aa, Homo sapiens
MAGAASPCANGCGPGAPSDAEVLHLCRSLEVGTVMTLFYSKKSQRPERKTFQVKLETRQITWSRGADKIEGAIDIREIKEIRPGKTSRDFDRYQEDPAFRPDQSHCFVILYGMEFRLKTLSLQATSEDEVNMWIKGLTWLMEDTLQAPTPLQIERWLRKQFYSVDRNREDRISAKDLKNMLSQVNYRVPNMRFLRERLTDLEQRSGDITYGQFAQLYRSLMYSAQKTMDLPFLEASTLRAGERPELCRVSLPEFQQFLLDYQGELWAVDRLQVQEFMLSFLRDPLREIEEPYFFLDEFVTFLFSKENSVWNSQLDAVCPDTMNNPLSHYWISSSHNTYLTGDQFSSESSLEAYARCLRMGCRCIELDCWDGPDGMPVIYHGHTLTTKIKFSDVLHTIKEHAFVASEYPVILSIEDHCSIAQQRNMAQYFKKVLGDTLLTKPVEISADGLPSPNQLKRKILIKHKKLAEGSAYEEVPTSMMYSENDISNSIKNGILYLEDPVNHEWYPHYFVLTSSKIYYSEETSSDQGNEDEEEPKEVSSSTELHSNEKWFHGKLGAGRDGRHIAERLLTEYCIETGAPDGSFLVRESETFVGDYTLSFWRNGKVQHCRIHSRQDAGTPKFFLTDNLVFDSLYDLITHYQQVPLRCNEFEMRLSEPVPQTNAHESKEWYHASLTRAQAEHMLMRVPRDGAFLVRKRNEPNSYAISFRAEGKIKHCRVQQEGQTVMLGNSEFDSLVDLISYYEKHPLYRKMKLRYPINEEALEKIGTAEPDYGALYEGRNPGFYVEANPMPTFKCAVKALFDYKAQREDELTFIKSAIIQNVEKQEGGWWRGDYGGKKQLWFPSNYVEEMVNPVALEPEREHLDENSPLGDLLRGVLDVPACQIAIRPEGKNNRLFVFSISMASVAHWSLDVAADSQEELQDWVKKIREVAQTADARLTEGKIMERRKKIALELSELVVYCRPVPFDEEKIGTERACYRDMSSFPETKAEKYVNKAKGKKFLQYNRLQLSRIYPKGQRLDSSNYDPLPMWICGSQLVALNFQTPDKPMQMNQALFMTGRHCGYVLQPSTMRDEAFDPFDKSSLRGLEPCAISIEVLGARHLPKNGRGIVCPFVEIEVAGAEYDSTKQKTEFVVDNGLNPVWPAKPFHFQISNPEFAFLRFVVYEEDMFSDQNFLAQATFPVKGLKTGYRAVPLKNNYSEDLELASLLIKIDIFPAKENGDLSPFSGTSLRERGSDASGQLFHGRAREGSFESRYQQPFEDFRISQEHLADHFDSRERRAPRRTRVNGDNRL

SEQ ID NO: 9286 - protein, 1802 aa, Homo sapiens
MAAAPTQIEAELYYLIARFLQSGPCNKSAQVLVQELEEHQLIPRRLDWEGKEHRRSFEDLVAANAHIPPDYLLKICERIGPLLDKEIPQSVPGVQTLLGVGRQSLLRDAKDCKSTLWNGSAFAALHRGRPPELPVNYVKPPNVVNITSARQLTGCSRFGHIFPSSAYQHIKMHKRILGHLSSVYCVAFDRSGRRIFTGSDDCLVKIWATDDGRLLATLRGHSAEISDMAVNYENTLIAAGSCDKVVRVWCLRTCAPVAVLQGHSASITSIQFCPSTKGTNRYLTSTGADGTICFWQWHVKTMKFRDRPVKFTERSRPGVQISCSSFSSGGMFITTGSTDHVIRIYYLGSEVPEKIAELESHTDKVVAVQFCNNGDSLRFVSGSRDGTARIWQYQQQEWKSIVLDMATKMTGNNLPSGEDKITKLKVTMVAWDRYDTTVITAVNNFLLKVWNSITGQLLHTLSGHDDEVFVLEAHPFDQRIILSAGHDGNIFIWDLDRGTKIRNYFNMIEGQGHGAVFDCKFSPDGNHFACTDSHGHLLLFGFGCSKYYEKIPDQMFFHTDYRPLIRDANNYVLDEQTQQAPHLMPPPFLVDVDGNPHPTKFQRLVPGRENCKDEQLIPQLGYVANGDGEVVEQVIGQQTNDQDESILDGIIRELQREQDLRLINEGDVPHLPVNRAYSVNGALRSPNMDISSSPNIRLRRHSSQIEGVRQMHNNAPRSQMATERDLMAWSRRVVVNELNNGVSRVQEECRTAKGDIEISLYTVEKKKKPSYTTQRNDYEPSCGRSLRRTQRKRQHTYQTRSNIEHNSQASCQNSGVQEDSDSSSEEDETVGTSDASVEDPVVEWQSESSSSDSSSEYSDWTADAGINLQPPKRQTRQTTRKICSSSDEENLKSLEERQKKPKQTRKKKGGLVSIAGEPNEEWFAPQWILDTIPRRSPFVPQMGDELIYFRQGHEAYVRAVRKSKIYSVNLQKQPWNKMDLREQEFVKIVGIKYEVGPPTLCCLKLAFLDPISGKMTGESFSIKYHDMPDVIDFLVLHQFYNEAKERNWQIGDRFRSIIDDAWWFGTVESQQPFQPEYPDSSFQCYSVHWDNNEREKMSPWDMEPIPEGTAFPDEVGAGVPVSQEELTALLYKPQEGEWGAHSRDEECERVIQGINHLLSLDFASPFAVPVDLSAYPLYCTVVAYPTDLNTIRRRLENRFYRRISALMWEVRYIEHNARTFNEPDSPIVKAAKIVTDVLLRFIGDQSCTDILDTYNKIKAEERNSTDAEEDTEIVDLDSDGPGTSSGRKVKCRGRRQSLKCNPDAWKKQCKELLSLIYEREDSEPFRQPADLLSYPGHQEQEGESSESVVPERQQDSSLSEDYQDVIDTPVDFSTVKETLEAGNYGSPLEFYKDVRQIFNNSKAYTSNKKSRIYSMMLRLSALFESHIKNIISEYKSAIQSQKRRRPRYRKRLRSSSSSLSSSGAPSPKGKQKQMKLQPKNDQNTSVSHARTSSPFSSPVSDAAEGLSLYLLDDEPDGPFSSSSFGGYSRSGNSHDPGKAKSFRNRVLPVKQDHSLDGPLTNGDGREPRTGIKRKLLSASEEDENMGGEDKEKKETKEKSHLSTSESGELGSSLSSESTCGSDSDSESTSRTDQDYVDGDHDYSKFIQTRPKRKLRKQHGNGKRNWKTRGTGGRGRWGRWGRWSRGGRGRGGRGRGSRGRGGGGTRGRGRGRGGRGASRGATRAKRARIADDEFDTMFSGRFSRLPRIKTRNQGRRTVLYNDDSDNDNFVSTEDPLNLGTSRSGRVRKMTEKARVSHLMGWNY

SEQ ID NO: 9287 - protein, 253 aa, Homo sapiens
MAAATRGCRPWGSLLGLLGLVSAAAAAWDLASLRCTLGAFCECDFRPDLPGLECDLAQHLAGQHLAKALVVKALKAFVRDPAPTKPLVLSLHGWTGTGKSYVSSLLAHYLFQGGLRSPRVHHFSPVLHFPHPSHIERYKKDLKSWVQGNLTACGRSLFLFDEMDKMPPGLMEVLRPFLGSSWVVYGTNYRKAIFIFIRWGPALQWAQWGGHFSEVQLYSLSLCSQQNPVPHGLSWAFPVPSATLRDDIVIPPG

SEQ ID NO: 9288 - protein, 321 aa, Homo sapiens
MAAATRGCRPWGSLLGLLGLVSAAAAAWDLASLRCTLGAFCECDFRPDLPGLECDLAQHLAGQHLAKALVVKALKAFVRDPAPTKPLVLSLHGWTGTGKSYVSSLLAHYLFQGGLRSPRVHHFSPVLHFPHPSHIERYKKDLKSWVQGNLTACGRSLFLFDEMDKMPPGLMEVLRPFLGSSWVVYGTNYRKAIFIFISNTGGKQINQVALEAWRSRRDREEILLQELEPVISRAVLDNPHHGFSNSGIMEERLLDAVVPFLPLQRHHVRHCVLNELAQLGLEPRDEVVQAVLDSTTFFPEDEQLFSSNGCKTVASRIAFFL

SEQ ID NO: 9289 - protein, 263 aa, Homo sapiens
MVKIAFNTPTAVQKEEARQDVEALLSRTVRTQILTGKELRVATQEKEGSSGRCMLTLLGLSFILAGLIVGGACIYKYFMPKSTIYRGEMCFFDSEDPANSLRGGEPNFLPVTEEADIREDDNIAIIDVPVPSFSDSDPAAIIHDFEKGMTAYLDLLLGNCYLMPLNTSIVMPPKNLVELFGKLASGRYLPQTYVVREDLVAVEEIRDVSNLGIFIYQLCNNRKSFRLRRRDLLLGFNKRAIDKCWKIRHFPNEFIVETKICQE

SEQ ID NO: 9290 - protein, 594 aa, Homo sapiens
MAPIGLKAVVGEKIMHDVIKKVKKKGEWKVLVVDQLSMRMLSSCCKMTDIMTEGITIVEDINKRREPLPSLEAVYLITPSEKSVHSLISDFKDPPTAKYRAAHVFFTDSCPDALFNELVKSRAAKVIKTLTEINIAFLPYESQVYSLDSADSFQSFYSPHKAQMKNPILERLAEQIATLCATLKEYPAVRYRGEYKDNALLAQLIQDKLDAYKADDPTMGEGPDKARSQLLILDRGFDPSSPVLHELTFQAMSYDLLPIENDVYKYETSGIGEARVKEVLLDEDDDLWIALRHKHIAEVSQEVTRSLKDFSSSKRMNTGEKTTMRDLSQMLKKMPQYQKELSKYSTHLHLAEDCMKHYQGTVDKLCRVEQDLAMGTDAEGEKIKDPMRAIVPILLDANVSTYDKIRIILLYIFLKNGITEENLNKLIQHAQIPPEDSEIITNMAHLGVPIVTDSTLRRRSKPERKERISEQTYQLSRWTPIIKDIMEDTIEDKLDTKHYPYISTRSSASFSTTAVSARYGHWHKNKAPGEYRSGPRLIIFILGGVSLNEMRCAYEVTQANGKWEVLIGSTHILTPQKLLDTLKKLNKTDEEISS

SEQ ID NO: 9291 - protein, 746 aa, Homo sapiens
MGDVLSTHLDDARRQHIAEKTGKILTEFLQFYEDQYGVALFNSMRHEIEGTGLPQAQLLWRKVPLDERIVFSGNLFQHQEDSKKWRNRFSLVPHNYGLVLYENKAAYERQVPPRAVINSAGYKILTSVDQYLELIGNSLPGTTAKSGSAPILKCPTQFPLILWHPYARHYYFCMMTEAEQDKWQAVLQDCIRHCNNGIPEDSKVEGPAFTDAIRMYRQSKELYGTWEMLCGNEVQILSNLVMEELGPELKAELGPRLKGKPQERQRQWIQISDAVYHMVYEQAKARFEEVLSKVQQVQPAMQAVIRTDMDQIITSKEHLASKIRAFILPKAEVCVRNHVQPYIPSILEALMVPTSQGFTEVRDVFFKEVTDMNLNVINEGGIDKLGEYMEKLSRLAYHPLKMQSCYEKMESLRLDGLQQRFDVSSTSVFKQRAQIHMREQMDNAVYTFETLLHQELGKGPTKEELCKSIQRVLERVLKKYDYDSSSVRKRFFREALLQISIPFLLKKLAPTCKSELPRFQELIFEDFARFILVENTYEEVVLQTVMKDILQAVKEAAVQRKHNLYRDSMVMHNSDPNLHLLAEGAPIDWGEEYSNSGGGGSPSPSTPESATLSEKRRRAKQVVSVVQDEEVGLPFEASPESPPPASPDGVTEIRGLLAQGLRPESPPPAGPLLNGAPAGESPQPKAAPEASSPPASPLQHLLPGKAVDLGPPKPSDQETGEQVSSPSSHPALHTTTEDSAGVQTEF

SEQ ID NO: 9292 - protein, 323 aa, Homo sapiens
MAAELSMGPELPTSPLAMEYVNDFDLLKFDVKKEPLGRAERPGRPCTRLQPAGSVSSTPLSTPCSSVPSSPSFSPTEQKTHLEDLYWMASNYQQMNPEALNLTPEDAVEALIGSHPVPQPLQSFDSFRGAHHHHHHHHPHPHHAYPGAGVAHDELGPHAHPHHHHHHQASPPPSSAASPAQQLPTSHPGPGPHATASATAAGGNGSVEDRFSDDQLVSMSVRELNRHLRGFTKDEVIRLKQKRRTLKNRGYAQSCRYKRVQQKHHLENEKTQLIQQVEQLKQEVSRLARERDAYKVKCEKLANSGFREAGSTSDSPSSPEFFL

SEQ ID NO: 9293 - protein, 733 aa, Homo sapiens
MGWMGEKTGKILTEFLQFYEDQYGVALFNSMRHEIEGTGLPQAQLLWRKVPLDERIVFSGNLFQHQEDSKKWRNRFSLVPHNYGLVLYENKAAYERQVPPRAVINSAGYKILTSVDQYLELIGNSLPGTTAKSGSAPILKCPTQFPLILWHPYARHYYFCMMTEAEQDKWQAVLQDCIRHCNNGIPEDSKVEGPAFTDAIRMYRQSKELYGTWEMLCGNEVQILSNLVMEELGPELKAELGPRLKGKPQERQRQWIQISDAVYHMVYEQAKARFEEVLSKVQQVQPAMQAVIRTDMDQIITSKEHLASKIRAFILPKAEVCVRNHVQPYIPSILEALMVPTSQGFTEVRDVFFKEVTDMNLNVINEGGIDKLGEYMEKLSRLAYHPLKMQSCYEKMESLRLDGLQQRFDVSSTSVFKQRAQIHMREQMDNAVYTFETLLHQELGKGPTKEELCKSIQRVLERVLKKYDYDSSSVRKRFFREALLQISIPFLLKKLAPTCKSELPRFQELIFEDFARFILVENTYEEVVLQTVMKDILQAVKEAAVQRKHNLYRDSMVMHNSDPNLHLLAEGAPIDWGEEYSNSGGGGSPSPSTPESATLSEKRRRAKQVVSVVQDEEVGLPFEASPESPPPASPDGVTEIRGLLAQGLRPESPPPAGPLLNGAPAGESPQPKAAPEASSPPASPLQHLLPGKAVDLGPPKPSDQETGEQVSSPSSHPALHTTTEDSAGVQTEF

SEQ ID NO: 9294 - protein, 417 aa, Homo sapiens
MSLSNKLTLDKLDVKGKRVVMRVDFNVPMKNNQITNNQRIKAAVPSIKFCLDNGAKSVVLMSHLGRPDGVPMPDKYSLEPVAVELKSLLGKDVLFLKDCVGPEVEKACANPAAGSVILLENLRFHVEEEGKGKDASGNKVKAEPAKIEAFRASLSKLGDVYVNDAFGTAHRAHSSMVGVNLPQKAGGFLMKKELNYFAKALESPERPFLAILGGAKVADKIQLINNMLDKVNEMIIGGGMAFTFLKVLNNMEIGTSLFDEEGAKIVKDLMSKAEKNGVKITLPVDFVTADKFDENAKTGQATVASGIPAGWMGLDCGPESSKKYAEAVTRAKQIVWNGPVGVFEWEAFARGTKALMDEVVKATSRGCITIIGGGDTATCCAKWNTEDKVSHVSTGGGASLELLEGKVLPGVDALSNI

SEQ ID NO: 9295 - protein, 672 aa, Homo sapiens
MAAPVGPVKFWRPGTEGPGVSISEERQSLAENSGTTVVYNPYAALSIEQQRQKLPVFKYLAEAGWTAEGRVVGVTQPRRVAAVTVAGRVAEERGAVLGHEVGYCIRFDDCTDQLATRIKFLTDGMLVREMMVDPLLTKYSVIMLDEAHERTLYTDIAIGLLKKIQKKRGDLRLIVASATLDADKFRDFFNQNETSDPARDTCVILTVEGRTFPVDIFYLQSPVPDYIKSTVETVVKIHQTEGDGDVLAFLTGQEEVETVVSMLIEQARALARTGMKRHLRVLPMYAGLPSFEQMKVFERVSRSVRKVIVATNVAETSITISGIVYVIDCGFVKLRAYNPRTAIECLVVVPVSQASANQRAGRGGRSRSGKCYRLYTEEAFDKLPQSTVPEMQRSNLAPVILQLKALGIDNVLRFHFMSPPPAQSMVQALELLYALGGLDKDCRLTEPLGMRIAEFPLNPMFAKMLLESGNFGCSQEILSIAAMMQIQNIFVVPPNQKSHAIRVHRKFAVEEGDHLTMLNIYEAFIKHNKDSKWCQEHFLNYKGLVRAATVREQLKKLLVKFQVPRKSSEGDPDLVLRCIVSGFFANAARFHSTGAYRTIRDDHELHIHPASVLYAEKPPRWVIYNEVIQTSKYYMRDVTAIESAWLLELAPHFYQQGTHLSLKAKRAKVQDP

SEQ ID NO: 9296 - protein, 134 aa, Homo sapiens
MAARWRFWCVSVTMVVALLIVCDVPSASAQRKKEMVLSEKVSQLMEWTNKRPVIRMNGDKFRRLVKAPPRNYSVIVMFTALQLHRQCVVCKQADEEFQILANSWRYSSAFTNRIFFAMVDFDEGSDVFQMFQVF

SEQ ID NO: 9297 - protein, 154 aa, Homo sapiens
MALLLSVLRVLLGGFFALVGLAKLSEEISAPVSERMNALFVQFAEVFPLKVFGYQPDPLNYQIAVGFLELLAGLLLVMGPPMLQEISNLFLILLMMGAIFTLAALKESLSTCIPAIVCLGFLLLLNVGQLLAQTKKVVRPTRKKTLSTFKESWK

SEQ ID NO: 9298 - protein, 2492 aa, Homo sapiens
MTAEPMSESKLNTLVQKLHDFLAHSSEESEETSSPPRLAMNQNTDKISGSGSNSDMMENSKEEGTSSSEKSKSSGSSRSKRKPSIVTKYVESDDEKPLDDETVNEDASNENSENDITMQSLPKGTVIVQPEPVLNEDKDDFKGPEFRSRSKMKTENLKKRGEDGLHGIVSCTACGQQVNHFQKDSIYRHPSLQVLICKNCFKYYMSDDISRDSDGMDEQCRWCAEGGNLICCDFCHNAFCKKCILRNLGRKELSTIMDENNQWYCYICHPEPLLDLVTACNSVFENLEQLLQQNKKKIKVDSEKSNKVYEHTSRFSPKKTSSNCNGEEKKLDDSCSGSVTYSYSALIVPKEMIKKAKKLIETTANMNSSYVKFLKQATDNSEISSATKLRQLKAFKSVLADIKKAHLALEEDLNSEFRAMDAVNKEKNTKEHKVIDAKFETKARKGEKPCALEKKDISKSEAKLSRKQVDSEHMHQNVPTEEQRTNKSTGGEHKKSDRKEEPQYEPANTSEDLDMDIVSVPSSVPEDIFENLETAMEVQSSVDHQGDGSSGTEQEVESSSVKLNISSKDNRGGIKSKTTAKVTKELYVKLTPVSLSNSPIKGADCQEVPQDKDGYKSCGLNPKLEKCGLGQENSDNEHLVENEVSLLLEESDLRRSPRVKTTPLRRPTETNPVTSNSDEECNETVKEKQKLSVPVRKKDKRNSSDSAIDNPKPNKLPKSKQSETVDQNSDSDEMLAILKEVSRMSHSSSSDTDINEIHTNHKTLYDLKTQAGKDDKGKRKRKSSTSGSDFDTKKGKSAKSSIISKKKRQTQSESSNYDSELEKEIKSMSKIGAARTTKKRIPNTKDFDSSEDEKHSKKGMDNQGHKNLKTSQEGSSDDAERKQERETFSSAEGTVDKDTTIMELRDRLPKKQQASASTDGVDKLSGKEESFTSLEVRKVAETKEKSKHLKTKTCKKVQDGLSDIAEKFLKKDQSDETSEDDKKQSKKGTEEKKKPSDFKKKVIKMEQQYESSSDGTEKLPEREEICHFPKGIKQIKNGTTDGEKKSKKIRDKTSKKKDELSDYAEKSTGKGDSCDSSEDKKSKNGAYGREKKRCKLLGKSSRKRQDCSSSDTEKYSMKEDGCNSSDKRLKRIELRERRNLSSKRNTKEIQSGSSSSDAEESSEDNKKKKQRTSSKKKAVIVKEKKRNSLRTSTKRKQADITSSSSSDIEDDDQNSIGEGSSDEQKIKPVTENLVLSSHTGFCQSSGDEALSKSVPVTVDDDDDDNDPENRIAKKMLLEEIKANLSSDEDGSSDDEPEEGKKRTGKQNEENPGDEEAKNQVNSESDSDSEESKKPRYRHRLLRHKLTVSDGESGEEKKTKPKEHKEVKGRNRRKVSSEDSEDSDFQESGVSEEVSESEDEQRPRTRSAKKAELEENQRSYKQKKKRRRIKVQEDSSSENKSNSEEEEEEKEEEEEEEEEEEEEEEDENDDSKSPGKGRKKIRKILKDDKLRTETQNALKEEEERRKRIAEREREREKLREVIEIEDASPTKCPITTKLVLDEDEETKEPLVQVHRNMVIKLKPHQVDGVQFMWDCCCESVKKTKKSPGSGCILAHCMGLGKTLQVVSFLHTVLLCDKLDFSTALVVCPLNTALNWMNEFEKWQEGLKDDEKLEVSELATVKRPQERSYMLQRWQEDGGVMIIGYEMYRNLAQGRNVKSRKLKEIFNKALVDPGPDFVVCDEGHILKNEASAVSKAMNSIRSRRRIILTGTPLQNNLIEYHCMVNFIKENLLGSIKEFRNRFINPIQNGQCADSTMVDVRVMKKRAHILYEMLAGCVQRKDYTALTKFLPPKHEYVLAVRMTSIQCKLYQYYLDHLTGVGNNSEGGRGKAGAKLFQDFQMLSRIWTHPWCLQLDYISKENKGYFDEDSMDEFIASDSDETSMSLSSDDYTKKKKKGKKGKKDSSSSGSGSDNDVEVIKVWNSRSRGGGEGNVDETGNNPSVSLKLEESKATSSSNPSSPAPDWYKDFVTDADAEVLEHSGKMVLLFEILRMAEEIGDKVLVFSQSLISLDLIEDFLELASREKTEDKDKPLIYKGEGKWLRNIDYYRLDGSTTAQSRKKWAEEFNDETNVRGRLFIISTKAGSLGINLVAANRVIIFDASWNPSYDIQSIFRVYRFGQTKPVYVYRFLAQGTMEDKIYDRQVTKQSLSFRVVDQQQVERHFTMNELTELYTFEPDLLDDPNSEKKKKRDTPMLPKDTILAELLQIHKEHIVGYHEHDSLLDHKEEEELTEEERKAAWAEYEAEKKGLTMRFNIPTGTNLPPVSFNSQTPYIPFNLGALSAMSNQQLEDLINQGREKVVEATNSVTAVRIQPLEDIISAVWKENMNLSEAQVQALALSRQASQELDVKRREAIYNDVLTKQQMLISCVQRILMNRRLQQQYNQQQQQQMTYQQATLGHLMMPKPPNLIMNPSNYQQIDMRGMYQPVAGGMQPPPLQRAPPPMRSKNPGPSQGKSM

SEQ ID NO: 9299 - protein, 233 aa, Homo sapiens
MAATSGTDEPVSGELVSVAHALSLPAESYGNDPDIEMAWAMRAMQHAEVYYKLISSVDPQFLKLTKVDDQIYSEFRKNFETLRIDVLDPEELKSESAKEKWRPFCLKFNGIVEDFNYGTLLRLDCSQGYTEENTIFAPRIQFFAIEIARNREGYNKAVYISVQDKEGEKGVNNGGEKRADSGEEENTKNGGEKGADSGEEKEEGINREDKTDKGGEKGKEADKEINKSGEKAM

SEQ ID NO: 9300 - protein, 184 aa, Homo sapiens
MAEPQPPSGGLTDEAALSCCSDADPSTKDFLLQQTMLRVKDPKKSLDFYTRVLGMTLIQKCDFPIMKFSLYFLAYEDKNDIPKEKDEKIAWALSRKATLELTHNWGTEDDETQSYHNGNSDPRGFGHIGIAVPDVYSACKRFEELGVKFVKKPDDGKMKGLAFIQDPDGYWIEILNPNKMATLM

SEQ ID NO: 9301 - protein, 3631 aa, Homo sapiens
MPRSRGRELGRCGCPAGRARGETGISALVPGAGSRWGRPPPPTPPPLLLLLGCGLLSVSAAAGQNCTFQLHGPNGTVESPGFPYGYPNYANCTWTITAEEQHRIQLVFQSFALEEDFDVLSVFDGPPQPENLRTRLTGFQLPATIVSAATTLSLRLISDYAVSAQGFHATYEVLPSHTCGNPGRLPNGIQQGSTFNLGDKVRYSCNLGFFLEGHAVLTCHAGSENSATWDFPLPSCRADDACGGTLRGQSGIISSPHFPSEYHNNADCTWTILAELGDTIALVFIDFQLEDGYDFLEVTGTEGSSLWFTGASLPAPVISSKNWLRLHFTSDGNHRQRGFSAQYQVKKQIELKSRGVKLMPSKDNSQKTSVLTQVGVSQGHNMCPDPGIPERGKRLGSDFRLGSSVQFTCNEGYDLQGSKRITCMKVSDMFAAWSDHRPVCRARMCDAHLRGPSGIITSPNFPIQYDNNAHCVWIITALNPSKVIKLAFEEFDLERGYDTLTVGDGGQDGDQKTVLYILTGTSVPDLIVSTNHQMWLLFQTDGSGSSLGFKASYEEIEQGSCGDPGIPAYGRREGSRFHHGDTLKFECQPAFELVGQKAITCQKNNQWSAKKPGCVFSCFFNFTSPSGVVLSPNYPEDYGNHLHCVWLILARPESRIHLAFNDIDVEPQFDFLVIKDGATAEAPVLGTFSGNQLPSSITSSGHVARLEFQTDHSTGKRGFNITFTTFRHNECPDPGVPVNGKRFGDSLQLGSSISFLCDEGFLGTQGSETITCVLKEGSVVWNSAVLRCEAPCGGHLTSPSGTILSPGWPGFYKDALSCAWVIEAQPGYPIKITFDRFKTEVNYDTLEVRDGRTYSAPLIGVYHGTQVPQFLISTSNYLYLLFSTDKSHSDIGFQLRYETITLQSDHCLDPGIPVNGQRHGNDFYVGALVTFSCDSGYTLSDGEPLECEPNFQWSRALPSCEALCGGFIQGSSGTILSPGFPDFYPNNLNCTWIIETSHGKGVFFTFHTFHLESGHDYLLITENGSFTQPLRQLTGSRLPAPISAGLYGNFTAQVRFISDFSMSYEGFNITFSEYDLEPCEEPEVPAYSIRKGLQFGVGDTLTFSCFPGYRLEGTARITCLGGRRRLWSSPLPRCVAECGNSVTGTQGTLLSPNFPVNYNNNHECIYSIQTQPGKGIQLKARAFELSEGDVLKVYDGNNNSARLLGVFSHSEMMGVTLNSTSSSLWLDFITDAENTSKGFELHFSSFELIKCEDPGTPKFGYKVHDEGHFAGSSVSFSCDPGYSLRGSEELLCLSGERRTWDRPLPTCVAECGGTVRGEVSGQVLSPGYPAPYEHNLNCIWTIEAEAGCTIGLHFLVFDTEEVHDVLRIWDGPVESGVLLKELSGPALPKDLHSTFNSVVLQFSTDFFTSKQGFAIQFSVSTATSCNDPGIPQNGSRSGDSWEAGDSTVFQCDPGYALQGSAEISCVKIENRFFWQPSPPTCIAPCGGDLTGPSGVILSPNYPEPYPPGKECDWKVTVSPDYVIALVFNIFNLEPGYDFLHIYDGRDSLSPLIGSFYGSQLPGRIESSSNSLFLAFRSDASVSNAGFVIDYTENPRESCFDPGSIKNGTRVGSDLKLGSSVTYYCHGGYEVEGTSTLSCILGPDGKPVWNNPRPVCTAPCGGQYVGSDGVVLSPNYPQNYTSGQICLYFVTVPKDYVVFGQFAFFHTALNDVVEVHDGHSQHSRLLSSLSGSHTGESLPLATSNQVLIKFSAKGLAPARGFHFVYQAVPRTSATQCSSVPEPRYGKRLGSDFSVGAIVRFECNSGYALQGSPEIECLPVPGALAQWNVSAPTCVVPCGGNLTERRGTILSPGFPEPYLNSLNCVWKIVVPEGAGIQIQVVSFVTEQNWDSLEVFDGADNTVTMLGSFSGTTVPALLNSTSNQLYLHFYSDISVSAAGFHLEYKTVGLSSCPEPAVPSNGVKTGERYLVNDVVSFQCEPGYALQGHAHISCMPGTVRRWNYPPPLCIAQCGGTVEEMEGVILSPGFPGNYPSNMDCSWKIALPVGFGAHIQFLNFSTEPNHDYIEIRNGPYETSRMMGRFSGSELPSSLLSTSHETTVYFHSDHSQNRPGFKLEYQAYELQECPDPEPFANGIVRGAGYNVGQSVTFECLPGYQLTGHPVLTCQHGTNRNWDHPLPKCEVPCGGNITSSNGTVYSPGFPSPYSSSQDCVWLITVPIGHGVRLNLSLLQTEPSGDFITIWDGPQQTAPRLGVFTRSMAKKTVQSSSNQVLLKFHRDAATGGIFAIAFSAYPLTKCPPPTILPNAEVVTENEEFNIGDIVRYRCLPGFTLVGNEILTCKLGTYLQFEGPPPICEVHCPTNELLTDSTGVILSQSYPGSYPQFQTCSWLVRVEPDYNISLTVEYFLSEKQYDEFEIFDGPSGQSPLLKALSGNYSAPLIVTSSSNSVYLRWSSDHAYNRKGFKIRYSAPYCSLPRAPLHGFILGQTSTQPGGSIHFGCNAGYRLVGHSMAICTRHPQGYHLWSEAIPLCQALSCGLPEAPKNGMVFGKEYTVGTKAMYSCSEGYHLQAGAEATAECLDTGLWSNRNVPPQCVPVTCPDVSSISVEHGRWRLIFETQYQFQAQLMLICDPGYYYTGQRVIRCQANGKWSLGDSTPTCRIISCGELPIPPNGHRIGTLSVYGATAIFSCNSGYTLVGSRVRECMANGLWSGSEVRCLATQTKLHSIFYKLLFDVLSSPSLTKAGHCGTPEPIVNGHINGENYSYRGSVVYQCNAGFRLIGMSVRICQQDHHWSGKTPFCVPITCGHPGNPVNGLTQGNQFNLNDVVKFVCNPGYMAEGAARSQCLASGQWSDMLPTCRIINCTDPGHQENSVRQVHASGPHRFSFGTTVSYRCNHGFYLLGTPVLSCQGDGTWDRPRPQCLLVSCGHPGSPPHSQMSGDSYTVGAVVRYSCIGKRTLVGNSTRMCGLDGHWTGSLPHCSGTSVGVCGDPGIPAHGIRLGDSFDPGTVMRFSCEAGHVLRGSSERTCQANGSWSGSQPECGVISCGNPGTPSNARVVFSDGLVFSSSIVYECREGYYATGLLSRHCSVNGTWTGSDPECLVINCGDPGIPANGLRLGNDFRYNKTVTYQCVPGYMMESHRVSVLSCTKDRTWNGTKPVCKALMCKPPPLIPNGKVVGSDFMWGSSVTYACLEGYQLSLPAVFTCEGNGSWTGELPQCFPVFCGDPGVPSRGRREDRGFSYRSSVSFSCHPPLVLVGSPRRFCQSDGTWSGTQPSCIDPTLTTCADPGVPQFGIQNNSQGYQVGSTVLFRCQKGYLLQGSTTRTCLPNLTWSGTPPDCVPHHCRQPETPTHANVGALDLPSMGYTLIYSCQEGFSLKGGSEHRTCKADGSWTGKPPICLEVRPSGRPINTAREPPLTQALIPGDVFAKNSLWKGAYEYQGKKQPAMLRVTGFQVANSKVNATMIDHSGVELHLAGTYKKEDFHLLLQVYQITGPVEIFMNKFKDDHWALDGHVSSESSGATFIYQGSVKGQGFGQFGFQRLDLRLLESDPESIGRHFASNSSSVAAAILVPFIALIIAGFVLYLYKHRRRPKVPFNGYAGHENTNVRATFENPMYDRNIQPTDIMASEAEFTVSTVCTAV

SEQ ID NO: 9302 - protein, 97 aa, Homo sapiens
MTKKKRENLGVALEIDGLEEKLSQCRRDLEAVNSRLHSRELSPEARRSLEKEKNSLMNKASNYEKELKFLRQENRKNMLLSVAIFILLTLVYAYWTM

SEQ ID NO: 9303 - protein, 534 aa, Homo sapiens
MARGLQVPLPRLATGLLLLLSVQPWAESGKVLVVPTDGSPWLSMREALRELHARGHQAVVLTPEVNMHIKEEKFFTLTAYAVPWTQKEFDRVTLGYTQGFFETEHLLKRYSRSMAIMNNVSLALHRCCVELLHNEALIRHLNATSFDVVLTDPVNLCGAVLAKYLSIPAVFFWRYIPCDLDFKGTQCPNPSSYIPKLLTTNSDHMTFLQRVKNMLYPLALSYICHTFSAPYASLASELFQREVSVVDLVSYASVWLFRGDFVMDYPRPIMPNMVFIGGINCANGKPLSQEFEAYINASGEHGIVVFSLGSMVSEIPEKKAMAIADALGKIPQTVLWRYTGTRPSNLANNTILVKWLPQNDLLGHPMTRAFITHAGSHGVYESICNGVPMVMMPLFGDQMDNAKRMETKGAGVTLNVLEMTSEDLENALKAVINDKSYKENIMRLSSLHKDRPVEPLDLAVFWVEFVMRHKGAPHLRPAAHDLTWYQYHSLDVIGFLLAVVLTVAFITFKCCAYGYRKCLGKKGRVKKAHKSKTH

SEQ ID NO: 9304 - protein, 534 aa, Homo sapiens
MATGLQVPLPQLATGLLLLLSVQPWAESGKVLVVPTDGSHWLSMREALRDLHARGHQVVVLTLEVNMYIKEENFFTLTTYAISWTQDEFDRLLLGHTQSFFETEHLLMKFSRRMAIMNNMSLIIHRSCVELLHNEALIRHLHATSFDVVLTDPFHLCAAVLAKYLSIPAVFFLRNIPCDLDFKGTQCPNPSSYIPRLLTTNSDHMTFLQRVKNMLYPLALSYLCHAVSAPYASLASELFQREVSVVDLVSHASVWLFRGDFVMDYPRPIMPNMVFIGGINCANGKPLSQEFEAYINASGEHGIVVFSLGSMVSEIPEKKAMAIADALGKIPQTVLWRYTGTRPSNLANNTILVKWLPQNDLLGHPMTRAFITHAGSHGVYESICNGVPMVMMPLFGDQMDNAKRMETKGAGVTLNVLEMTSEDLENALKAVINDKSYKENIMRLSSLHKDRPVEPLDLAVFWVEFVMRHKGAPHLRPAAHDLTWYQYHSLDVIGFLLAVVLTVAFITFKCCAYGYRKCLGKKGRVKKAHKSKTH

SEQ ID NO: 9305 - protein, 464 aa, Homo sapiens
MPLGPVTPALPLQCPTANLHKPGGSQQCHPPTPDTGPQNGHPEGVPHTPQRRFQHTSAVILQLQPASPVPQQCVPDDWKEVAPGEKSVPETRSGPSPHQQAIVTAMPGGLPVPTSPNIQPSPAHETGQGIVHALTDLSSPGMTSGNGNSASSIAGTAPQNGENKPPQAIVKPQILTHVIEGFVIQEGAEPFPVGRSSLLVGNLKKKYAQGFLPEKLPQQDHTTTTDSEMEEPYLQESKEEGAPLKLKCELCGRVDFAYKFKRSKRFCSMACAKRYNVGCTKRVGLFHSDRSKLQKAGAATHNRRRASKASLPPLTKDTKKQPTGTVPLSVTAALQLTHSQEDSSRCSDNSSYEEPLSPISASSSTSRRRQGQRDLELPDMHMRDLVGMGHHFLPSEPTKWNVEDVYEFIRSLPGCQEIAEEFRAQEIDGQALLLLKEDHLMSAMNIKLGPALKIYARISMLKDS

SEQ ID NO: 9306 - protein, 493 aa, Homo sapiens
MRPLCVTCWWLGLLAAMGAVAGQEDGFEGTEEGSPREFIYLNRYKRAGESQDKCTYTFIVPQQRVTGAICVNSKEPEVLLENRVHKQELELLNNELLKQKRQIETLQQLVEVDGGIVSEVKLLRKESRNMNSRVTQLYMQLLHEIIRKRDNALELSQLENRILNQTADMLQLASKYKDLEHKYQHLATLAHNQSEIIAQLEEHCQRVPSARPVPQPPPAAPPRVYQPPTYNRIINQISTNEIQSDQNLKVLPPPLPTMPTLTSLPSSTDKPSGPWRDCLQALEDGHDTSSIYLVKPENTNRLMQVWCDQRHDPGGWTVIQRRLDGSVNFFRNWETYKQGFGNIDGEYWLGLENIYWLTNQGNYKLLVTMEDWSGRKVFAEYASFRLEPESEYYKLRLGRYHGNAGDSFTWHNGKQFTTLDRDHDVYTGNCAHYQKGGWWYNACAHSNLNGVWYRGGHYRSRYQDGVYWAEFRGGSYSLKKVVMMIRPNPNTFH

SEQ ID NO: 9307 - protein, 530 aa, Homo sapiens
MARAGWTGLLPLYVCLLLTCGFAKAGKLLVVPMDGSHWFTMQSVVEKLILRGHEVVVVMPEVSWQLGRSLNCTVKTYSTSYTLEDQDREFMVFADARWTAPLRSAFSLLTSSSNGIFDLFFSNCRSLFNDRKLVEYLKESCFDAVFLDPFDACGLIVAKYFSLPSVVFARGIFCHYLEEGAQCPAPLSYVPRLLLGFSDAMTFKERVWNHIMHLEEHLFCPYFFKNVLEIASEILQTPVTAYDLYSHTSIWLLRTDFVLEYPKPVMPNMIFIGGINCHQGKPVPMEFEAYINASGEHGIVVFSLGSMVSEIPEKKAMAIADALGKIPQTVLWRYTGTRPSNLANNTILVKWLPQNDLLGHPMTRAFITHAGSHGVYESICNGVPMVMMPLFGDQMDNAKRMETKGAGVTLNVLEMTSEDLENALKAVINDKSYKENIMRLSSLHKDRPVEPLDLAVFWVEFVMRHKGAPHLRPAAHDLTWYQYHSLDVIGFLLAVVLTVAFITFKCCAYGYRKCLGKKGRVKKAHKSKTH

SEQ ID NO: 9308 - protein, 326 aa, Homo sapiens
MSSFSESALEKKLSELSNSQQSVQTLSLWLIHHRKHAGPIVSVWHRELRKAKSNRKLTFLYLANDVIQNSKRKGPEFTREFESVLVDAFSHVAREADEGCKKPLERLLNIWQERSVYGGEFIQQLKLSMEDSKSPPPKATEEKKSLKRTFQQIQEEEDDDYPGSYSPQDPSAGPLLTEELIKALQDLENAASGDATVRQKIASLPQEVQDVSLLEKITDKEAAERLSKTVDEACLLLAEYNGRLAAELEDRRQLARMLVEYTQNQKDVLSEKEKKLEEYKQKLARVTQVRKELKSHIQSLPDLSLLPNVTGGLAPLPSAGDLFSTD

SEQ ID NO: 9309 - protein, 441 aa, Homo sapiens
MARAGWTSPVPLCVCLLLTCGFAEAGKLLVVPMDGSHWFTMQSVVEKLILRGHEVVVVMPEVSWQLERSLNCTVKTYSTSYTLEDQNREFMVFAHAQWKAQAQSIFSLLMSSSSGFLDLFFSHCRSLFNDRKLVEYLKESSFDAVFLDPFDTCGLIVAKYFSLPSVVFTRGIFCHHLEEGAQCPAPLSYVPNDLLGFSDAMTFKERVWNHIVHLEDHLFCQYLFRNALEIASEILQTPVTAYDLYSHTSIWLLRTDFVLDYPKPVMPNMIFIGGINCHQGKPLPMEFEAYINASGEHGIVVFSLGSMVSEIPEKKAMAIADALGKIPQTVLWRYTGTRPSNLANNTILVKWLPQNDLLGHPMTRAFITHAGSHGVYESICNGVPMVMMPLFGDQMDNAKRMETKGAGVTLNVLEMTSEDLENALKAVINDKRKKQQSGRQM

SEQ ID NO: 9310 - protein, 1089 aa, Homo sapiens
MAVFDTPEEAFGVLRPVCVQLTKTQTVENVEHLQTRLQAVSDSALQELQQYILFPLRFTLKTPGPKRERLIQSVVECLTFVLSSTCVKEQELLQELFSELSACLYSPSSQKPAAVSEELKLAVIQGLSTLMHSAYGDIILTFYEPSILPRLGFAVSLLLGLAEQEKSKQIKIAALKCLQVLLLQCDCQDHPRSLDELEQKQLGDLFASFLPGISTALTRLITGDFKQGHSIVVSSLKIFYKTVSFIMADEQLKRISKVQAKPAVEHRVAELMVYREADWVKKTGDKLTILIKKIIECVSVHPHWKVRLELVELVEDLLLKCSQSLVECAGPLLKALVGLVNDESPEIQAQCNKVLRHFADQKVVVGNKALADILSESLHSLATSLPRLMNSQDDQGKFSTLSLLLGYLKLLGPKINFVLNSVAHLQRLSKALIQVLELDVADIKIVEERRWNSDDLNASPKTSATQPWNRIQRRYFRFFTDERIFMLLRQVCQLLGYYGNLYLLVDHFMELYHQSVVYRKQAAMILNELVTGAAGLEVEDLHEKHIKTNPEELREIVTSILEEYTSQENWYLVTCLETEEMGEELMMEHPGLQAITSGEHTCQVTSFLAFSKPSPTICSMNSNIWQICIQLEGIGQFAYALGKDFCLLLMSALYPVLEKAGDQTLLISQVATSTMMDVCRACGYDSLQHLINQNSDYLVNGISLNLRHLALHPHTPKVLEVMLRNSDANLLPLVADVVQDVLATLDQFYDKRAASFVSVLHALMAALAQWFPDTGNLGHLQEQSLGEEGSHLNQRPAALEKSTTTAEDIEQFLLNYLKEKDVADGNVSDFDNEEEEQSVPPKVDENDTRPDVEPPLPLQIQIAMDVMERCIHLLSDKNLQIRLKVLDVLDLCVVVLQSHKNQLLPLAHQAWPSLVHRLTRDAPLAVLRAFKVLRTLGSKCGDFLRSRFCKDVLPKLAGSLVTQAPISARAGPVYSHTLAFKLQLAVLQGLGPLCERLDLGEGDLNKVADACLIYLSVKQPVKLQEAARSVFLHLMKVDPDSTWFLLNELYCPVQFTPPHPSLHPVQLHGASGQQNPYTTNVLQLLKELQ

SEQ ID NO: 9311 - protein, 232 aa, Homo sapiens
MAPSVPAAEPEYPKGIRAVLLGPPGAGKGTQAPRLAENFCVCHLATGDMLRAMVASGSELGKKLKATMDAGKLVSDEMVVELIEKNLETPLCKNGFLLDGFPRTVRQAEMLDDLMEKRKEKLDSVIEFSIPDSLLIRRITGRLIHPKSGRSYHEEFNPPKEPMKDDITGEPLIRRSDDNEKALKIRLQAYHTQTTPLIEYYRKRGIHSAIDASQTPDVVFASILAAFSKATS

SEQ ID NO: 9312 - protein, 530 aa, Homo sapiens
MARTGWTSPIPLCVSLLLTCGFAEAGKLLVVPMDGSHWFTMQSVVEKLILRGHEVVVVMPEVSWQLGKSLNCTVKTYSTSYTLEDLDREFMDFADAQWKAQVRSLFSLFLSSSNGFFNLFFSHCRSLFNDRKLVEYLKESSFDAVFLDPFDACGLIVAKYFSLPSVVFARGIACHYLEEGAQCPAPLSYVPRILLGFSDAMTFKERVRNHIMHLEEHLFCQYFSKNALEIASEILQTPVTAYDLYSHTSIWLLRTDFVLDYPKPVMPNMIFIGGINCHQGKPLPMEFEAYINASGEHGIVVFSLGSMVSEIPEKKAMAIADALGKIPQTVLWRYTGTRPSNLANNTILVKWLPQNDLLGHPMTRAFITHAGSHGVYESICNGVPMVMMPLFGDQMDNAKRMETKGAGVTLNVLEMTSEDLENALKAVINDKSYKENIMRLSSLHKDRPVEPLDLAVFWVEFVMRHKGAPHLRPAAHDLTWYQYHSLDVIGFLLAVVLTVAFITFKCCAYGYRKCLGKKGRVKKAHKSKTH

SEQ ID NO: 9313 - protein, 835 aa, Homo sapiens
MKRRTDPECTAPIKKQKKRVAELALSLSSTSDDEPPSSVSHGAKASTTSLSGSDSETEGKQHSSDSFDDAFKADSLVEGTSSRYSMYNSVSQKLMAKMGFREGEGLGKYSQGRKDIVEASSQKGRRGLGLTLRGFDQELNVDWRDEPEPSACEQVSWFPECTTEIPDTQEMSDWMVVGKRKMIIEDETEFCGEELLHSVLQCKSVFDVLDGEEMRRARTRANPYEMIRGVFFLNRAAMKMANMDFVFDRMFTNPRDSYGKPLVKDREAELLYFADVCAGPGGFSEYVLWRKKWHAKGFGMTLKGPNDFKLEDFYSASSELFEPYYGEGGIDGDGDITRPENISAFRNFVLDNTDRKGVHFLMADGGFSVEGQENLQEILSKQLLLCQFLMALSIVRTGGHFICKTFDLFTPFSVGLVYLLYCCFERVCLFKPITSRPANSERYVVCKGLKVGIDDVRDYLFAVNIKLNQLRNTDSDVNLVVPLEVIKGDHEFTDYMIRSNESHCSLQIKALAKIHAFVQDTTLSEPRQAEIRKECLRLWGIPDQARVAPSSSDPKSKFFELIQGTEIDIFSYKPTLLTSKTLEKIRPVFDYRCMVSGSEQKFLIGLGKSQIYTWDGRQSDRWIKLDLKTELPRDTLLSVEIVHELKGEGKAQRKISAIHILDVLVLNGTDVREQHFNQRIQLAEKFVKAVSKPSRPDMNPIRVKEVYRLEEMEKIFVRLEMKIIKGSSGTPKLSYTGRDDRHFVPMGLYIVRTVNEPWTMGFSKSFKKKFFYNKKTKDSTFDLPADSIAPFHICYYGRLFWEWGDGIRVHDSQKPQDQDKLSKEDVLSFIQMHRA

SEQ ID NO: 9314 - protein, 467 aa, Homo sapiens
MEPGTNSFRVEFPDFSSTILQKLNQQRQQGQLCDVSIVVQGHIFRAHKAVLAASSPYFCDQVLLKNSRRIVLPDVMNPRVFENILLSSYTGRLVMPAPEIVSYLTAASFLQMWHVVDKCTEVLEGNPTVLCQKLNHGSDHQSPSSSSYNGLVESFELGSGGHTDFPKAQELRDGENEEESTKDELSSQLTEHEYLPSNSSTEHDRLSTEMASQDGEEGASDSAEFHYTRPMYSKPSIMAHKRWIHVKPERLEQACEGMDVHATYDEHQVTESINTVQTEHTVQPSGVEEDFHIGEKKVEAEFDEQADESNYDEQVDFYGSSMEEFSGERSDGNLIGHRQEAALAAGYSENIEMVTGIKEEASHLGFSATDKLYPCQCGKSFTHKSQRDRHMSMHLGLRPYGCGVCGKKFKMKHHLVGHMKIHTGIKPYECNICAKRFMWRDSFHRHVTSCTKSYEAAKAEQNTTEAN

SEQ ID NO: 9315 - protein, 132 aa, Homo sapiens
MGAPLAVALGALHYLALFLQLGGATRPAGHAPWDNHVSGHGGQGGGQQHLPQAAPVPGEAHGRRHLRVPRHRLQRRQGPAPQGQGLPAGAARGELRPASARSPSRRARPAAPQARQGAEEALGGPGGLQPLD

SEQ ID NO: 9316 - protein, 204 aa, Homo sapiens
MGAPLAVALGALHYLALFLQLGGATRPAGHAPWDNHVSGHALFTETPHDMTARTGEDVEMACSFRGSGSPSYSLEIQWWYVRSHRDWTDKQAWASNQLKASQQEDAGKEATKISVVKVVGSNISHKLRLSRVKPTDEGTYECRVIDFSDGKARHHKVKAYLRVQPGENSVLHLPEAPPAAPAPPPPKPGKELRKRSVDQEACSL

SEQ ID NO: 9317 - protein, 222 aa, Homo sapiens
MCLRLGGLSVGDFRKVLMKTGLVLVVLGHVSFITAALFHGTVLRYVGTPQDAVALQYCVVNILSVTSAIVVITSGIAAIVLSRYLPSTPLRWTVFSSSVACALLSLTCALGLLASIAMTFATQGKALLAACTFGSSELLALAPDCPFDPTRIYSSSLCLWGIALVLCVAENVFAVRCAQLTHQLLELRPWWGKSSHHMMRENPELVEGRDLLSCTSSEPLTL

SEQ ID NO: 9318 - protein, 212 aa, Homo sapiens
IHPGSPSAWPPRARAALRLWLGCVCFALVQADSPSAPVNVTVRHLKANSAVVSWDVLEDEVVIGFAISQQKKDVRMLRFIQEVNTTTRSCALWDLEEDTEYIVHVQAISIQGQSPASEPVLFKTPREAEKMASKNKDEVTMKEMGRNQQLRTGEVLIIVVVLFMWAGVIALFCRQYDIIKDNEPNNNKEKTKSASETSTPEHQGGGLLRSKI

SEQ ID NO: 9319 - protein, 408 aa, Homo sapiens
MMCSRVPSEQSSGTSLLPKDGAPFSWDSLDEDGLDDSLLELSEGEEDDGDVNYTEEEIDALLKEDDPSYEQSSGEDDGGHVEKGERGSQILLDTPREKNSSYSLGPVAETPDLFKLPQLSTSSGHGPAHTKPLNRRSVLEKNLIKVTVAPFNPTVCDALLDKDETDSSKDTEKLSSLGEEMREDGLSPNESKLCTESEGISPNNSAWNGPQLSSSNNNFQQTVSDKNMPDSENPTSVFSRISDHSETPNMELSCRNGGSHKSSCEMRSLVVSTSSNKQDVLNKDSGKMKGHERRLGKVIPVLQTKTRTNVPTFSQSNLEQQKQLYLRSVIAHIEDPEDTNQGISGELCALMDQVHHMQHSKWQHPSDLTTRNYARRQKHLQRYSLTQWVDRNMRSHHRFQRLPDFSYS

SEQ ID NO: 9320 - protein, 528 aa, Homo sapiens
MGDAPSPEEKLHLITRNLQEVLGEEKLKEILKERELKIYWGTATTGKPHVAYFVPMSKIADFLKAGCEVTILFADLHAYLDNMKAPWELLELRVSYYENVIKAMLESIGVPLEKLKFIKGTDYQLSKEYTLDVYRLSSVVTQHDSKKAGAEVVKQVEHPLLSGLLYPGLQALDEEYLKVDAQFGGIDQRKIFTFAEKYLPALGYSKRVHLMNPMVPGLTGSKMSSSEEESKIDLLDRKEDVKKKLKKAFCEPGNVENNGVLSFIKHVLFPLKSEFVILRDEKWGGNKTYTAYVDLEKDFAAEVVHPGDLKNSVEVALNKLLDPIREKFNTPALKKLASAAYPDPSKQKPMAKGPAKNSEPEEVIPSRLDIRVGKIITVEKHPDADSLYVEKIDVGEAEPRTVVSGLVQFVPKEELQDRLVVVLCNLKPQKMRGVESQGMLLCASIEGINRQVEPLDPPAGSAPGEHVFVKGYEKGQPDEELKPKKKVFEKLQADFKISEECIAQWKQTNFMTKLGSISCKSLKGGNIS

SEQ ID NO: 9321 - protein, 476 aa, Homo sapiens
MASPEPRRGGDGAAQAARKTRVEANSPLPKNSGSLNEAEALNPEVTLSSEGSLNLEDILYLEDTGDLDETLYVQETEKAEEALYIEEAMQPDEALHVEEPGNPEETVCVEETTEPDRIQFVEGPVEPGKPTSPEHVVYEGETVTRAEKSNPEESLRAEQSPSMEENLSIEDLELLEGRFQQCVQAVAQLEEERDQLIHELVLLREPALQEVQQVHQDILAAYKLHAQAELERDGLREEIRLVKQKLFKVTKECVAYQYQLECRQQDVAQFADFREVLTTRATQLSEELAQLRDAYQKQKEQLRQQLEAPPSQRDGHFLQESRRLSAQFENLMAESRQDLEEEYEPQFLRLLERKEAGTKALQRTQAEIQEMKEALRPLQAEARQLRLQNRNLEDQIALVRQKRDEEVQQYREQLEEMEERQRQLRNGVQLQQQKNKEMEQLRLSLAEELSTYKGCLEIYGQICNPETAKNFLAKDH

SEQ ID NO: 9322 - protein, 505 aa, Homo sapiens
MAAENSKQFWKRSAKLPGSIQPVYGAQHPPLDPRLTKNFIKERSKVNTVPLKNKKASSFHEFARNTSDAWDIGDDEEEDFSSPSFQTLNSKVALATAAQVLENHSKLRVKPERSQSTTSDVPANYKVIKSSSDAQLSRNSSDTCLRNPLHKQQSLPLRPIIPLVARISDQNASGAPPMTVREKTRLEKFRQLLSSQNTDLDELRKCSWPGVPREVRPITWRLLSGYLPANTERRKLTLQRKREEYFGFIEQYYDSRNEEHHQDTYRQIHIDIPRTNPLIPLFQQPLVQEIFERILFIWAIRHPASGYVQGINDLVTPFFVVFLSEYVEEDVENFDVTNLSQDMLRSIEADSFWCMSKLLDGIQDNYTFAQPGIQKKVKALEELVSRIDEQVHNHFRRYEVEYLQFAFRWMNNLLMRELPLRCTIRLWDTYQSEPEGFSHFHLYVCAAFLIKWRKEILDEEDFQGLLMLLQNLPTIHWGNEEIGLLLAEAYRLKYMFADAPNHYRR

SEQ ID NO: 9323 - protein, 425 aa, Homo sapiens
MADKEAAFDDAVEERVINEEYKIWKKNTPFLYDLVMTHALEWPSLTAQWLPDVTRPEGKDFSIHRLVLGTHTSDEQNHLVIASVQLPNDDAQFDASHYDSEKGEFGGFGSVSGKIEIEIKINHEGEVNRARYMPQNPCIIATKTPSSDVLVFDYTKHPSKPDPSGECNPDLRLRGHQKEGYGLSWNPNLSGHLLSASDDHTICLWDISAVPKEGKVVDAKTIFTGHTAVVEDVSWHLLHESLFGSVADDQKLMIWDTRSNNTSKPSHSVDAHTAEVNCLSFNPYSEFILATGSADKTVALWDLRNLKLKLHSFESHKDEIFQVQWSPHNETILASSGTDRRLNVWDLSKIGEEQSPEDAEDGPPELLFIHGGHTAKISDFSWNPNEPWVICSVSEDNIMQVWQMAENIYNDEDPEGSVDPEGQGS

SEQ ID NO: 9324 - protein, 313 aa, Homo sapiens
MLLSKINSLAHLRAAPCNDLHATKLAPGKEKEPLESQYQVGPLLGSGGFGSVYSGIRVSDNLPVAIKHVEKDRISDWGELPNGTRVPMEVVLLKKVSSGFSGVIRLLDWFERPDSFVLILERPEPVQDLFDFITERGALQEELARSFFWQVLEAVRHCHNCGVLHRDIKDENILIDLNRGELKLIDFGSGALLKDTVYTDFDGTRVYSPPEWIRYHRYHGRSAAVWSLGILLYDMVCGDIPFEHDEEIIRGQVFFRQRVSSECQHLIRWCLALRPSDRPTFEEIQNHPWMQDVLLPQETAEIHLHSLSPGPSK

SEQ ID NO: 9325 - protein, 441 aa, Homo sapiens
MEISSHQSHLLQQLNEQRRQDVFCDCSILVEGKVFKAHRNVLFASSGYFKMLLSQNSKETSQPTTATFQAFSPDTFTVILDFVYSGKLSLTGQNVIEVMSAASFLQMTDVISVCKTFIKSSLDISEKEKDRYFSLSDKDANSNGVERSSFYSGGWQEGSSSPRSHLSPEQGTGIISGKSWNKYNYHPASQKNTQQPLAKHEPRKESIKKTKHLRLSQPSEVTHYKSSKREVRTSDSSSHVSQSEEQAQIDAEMDSTPVGYQYGQGSDVTSKSFPDDLPRMRFKCPYCTHVVKRKADLKRHLRCHTGERPYPCQACGKRFSRLDHLSSHFRTIHQACKLICRKCKRHVTDLTGQVVQEGTRRYRLCNECLAEFGIDSLPIDLEAEQHLMSPSDGDKDSRWHLSEDENRSYVEIVEDGSADLVIQQVDDSEEEEEKEIKPNIR

SEQ ID NO: 9326 - protein, 87 aa, Homo sapiens
MYCLQWLLPVLLIPKPLNPALWFSHSMFMGFYLLSFLLERKPCTICALVFLAALFLICYSCWGNCFLYHCSDSPLPESAHDPGVVGT

SEQ ID NO: 9327 - protein, 195 aa, Homo sapiens
MGSQSSKAPRGDVTAEEAAGASPAKANGQENGHVKSNGDLSPKGEGESPPVNGTDEAAGATGDAIEPAPPSQGAEAKGEVPPKETPKKKKKFSFKKPFKLSGLSFKRNRKEGGGDSSASSPTEEEQEQGEIGACSDEGTAQEGKAAATPESQEPQAKGAEASAASEEEAGPQATEPSTPSGPESGPTPASAEQNE

SEQ ID NO: 9328 - protein, 372 aa, Homo sapiens
MKQLPVLEPGDKPRKATWYTLTVPGDSPCARVGHSCSYLPPVGNAKRGKVFIVGGANPNRSFSDVHTMDLGKHQWDLDTCKGLLPRYEHASFIPSCTPDRIWVFGGANQSGNRNCLQVLNPETRTWTTPEVTSPPPSPRTFHTSSAAIGNQLYVFGGGERGAQPVQDTKLHVFDANTLTWSQPETLGNPPSPRHGHVMVAAGTKLFIHGGLAGDRFYDDLHCIDISDMKWQKLNPTGAAPAGCAAHSAVAMGKHVYIFGGMTPAGALDTMYQYHTEEQHWTLLKFDTLLPPGRLDHSMCIIPWPVTCASEKEDSNSLTLNHEAEKEDSADKVMSHSGDSHEESQTATLLCLVFGGMNTEGEIYDDCIVTVVD

SEQ ID NO: 9329 - protein, 305 aa, Homo sapiens
MAPLDLDKYVEIARLCKYLPENDLKRLCDYVCDLLLEESNVQPVSTPVTVCGDIHGQFYDLCELFRTGGQVPDTNYIFMGDFVDRGYYSLETFTYLLALKAKWPDRITLLRGNHESRQITQVYGFYDECQTKYGNANAWRYCTKVFDMLTVAALIDEQILCVHGGLSPDIKTLDQIRTIERNQEIPHKGAFCDLVWSDPEDVDTWAISPRGAGWLFGAKVTNEFVHINNLKLICRAHQLVHEGYKFMFDEKLVTVWSAPNYCYRCGNIASIMVFKDVNTREPKLFRAVPDSERVIPPRTTTPYFL

SEQ ID NO: 9330 - protein, 482 aa, Homo sapiens
MAQTQGTRRKVCYYYDGDVGNYYYGQGHPMKPHRIRMTHNLLLNYGLYRKMEIYRPHKANAEEMTKYHSDDYIKFLRSIRPDNMSEYSKQMQRFNVGEDCPVFDGLFEFCQLSTGGSVASAVKLNKQQTDIAVNWAGGLHHAKKSEASGFCYVNDIVLAILELLKYHQRVLYIDIDIHHGDGVEEAFYTTDRVMTVSFHKYGEYFPGTGDLRDIGAGKGKYYAVNYPLRDGIDDESYEAIFKPVMSKVMEMFQPSAVVLQCGSDSLSGDRLGCFNLTIKGHAKCVEFVKSFNLPMLMLGGGGYTIRNVARCWTYETAVALDTEIPNELPYNDYFEYFGPDFKLHISPSNMTNQNTNEYLEKIKQRLFENLRMLPHAPGVQMQAIPEDAIPEESGDEDEDDPDKRISICSSDKRIACEEEFSDSEEEGEGGRKNSSNFKKAKRVKTEDEKEKDPEEKKEVTEEEKTKEEKPEAKGVKEEVKLA

SEQ ID NO: 9331 - protein, 767 aa, Homo sapiens
MFAKLKKKIAEETAVAQRPGGATRIPRSVSKESVASMGADSGDDFASDGSSSREDLSSQLLRRNEQIRKLEARLSDYAEQVRNLQKIKEKLEIALEKHQDSSMRKFQEQNETFQANRAKMAEGLALALARKDQEWSEKMDQLEKEKNILTAQLQEMKNQSMNLFQRRDEMDELEGFQQQELSKIKHMLLKKEESLGKMEQELEARTRELSRTQEELMNSNQMSSDLSQKLEELQRHYSTLEEQRDHVIASKTGAESKITALEQKEQELQALIQQLSIDLQKVTAETQEKEDVITHLQEKVASLEKRLEQNLSGEEHLQELLKEKTLAEQNLEDTRQQLLAARSSQAKAINTLETRVRELEQTLQASEEQLQQSKGIVAAQETQIQELAAANQESSHVQQQALALEQQFLERTQALEAQIVALERTRAADQTTAEQGMRQLEQENAALKECRNEYERSLQNHQFELKKLKEEWSQREIVSVAMAQALEEVRKQREEFQQQAANLTAIIDEKEQNLREKTEVLLQKEQEILQLERGHNSALLQIHQLQAELEALRTLKAEEAAVVAEQEDLLRLRGPLQAEALSVNESHVTSRAMQDPVFQLPTAGRTPNGEVGAMDLTQLQKEKQDLEQQLLEKNKTIKQMQQRMLELRKTLQKELKIRPDNELFEVREKPGPEMANMAPSVTNNTDLTDAREINFEYLKHVVLKFMSCRESEAFHLIKAVSVLLNFSQEEENMLKETLEYKMSWFGSKPAPKGSIRPSISNPRIPWS

SEQ ID NO: 9332 - protein, 1299 aa, Homo sapiens
MAAETQTLNFGPEWLRALSSGGSITSPPLSPALPKYKLADYRYGREEMLALFLKDNKIPSDLLDKEFLPILQEEPLPPLALVPFTEEEQRNFSMSVNSAAVLRLTGRGGGGTVVGAPRGRSSSRGRGRGRGECGFYQRSFDEVEGVFGRGGGREMHRSQSWEERGDRRFEKPGRKDVGRPNFEEGGPTSVGRKHEFIRSESENWRIFREEQNGEDEDGGWRLAGSRRDGERWRPHSPDGPRSAGWREHMERRRRFEFDFRDRDDERGYRRVRSGSGSIDDDRDSLPEWCLEDAEEEMGTFDSSGAFLSLKKVQKEPIPEEQEMDFRPVDEGEECSDSEGSHNEEAKEPDKTNKKEGEKTDRVGVEASEETPQTSSSSARPGTPSDHQSQEASQFERKDEPKTEQTEKAEEETRMENSLPAKVPSRGDEMVADVQQPLSQIPSDTASPLLILPPPVPNPSPTLRPVETPVVGAPGMGSVSTEPDDEEGLKHLEQQAEKMVAYLQDSALDDERLASKLQEHRAKGVSIPLMHEAMQKWYYKDPQGEIQGPFNNQEMAEWFQAGYFTMSLLVKRACDESFQPLGDIMKMWGRVPFSPGPAPPPHMGELDQERLTRQQELTALYQMQHLQYQQFLIQQQYAQVLAQQQKAALSSQQQQQLALLLQQFQTLKMRISDQNIIPSVTRSVSVPDTGSIWELQPTASQPTVWEGGSVWDLPLDTTTPGPALEQLQQLEKAKAAKLEQERREAEMRAKREEEERKRQEELRRQQEEILRRQQEEERKRREEEELARRKQEEALRRQREQEIALRRQREEEERQQQEEALRRLEERRREEEERRKQEELLRKQEEEAAKWAREEEEAQRRLEENRLRMEEEAARLRHEEEERKRKELEVQRQKELMRQRQQQQEALRRLQQQQQQQQLAQMKLPSSSTWGQQSNTTACQSQATLSLAEIQKLEEERERQLREEQRRQQRELMKALQQQQQQQQQKLSGWGNVSKPSGTTKSLLEIQQEEARQMQKQQQQQQQHQQPNRARNNTHSNLHTSIGNSVWGSINTGPPNQWASDLVSSIWSNADTKNSNMGFWDDAVKEVGPRNSTNKNKNNASLSKSVGVSNRQNKKVEEEEKLLKLFQGVNKAQDGFTQWCEQMLHALNTANNLDVPTFVSFLKEVESPYEVHDYIRAYLGDTSEAKEFAKQFLERRAKQKANQQRQQQQLPQQQQQQPPQQPPQQPQQQDSVWGMNHSTLHSVFQTNQSNNQQSNFEAVQSGKKKKKQKMVRADPSLLGFSVNASSERLNMGEIETLDDY

SEQ ID NO: 9333 - protein, 96 aa, Homo sapiens
MAKIKARDLRGKKKEELLKQLDDLKVELSQLRVAKVTGGAASKLSKIRVVRKSIARVLTVINQTQKENLRKFYKAAAGGPCIQMDRVLPQPPACSC

SEQ ID NO: 9334 - protein, 377 aa, Homo sapiens
MEEPEEPADSGQSLVPVYIYSPEYVSMCDSLAKIPKRASMVHSLIEAYALHKQMRIVKPKVASMEEMATFHTDAYLQHLQKVSQEGDDDHPDSIEYGLGYDCPATEGIFDYAAAIGGATITAAQCLIDGMCKVAINWSGGWHHAKKDEASGFCYLNDAVLGILRLRRKFERILYVDLDLHHGDGVEDAFSFTSKVMTVSLHKFSPGFFPGTGDVSDVGLGKGRYYSVNVPIQDGIQDEKYYQICESVLKEVYQAFNPKAVVLQLGADTIAGDPMCSFNMTPVGIGKCLKYILQWQLATLILGGGGYNLANTARCWTYLTGVILGKTLSSEIPDHEFFTAYGPDYVLEITPSCRPDRNEPHRIQQILNYIKGNLKHVV

SEQ ID NO: 9335 - protein, 652 aa, Homo sapiens
MAAAALPPRPLLLLPLVLLLSGRPTRADSKVFGDLDQVRMTSEGSDCRCKCIMRPLSKDACSRVRSGRARVEDFYTVETVSSGTDCRCSCTAPPSSLNPCENEWKMEKLKKQAPELLKLQSMVDLLEGTLYSMDLMKVHAYVHKVASQMNTLEESIKANLSRENEVVKDSVRHLSEQLRHYENHSAIMLGIKKELSRLGLQLLQKDAAAAPATPATGTGSKAQDTARGKGKDISKYGSVQKSFADRGLPKPPKEKLLQVEKLRKESGKGSFLQPTAKPRALAQQQAVIRGFTYYKAGKQEVTEAVADNTLQGTSWLEQLPPKVEGRSNSAEPNSAEQDEAEPRSSERVDLASGTPTSIPATTTTATTTPTPTTSLLPTEPPSGPEVSSQGREASCEGTLRAVDPPVRHHSYGRHEGAWMKDPAARDDRIYVTNYYYGNSLVEFRNLENFKQGRWSNMYKLPYNWIGTGHVVYQGAFYYNRAFTKNIIKYDLRQRFVASWALLPDVVYEDTTPWKWRGHSDIDFAVDESGLWVIYPAVDDRDEAQPEVIVLSRLDPGDLSVHRETTWKTRLRRNSYGNCFLVCGILYAVDTYNQQEGQVAYAFDTHTGTDARPQLPFLNEHAYTTQIDYNPKERVLYAWDNGHQLTYTLHFVV

SEQ ID NO: 9336 - protein, 737 aa, Homo sapiens
MPGKLLWGDIMELEAPLEESESQKKERQKSDRRKSRHHYDSDEKSETRENGVTDDLDAPKAKKSKMKEKLNGDTEEGFNRLSDEFSKSHKSRRKDLPNGDIDEYEKKSKRVSSLDTSTHKSSDNKLEETLTREQKEGAFSNFPISEETIKLLKGRGVTYLFPIQVKTFGPVYEGKDLIAQARTGTGKTFSFAIPLIERLQRNQETIKKSRSPKVLVLAPTRELANQVAKDFKDITRKLSVACFYGGTSYQSQINHIRNGIDILVGTPGRIKDHLQSGRLDLSKLRHVVLDEVDQMLDLGFAEQVEDIIHESYKTDSEDNPQTLLFSATCPQWVYKVAKKYMKSRYEQVDLVGKMTQKAATTVEHLAIQCHWSQRPAVIGDVLQVYSGSEGRAIIFCETKKNVTEMAMNPHIKQNAQCLHGDIAQSQREITLKGFREGSFKVLVATNVAARGLDIPEVDLVIQSSPPQDVESYIHRSGRTGRAGRTGICICFYQPRERGQLRYVEQKAGITFKRVGVPSTMDLVKSKSMDAIRSLASVSYAAVDFFRPSAQRLIEEKGAVDALAAALAHISGASSFEPRSLITSDKGFVTMTLESLEEIQDVSCAWKELNRKLSSNAVSQITRMCLLKGNMGVCFDVPTTESERLQAEWHDSDWILSVPAKLPEIEEYYDGNTSSNSRQRSGWSSGRSGRSGRSGGRSGGRSGRQSRQGSRSGSRQDGRRRSGNRNRSRSGGHKRSFD

SEQ ID NO: 9337 - protein, 325 aa, Homo sapiens
MKPILLQGHERSITQIKYNREGDLLFTVAKDPIVNVWYSVNGERLGTYMGHTGAVWCVDADWDTKHVLTGSADNSCRLWDCETGKQLALLKTNSAVRTCGFDFGGNIIMFSTDKQMGYQCFVSFFDLRDPSQIDNNEPYMKIPCNDSKITSAVWGPLGECIIAGHESGELNQYSAKSGEVLVNVKEHSRQINDIQLSRDMTMFVTASKDNTAKLFDSTTLEHQKTFRTERPVNSAALSPNYDHVVLGGGQEAMDVTTTSTRIGKFEARFFHLAFEEEFGRVKGHFGPINSVAFHPDGKSYSSGGEDGYVRIHYFDPQYFEFEFEA

SEQ ID NO: 9338 - protein, 200 aa, Homo sapiens
MDDKKKKRSPKPCLAQPAQAPGTLRRVPVPTSHSGSLALGLPHLPSPKQRAKFKRVGKEKCRPVLAGGGSGSAGTPLQHSFLTEVTDVYEMEGGLLNLLNDFHSGRLQAFGKECSFEQLEHVREMQEKLARLHFSLDVCGEEEDDEEEEDGVTEGLPEEQKKTMADRNLDQLLSNLEDLSNSIQKLHLAENAEPEEQSAA

SEQ ID NO: 9339 - protein, 85 aa, Homo sapiens
MASDLDFSPPEVPEPTFLENLLRYGLFLGAIFQLICVLAIIVPIPKSHEAEAEPSEPRSAEVTRKPKAAVPSVNKRPKKETKKKR

SEQ ID NO: 9340 - protein, 546 aa, Homo sapiens
MKNQDKKNGAAKQSNPKSSPGQPEAGPEGAQERPSQAAPAVEAEGPGSSQAPRKPEGAQARTAQSGALRDVSEELSRQLEDILSTYCVDNNQGGPGEDGAQGEPAEPEDAEKSRTYVARNGEPEPTPVVNGEKEPSKGDPNTEEIRQSDEVGDRDHRRPQEKKKAKGLGKEITLLMQTLNTLSTPEEKLAALCKKYAELLEEHRNSQKQMKLLQKKQSQLVQEKDHLRGEHSKAVLARSKLESLCRELQRHNRSLKEEGVQRAREEEEKRKEVTSHFQVTLNDIQLQMEQHNERNSKLRQENMELAERLKKLIEQYELREEHIDKVFKHKDLQQQLVDAKLQQAQEMLKEAEERHQREKDFLLKEAVESQRMCELMKQQETHLKQQLALYTEKFEEFQNTLSKSSEVFTTFKQEMEKMTKKIKKLEKETTMYRSRWESSNKALLEMAEEKTVRDKELEGLQVKIQRLEKLCRALQTERNDLNKRVQDLSAGGQGSLTDSGPERRPEGPGAQAPSSPRVTEAPCYPGAPSTEASGQTGPQEPTSARA

SEQ ID NO: 9341 - protein, 107 aa, Homo sapiens
MPLWVFFFVILTLSNSSHCSPPPPLTLRMRRYADAIFTNSYRKVLGQLSARKLLQDIMSRQQGESNQERGARARLGRQVDSMWAEQKQMELESILVALLQKHRNSQG

SEQ ID NO: 9342 - protein, 372 aa, Homo sapiens
MGASDPEVAPWARGGAAGMAGAGAGAGARGGAAAGVEARARDPPPAHRAHPRHPRPAAQPSARRMDGGSGGLGSGDNAPTTEALFVALGAGVTALSHPLLYVKLLIQVGHEPMPPTLGTNVLGRKVLYLPSFFTYAKYIVQVDGKIGLFRGLSPRLMSNALSTVTRGSMKKVFPPDEIEQVSNKDDMKTSLKKVVKETSYEMMMQCVSRMLAHPLHVISMRCMVQFVGREAKYSGVLSSIGKIFKEEGLLGFFVGLIPHLLGDVVFLWGCNLLAHFINAYLVDDSFSQALAIRSYTKFVMGIAVSMLTYPFLLVGDLMAVNNCGLQAGLPPYSPVFKSWIHCWKYLSVQGQLFRGSSLLFRRVSSGSCFALE

SEQ ID NO: 9343 - protein, 615 aa, Homo sapiens
MAPPGSSTVFLLALTIIASTWALTPTHYLTKHDVERLKASLDRPFTNLESAFYSIVGLSSLGAQVPDAKISISNETKDLLLAAVSEDSSVTQIYHAVAALSGFGLPLASQEALSALTARLSKEETVLATVQALQTASHLSQQADLRSIVEEIEDLVARLDELGGVYLQFEEGLETTALFVAATYKLMDHVGTEPSIKEDQVIQLMNAIFSKKNFESLSEAFSVASAAAVLSHNRYHVPVVVVPEGSASDTHEQAILRLQVTNVLSQPLTQATVKLEHAKSVASRATVLQKTSFTPVGDVFELNFMNVKFSSGYYDFLVEVEGDNRYIANTVELRVKISTEVGITNVDLSTVDKDQSIAPKTTRVTYPAKAKGTFIADSHQNFALFFQLVDVNTGAELTPHQTFVRLHNQKTGQEVVFVAEPDNKNVYKFELDTSERKIEFDSASGTYTLYLIIGDATLKNPILWNVADVVIKFPEEEAPSTVLSQNLFTPKQEIQHLFREPEKRPPTVVSNTFTALILSPLLLLFALWIRIGANVSNFTFAPSTIIFHLGHAAMLGLMYVYWTQLNMFQTLKYLAILGSVTFLAGNRMLAQQAVKRIAAEQSSRLAKYRTLRTAH

SEQ ID NO: 9344 - protein, 1009 aa, Homo sapiens
MGSRIKQNPETTFEVYVEVAYPRTGGTLSDPEVQRQFPEDYSDQEVLQTLTKFCFPFYVDSLTVSQVGQNFTFVLTDIDSKQRFGFCRLSSGAKSCFCILSYLPWFEVFYKLLNILADYTTKRQENQWNELLETLHKLPIPDPGVSVHLSVHSYFTVPDTRELPSIPENRNLTEYFVAVDVNNMLHLYASMLYERRILIICSKLSTLTACIHGSAAMLYPMYWQHVYIPVLPPHLLDYCCAPMPYLIGIHLSLMEKVRNMALDDVVILNVDTNTLETPFDDLQSLPNDVISSLKNRLKKVSTTTGDGVARAFLKAQAAFFGSYRNALKIEPEEPITFCEEAFVSHYRSGAMRQFLQNATQLQLFKQFIDGRLDLLNSGEGFSDVFEEEINMGEYAGSDKLYHQWLSTVRKGSGAILNTVKTKANPAMKTVYKFAKDHAKMGIKEVKNRLKQKDIAENGCAPTPEEQLPKTAPSPLVEAKDPKLREDRRPITVHFGQVRPPRPHVVKRPKSNIAVEGRRTSVPSPEQPQPYRTLRESDSAEGDEAESPEQQVRKSTGPVPAPPDRAASIDLLEDVFSNLDMEAALQPLGQAKSLEDLRAPKDLREQPGTFDYQRLDLGGSERSRGVTVALKLTHPYNKLWSLGQDDMAIPSKPPAASPEKPSALLGNSLALPRRPQNRDSILNPSDKEEVPTPTLGSITIPRPQGRKTPELGIVPPPPIPRPAKLQAAGAALGDVSERLQTDRDRRAALSPGLLPGVVPQGPTELLQPLSPGPGAAGTSSDALLALLDPLSTAWSGSTLPSRPATPNVATPFTPQFSFPPAGTPTPFPQPPLNPFVPSMPAAPPTLPLVSTPAGPFGAPPASLGPAFASGLLLSSAGFCAPHRSQPNLSALSMPNLFGQMPMGTHTSPLQPLGPPAVAPSRIRTLPLARSSARAAETKQGLALRPGDPPLLPPRPPQGLEPTLQPSAPQQARDPFEDLLQKTKQDVSPSPALAPAPDSVEQLRKQWETFE

SEQ ID NO: 9345 - protein, 536 aa, Homo sapiens
METMASPGKDNYRMKSYKNNALNPEEMRRRREEEGIQLRKQKREQQLFKRRNVELINEEAAMFDSLLMDSYVSSTTGESVITREMVEMLFSDDSDLQLATTQKFRKLLSKEPSPPIDEVINTPRVVDRFVEFLKRNENCTLQFEAAWALTNIASGTSQQTKIVIEAGAVPIFIELLNSDFEDVQEQAVWALGNIAGDSSVCRDYVLNCSILNPLLTLLTKSTRLTMTRNAVWALSNLCRGKNPPPEFAKVSPCLPVLSRLLFSSDSDLLADACWALSYLSDGPNEKIQAVIDSGVCRRLVELLMHNDYKVASPALRAVGNIVTGDDIQTQVILNCSALPCLLHLLSSPKESIRKEACWTISNITAGNRAQIQAVIDANIFPVLIEILQKAEFRTRKEAAWAITNATSGGTPEQIRYLVSLGCIKPLCDLLTVMDSKIVQVALNGLENILRLGEQEGKRSGSGVNPYCGLIEEAYGLDKIEFLQSHENQEIYQKAFDLIEHYFGVEDDDSSLAPQVDETQQQFIFQQPEAPMEGFQL

SEQ ID NO: 9346 - protein, 389 aa, Homo sapiens
MGASDPEVAPWARGGAAGMAGAGAGAGARGGAAAGVEARARDPPPAHRAHPRHPRPAAQPSARRMDGGSGGLGSGDNAPTTEALFVALGAGVTALSHPLLYVKLLIQVGHEPMPPTLGTNVLGRKVLYLPSFFTYAKYIVQVDGKIGLFRGLSPRLMSNALSTVTRGSMKKVFPPDEIEQVSNKDDMKTSLKKVVKETSYEMMMQCVSRMLAHPLHVISMRCMVQFVGREAKYSGVLSSIGKIFKEEGLLGFFVGLIPHLLGDVVFLWGCNLLAHFINAYLVDDSVSDTPGGLGNDQNPGSQFSQALAIRSYTKFVMGIAVSMLTYPFLLVGDLMAVNNCGLQAGLPPYSPVFKSWIHCWKYLSVQGQLFRGSSLLFRRVSSGSCFALE

SEQ ID NO: 9347 - protein, 1285 aa, Homo sapiens
MALARPGTPDPQALASVLLLLLWAPALSLLAGTVPSEPPSACASDPCAPGTECQATESGGYTCGPMEPRGCATQPCHHGALCVPQGPDPTGFRCYCVPGFQGPRCELDIDECASRPCHHGATCRNLADRYECHCPLGYAGVTCEMEVDECASAPCLHGGSCLDGVGSFRCVCAPGYGGTRCQLDLDECQSQPCAHGGTCHDLVNGFRCDCAGTGYEGTHCEREVLECASAPCEHNASCLEGLGSFRCLCWPGYSGELCEVDEDECASSPCQHGGRCLQRSDPALYGGVQAAFPGAFSFRHAAGFLCHCPPGFEGADCGVEVDECASRPCLNGGHCQDLPNGFQCHCPDGYAGPTCEEDVDECLSDPCLHGGTCSDTVAGYICRCPETWGGRDCSVQLTGCQGHTCPLAATCIPIFESGVHSYVCHCPPGTHGPFCGQNTTFSVMAGSPIQASVPAGGPLGLALRFRTTLPAGTLATRNDTKESLELALVAATLQATLWSYSTTVLVLRLPDLALNDGHWHQVEVVLHLATLELRLWHEGCPARLCVASGPVALASTASATPLPAGISSAQLGDATFAGCLQDVRVDGHLLLPEDLGENVLLGCERREQCRPLPCVHGGSCVDLWTHFRCDCARPHRGPTCADEIPAATFGLGGAPSSASFLLQELPGPNLTVSFLLRTRESAGLLLQFANDSAAGLTVFLSEGRIRAEVPGSPAVVLPGRWDDGLRHLVMLSFGPDQLQDLGQHVHVGGRLLAADSQPWGGPFRGCLQDLRLDGCHLPFFPLPLDNSSQPSELGGRQSWNLTAGCVSEDMCSPDPCFNGGTCLVTWNDFHCTCPANFTGPTCAQQLWCPGQPCLPPATCEEVPDGFVCVAEATFREGPPAAFSGHNASSGRLLGGLSLAFRTRDSEAWLLRAAAGALEGVWLAVRNGSLAGGVRGGHGLPGAVLPIPGPRVADGAWHRVRLAMERPAATTSRWLLWLDGAATPVALRGLASDLGFLQGPGAVRILLAENFTGCLGRVALGGLPLPLARPRPGAAPGAREHFASWPGTPAPILGCRGAPVCAPSPCLHDGACRDLFDAFACACGPGWEGPRCEAHVDPCHSAPCARGRCHTHPDGRFECRCPPGFGGPRCRLPVPSKECSLNVTCLDGSPCEGGSPAANCSCLEGLAGQRCQVPTLPCEANPCLNGGTCRAAGGVSECICNARFSGQFCEVAKGLPLPLPFPLLEVAVPAACACLLLLLLGLLSGILAARKRRQSEGTYSPSQQEVAGARLEMDSVLKVPPEERLI

SEQ ID NO: 9348 - protein, 263 aa, Homo sapiens [sequence omitted]

SEQ ID NO: 9349 - protein, 1069 aa, Homo sapiens
MDDKASVGKISVSSDSVSTLNSEDFVLVSRQGDETPSTNNGSDDEKTGLKIVGNGSEQQLQKELADVLMDPPMDDQPGEKELVKRSQLDGEGDGPLSNQLSASSTINPVPLVGLQKPEMSLPVKPGQGDSEASSPFTPVADEDSVVFSKLTYLGCASVNAPRSEVEALRMMSILRSQCQISLDVTLSVPNVSEGIVRLLDPQTNTEIANYPIYKILFCVRGHDGTPESDCFAFTESHYNAELFRIHVFRCEIQEAVSRILYSFATAFRRSAKQTPLSATAAPQTPDSDIFTFSVSLEIKEDDGKGYFSAVPKDKDRQCFKLRQGIDKKIVIYVQQTTNKELAIERCFGLLLSPGKDVRNSDMHLLDLESMGKSSDGKSYVITGSWNPKSPHFQVVNEETPKDKVLFMTTAVDLVITEVQEPVRFLLETKVRVCSPNERLFWPFSKRSTTENFFLKLKQIKQRERKNNTDTLYEVVCLESESERERRKTTASPSVRLPQSGSQSSVIPSPPEDDEEEDNDEPLLSGSGDVSKECAEKILETWGELLSKWHLNLNVRPKQLSSLVRNGVPEALRGEVWQLLAGCHNNDHLVEKYRILITKESPQDSAITRDINRTFPAHDYFKDTGGDGQDSLYKICKAYSVYDEEIGYCQGQSFLAAVLLLHMPEEQAFSVLVKIMFDYGLRELFKQNFEDLHCKFYQLERLMQEYIPDLYNHFLDISLEAHMYASQWFLTLFTAKFPLYMVFHIIDLLLCEGISVIFNVALGLLKTSKDDLLLTDFEGALKFFRVQLPKRYRSEENAKKLMELACNMKISQKKLKKYEKEYHTMREQQAQQEDPIERFERENRRLQEANMRLEQENDDLAHELVTSKIALRKDLDNAEEKADALNKELLMTKQKLIDAEEEKRRLEEESAQLKEMCRRELDKAESEIKKNSSIIGDYKQICSQLSERLEKQQTANKVEIEKIRQKVDDCERCREFFNKEGRVKGISSTKEVLDEDTDEEKETLKNQLREMELELAQTKLQLVEAECKIQDLEHHLGLALNEVQAAKKTWFNRTLSSIKTATGVQGKETC

SEQ ID NO: 9350 - protein, 424 aa, Homo sapiens
MAAESDVLHFQFEQQGDVVLQKMNLLRQQNLFCDVSIYINDTEFQGHKVILAACSTFMRDQFLLTQSKHVRITILQSAEVGRKLLLSCYTGALEVKRKELLKYLTAASYLQMVHIVEKCTEALSKYLEIDLSMKNNNQHTDLCQSSDPDVKNEDENSDKDCEIIEISEDSPVNIDFHVKEEESNALQSTVESLTSERKEMKSPELSTVDIGFKDNEICILHVESISTAGVENGQFSQPCTSSKASMYFSETQHSLINSTVESRVAEVPGNQDQGLFCENTEGSYGTVSEIQNLEEGYSLRHQCPRCPRGFLHVENYLRHLKMHKLFLCLQCGKTFTQKKNLNRHIRGHMGIRPFQCTVCLKTFTAKSTLQDHLNIHSGDRPYKCHCCDMDFKHKSALKKHLTSVHGRSSGEKLSRPDLKRQSLL

SEQ ID NO: 9351 - protein, 369 aa, Homo sapiens
MKLKSLLLRYYPPGIMLEYEKHGELKTKSIDLLDLGPSTDVSALVEEIQKAEPLLTASRTEQVKLLIQRLQEKLGQNSNHTFYLFKVLKAHILPLTNVALNKSGSCFITGSYDRTCKLWDTASGEELNTLEGHRNVVYAIAFNNPYGDKIATGSFDKTCKLWSVETGKCYHTFRGHTAEIVCLSFNPQSTLVATGSMDTTAKLWDIQNGEEVYTLRGHSAEIISLSFNTSGDRIITGSFDHTVVVWDADTGRKVNILIGHCAEISSASFNWDCSLILTGSMDKTCKLWDATNGKCVATLTGHDDEILDSCFDYTGKLIATASADDGVSLCRPGWSAVARSWLTATCASQVQAILLPQPPELCHVLGNHV

SEQ ID NO: 9352 - protein, 966 aa, Homo sapiens
MWVSWAPGLWLLGLWATFGHGANTGAQCPPSQQEGLKLEHSSSLPANVTGFNLIHRLSLMKTSAIKKIRNPKGPLILRLGAAPVTQPTRRVFPRGLPEEFALVLTLLLKKHTHQKTWYLFQVTDANGYPQISLEVNSQERSLELRAQGQDGDFVSCIFPVPQLFDLRWHKLMLSVAGRVASVHVDCSSASSQPLGPRRPMRPVGHVFLGLDAEQGKPVSFDLQQVHIYCDPELVLEEGCCEILPAGCPPETSKARRDTQSNELIEINPQSEGKVYTRCFCLEEPQNSEVDAQLTGRISQKAERGAKVHQETAADECPPCVHGARDSNVTLAPSGPKGGKGERGLPGPPGSKGEKGARGNDCVRISPDAPLQCAEGPKGEKGESGALGPSGLPGSTGEKGQKGEKGDGGIKGVPGKPGRDGRPGEICVIGPKGQKGDPGFVGPEGLAGEPGPPGLPGPPGIGLPGTPGDPGGPPGPKGDKGSSGIPGKEGPGGKPGKPGVKGEKGDPCEVCPTLPEGFQNFVGLPGKPGPKGEPGDPVPARGDPGIQGIKGEKGEPCLSCSSVVGAQHLVSSTGASGDVGSPGFGLPGLPGRAGVPGLKGEKGNFGEAGPAGSPGPPGPVGPAGIKGAKGEPCEPCPALSNLQDGDVRVVALPGPSGEKGEPGPPGFGLPGKQGKAGERGLKGQKGDAGNPGDPGTPGTTGRPGLSGEPGVQGPAGPKGEKGDGCTACPSLQGTVTDMAGRPGQPGPKGEQGPEGVGRPGKPGQPGLPGVQGPPGLKGVQGEPGPPGRGVQGPQGEPGAPGLPGIQGLPGPRGPPGPTGEKGAQGSPGVKGATGPVGPPGASVSGPPGRDGQQGQTGLRGTPGEKGPRGEKGEPGECSCPSQGDLIFSGMPGPPGIPGPPGPPGVPGLQVKGEKRMRSLGGRAHGSGWLLPAGPQGCCSPTPKTQTCHFSLLCLPASQGGKEGPLSL

SEQ ID NO: 9353 - protein, 131 aa, Homo sapiens
MPPKGKSGSGKAGKGGAASGSDSADKKAQGPKGGGNAVKVRHILCEKHGKIMEAMEKLKSGMRFNEVAAQYSEDKARQGGDLGWMTRGSMVGPFQEAAFALPVSGMDKPVFTDPPVKTKFGYHIIMVEGRK

SEQ ID NO: 9354 - protein, 1604 aa, Homo sapiens
MWVSWAPGLWLLGLWATFGHGANTGAQCPPSQQEGLKLEHSSSLPANVTGFNLIHRLSLMKTSAIKKIRNPKGPLILRLGAAPVTQPTRRVFPRGLPEEFALVLTLLLKKHTHQKTWYLFQVTDANGYPQISLEVNSQERSLELRAQGQDGDFVSCIFPVPQLFDLRWHKLMLSVAGRVASVHVDCSSASSQPLGPRRPMRPVGHVFLGLDAEQGKPVSFDLQQVHIYCDPELVLEEGCCEILPAGCPPETSKARRDTQSNELIEINPQSEGKVYTRCFCLEEPQNSEVDAQLTGRISQKAERGAKVHQETAADECPPCVHGARDSNVTLAPSGPKGGKGERGLPGPPGSKGEKGARGNDCVRISPDAPLQCAEGPKGEKGESGALGPSGLPGSTGEKGQKGEKGDGGIKGVPGKPGRDGRPGEICVIGPKGQKGDPGFVGPEGLAGEPGPPGLPGPPGIGLPGTPGDPGGPPGPKGDKGSSGIPGKEGPGGKPGKPGVKGEKGDPCEVCPTLPEGFQNFVGLPGKPGPKGEPGDPVPARGDPGIQGIKGEKGEPCLSCSSVVGAQHLVSSTGASGDVGSPGFGLPGLPGRAGVPGLKGEKGNFGEAGPAGSPGPPGPVGPAGIKGAKGEPCEPCPALSNLQDGDVRVVALPGPSGEKGEPGPPGFGLPGKQGKAGERGLKGQKGDAGNPGDPGTPGTTGRPGLSGEPGVQGPAGPKGEKGDGCTACPSLQGTVTDMAGRPGQPGPKGEQGPEGVGRPGKPGQPGLPGVQGPPGLKGVQGEPGPPGRGVQGPQGEPGAPGLPGIQGLPGPRGPPGPTGEKGAQGSPGVKGATGPVGPPGASVSGPPGRDGQQGQTGLRGTPGEKGPRGEKGEPGECSCPSQGDLIFSGMPGAPGLWMGSSWQPGPQGPPGIPGPPGPPGVPGLQGVPGNNGLPGQPGLTAELGSLPIEQHLLKSICGDCVQGQRAHPGYLVEKGEKGDQGIPGVPGLDNCAQCFLSLERPRAEEARGDNSEGDPGCVGSPGLPGPPGLPGQRGEEGPPGMRGSPGPPGPIGPPGFPGAVGSPGLPGLQGERGLTGLTGDKGEPGPPGQPGYPGATGPPGLPGIKGERGYTGSAGEKGEPGPPGSEGLPGPPGPAGPRGERGPQGNSGEKGDQGFQGQPGFPGPPGPPGFPGKVGSPGPPGPQAEKGSEGIRGPSGLPGSPGPPGPPGIQGPAGLDGLDGKDGKPGLRGDPGPAGPPGLMGPPGFKGKTGHPGLPGPKGDCGKPGPPGSTGRPGAEGEPGAMGPQGRPGPPGHVGPPGPPGQPGPAGISAVGLKGDRGATGERGLAGLPGQPGPPGHPGPPGEPGTDGAAGKEGPPGKQGFYGPPGPKGDPGAAGQKGQAGEKGRAGMPGGPGKSGSMGPVGPPGPAGERGHPGAPGPSGSPGLPGVPGSMGDMVNYDEIKRFIRQEIIKMFDERMAYYTSRMQFPMEMAAAPGRPGPPGKDGAPGRPGAPGSPGLPGQIGREGRQGLPGVRGLPGTKGEKGDIGIGIAGENGLPGPPGPQGPPGYGKMGATGPMGQQGIPGIPGPPGPMGQPGKAGHCNPSDCFGAMPMEQQYPPMKTMKGPFG

SEQ ID NO: 9355 - protein, 463 aa, Homo sapiens
MHGSCSFLMLLLPLLLLLVATTGPVGALTDEEKRLMVELHNLYRAQVSPTASDMLHMRWDEELAAFAKAYARQCVWGHNKERGRRGENLFAITDEGMDVPLAMEEWHHEREHYNLSAATCSPGQMCGHYTQVVWAKTERIGCGSHFCEKLQGVEETNIELLVCNYEPPGNVKGKRPYQEGTPCSQCPSGYHCKNSLCEPIGSPEDAQDLPYLVTEAPSFRATEASDSRKMGTPSSLATGIPAFLVTEVSGSLATKALPAVETQAPTSLATKDPPSMATEAPPCVTTEVPSILAAHSLPSLDEEPVTFPKSTHVPIPKSADKVTDKTKVPSRSPENSLDPKMSLTGARELLPHAQEEAEAEAELPPSSEVLASVFPAQDKPGELQATLDHTGHTSSKSLPNFPNTSATANATGGRALALQSSLPGAEGPDKPSVVSGLNSGPGHVWGPLLGLLLLPPLVLAGIF

SEQ ID NO: 9356 - protein, 347 aa, Homo sapiens
MDLAANEISIYDKLSETVDLVRQTGHQCGMSEKAIEKFIRQLLEKNEPQRPPPQYPLLIVVYKVLATLGLILLTAYFVIQPFSPLAPEPVLSGAHTWRSLIHHIRLMSLPIAKKYMSENKGVPLHGGDEDRPFPDFDPWWTNDCEQNESEPIPANCTGCAQKHLKVMLLEDAPRKFERLHPLVIKTGKPLLEEEIQHFLCQYPEATEGFSEGFFAKWWRCFPERWFPFPYPWRRPLNRSQMLRELFPVFTHLPFPKDASLNKCSFLHPEPVVGSKMHKMPDLFIIGSGEAMLQLIPPFQCRRHCQSVAMPIEPGDIGYVDTTHWKVYVIARGVQPLVICDGTAFSEL

SEQ ID NO: 9357 - protein, 166 aa, Homo sapiens
MAAIPPDSWQPPNVYLETSMGIIVLELYWKHAPKTCKNFAELARRGYYNGTKFHRIIKDFMIQGGDPTGTGRGGASIYGKQFEDELHPDLKFTGAGILAMANAGPDTNGSQFFVTLAPTQWLDGKHTIFGRVCQGIGMVNRVGMVETNSQDRPVDDVKIIKAYPSG

SEQ ID NO: 9358 - protein, 1049 aa, Homo sapiens
MLCWGNASFGQLGLGGIDEEIVLEPRKSDFFINKRVRDVGCGLRHTVFVLDDGTVYTCGCNDLGQLGHEKSRKKPEQVVALDAQNIVAVSCGEAHTLALNDKGQVYAWGLDSDGQLGLVGSEECIRVPRNIKSLSDIQIVQVACGYYHSLALSKASEVFCWGQNKYGQLGLGTDCKKQTSPQLLKSLLGIPFMQVAAGGAHSFVLTLSGAIFGWGRNKFGQLGLNDENDRYVPNLLKSLRSQKIVYICCGEDHTAALTKEGGVFTFGAGGYGQLGHNSTSHEINPRKVFELMGSIVTEIACGRQHTSAFVPSSGRIYSFGLGGNGQLGTGSTSNRKSPFTVKGNWYPYNGQCLPDIDSEEYFCVKRIFSGGDQSFSHYSSPQNCGPPDDFRCPNPTKQIWTVNEALIQKWLSYPSGRFPVEIANEIDGTFSSSGCLNGSFLAVSNDDHYRTGTRFSGVDMNAARLLFHKLIQPDHPQISQQVAASLEKNLIPKLTSSLPDVEALRFYLTLPECPLMSDSNNFTTIAIPFGTALVNLEKAPLKVLENWWSVLEPPLFLKIVELFKEVVVHLLKLYKIGIPPSERRIFNSFLHTALKVLEILHRVNEKMGQIIQYDKFYIHEVQELIDIRNDYINWVQQQAYGMLADIPVTICTYPFVFDAQAKTTLLQTDAVLQMQMAIDQAHRQNVSSLFLPVIESVNPCLILVVRRENIVGDAMEVLRKTKNIDYKKPLKVIFVGEDAVDAGGVRKEFFLLIMRELLDPKYGMFRYYEDSRLIWFSDKTFEDSDLFHLIGVICGLAIYNCTIVDLHFPLALYKKLLKKKPSLDDLKELMPDVGRSMQQLLDYPEDDIEETFCLNFTITVENFGATEVKELVLNGADTAVNKQNRQEFVDAYVDYIFNKSVASLFDAFHAGFHKVCGGKVLLLFQPNELQAMVIGNTNYDWKELEKNTEYKGEYWAEHPTIKIFWEVFHELPLEKKKQFLLFLTGSDRIPILGMKSLKLVIQSTGGGEEYLPVSHTCFNLLDLPKYTEKETLRSKLIQAIDHNEGFSLI

SEQ ID NO: 9359 - protein, 284 aa, Homo sapiens
MASYPYRQGCPGAAGQAPGAPPGSYYPGPPNSGGQYGSGLPPGGGYGGPAPGGPYGPPAGGGPYGHPNPGMFPSGTPGGPYGGAAPGGPYGQPPPSSYGAQQPGLYGQGGAPPNVDPEAYSWFQSVDSDHSGYISMKELKQALVNCNWSSFNDETCLMMINMFDKTKSGRIDVYGFSALWKFIQQWKNLFQQYDRDRSGSISYTELQQALSQMGYNLSPQFTQLLVSRYCPRSANPAMQLDRFIQVCTQLQVLTEAFREKDTAVQGNIRLSFEDFVTMTASRML

SEQ ID NO: 9360 - protein, 455 aa, Homo sapiens
MGACLGACSLLSCASCLCGSAPCILCSCCPASRNSTVSRLIFTFFLFLGVLVSIIMLSPGVESQLYKLPWVCEEGAGIPTVLQGHIDCGSLLGYRAVYRMCFATAAFFFFFTLLMLCVSSSRDPRAAIQNGFWFFKFLILVGLTVGAFYIPDGSFTNIWFYFGVVGSFLFILIQLVLLIDFAHSWNQRWLGKAEECDSRAWYAGLFFFTLLFYLLSIAAVALMFMYYTEPSGCHEGKVFISLNLTFCVCVSIAAVLPKVQDAQPNSGLLQASVITLYTMFVTWSALSSIPEQKCNPHLPTQLGNETVVAGPEGYETQWWDAPSIVGLIIFLLCTLFISLRSSDHRQVNSLMQTEECPPMLDATQQQQQVAACEGRAFDNEQDGVTYSYSFFHFCLVLASLHVMMTLTNWYKPGETRKMISTWTAVWVKICASWAGLLLYLWTLVAPLLLRNRDFS

SEQ ID NO: 9361 - protein, 164 aa, Homo sapiens
MHRDSCPLDCKVYVGNLGNNGNKTELERAFGYYGPLRSVWVARNPPGFAFVEFEDPRDAADAVRELDGRTLCGCRVRVELSNGEKRSRNRGPPPSWGRRPRDDYRRRSPPPRRRSPRRRSFSRSRSRSLSRDRRRERSLSRERNHKPSRSFSRSRSRSRSNERK

SEQ ID NO: 9362 - protein, 1046 aa, Homo sapiens
MASSVGNVADSTEPTKRMLSFQGLAELAHREYQAGDFEAAERHCMQLWRQEPDNTGVLLLLSSIHFQCRRLDRSAHFSTLAIKQNPLLAEAYSNLGNVYKERGQLQEAIEHYRHALRLKPDFIDGYINLAAALVAAGDMEGAVQAYVSALQYNPDLYCVRSDLGNLLKALGRLEEAKACYLKAIETQPNFAVAWSNLGCVFNAQGEIWLAIHHFEKAVTLDPNFLDAYINLGNVLKEARIFDRAVAAYLRALSLSPNHAVVHGNLACVYYEQGLIDLAIDTYRRAIELQPHFPDAYCNLANALKEKGSVAEAEDCYNTALRLCPTHADSLNNLANIKREQGNIEEAVRLYRKALEVFPEFAAAHSNLASVLQQQGKLQEALMHYKEAIRISPTFADAYSNMGNTLKEMQDVQGALQCYTRAIQINPAFADAHSNLASIHKDSGNIPEAIASYRTALKLKPDFPDAYCNLAHCLQIVCDWTDYDERMKKLVSIVADQLEKNRLPSVHPHHSMLYPLSHGFRKAIAERHGNLCLDKINVLHKPPYEHPKDLKLSDGRLRVGYVSSDFGNHPTSHLMQSIPGMHNPDKFEVFCYALSPDDGTNFRVKVMAEANHFIDLSQIPCNGKAADRIHQDGIHILVNMNGYTKGARNELFALRPAPIQAMWLGYPGTSGALFMDYIITDQETSPAEVAEQYSEKLAYMPHTFFIGDHANMFPHLKKKAVIDFKSNGHIYDNRIVLNGIDLKAFLDSLPDVKIVKMKCPDGGDNADSSNTALNMPVIPMNTIAEAVIEMINRGQIQITINGFSISNGLATTQINNKAATGEEVPRTIIVTTRSQYGLPEDAIVYCNFNQLYKIDPSTLQMWANILKRVPNSVLWLLRFPAVGEPNIQQYAQNMGLPQNRIIFSPVAPKEEHVRRGQLADVCLDTPLCNGHTTGMDVLWAGTPMVTMPGETLASRVAASQLTCLGCLELIAKNRQEYEDIAVKLGTDLEYLKKVRGKVWKQRISSPLFNTKQYTMELERLYLQMWEHYAAGNKPDHMIKPVEVTESA

SEQ ID NO: 9363 - protein, 218 aa, Homo sapiens
MAYSAVPVRHFATKKAKAKGKGQSQTRVNINAALVEDIINLEEVNEEMKSVIEALKDNFNKTLNIRTSPGSLDKIAVVTADGKLALNQISQISMKSPQLILVNMASFPECTAAAIKAIRESGMNLNPEVEGTLIRVPIPQVTREHREMLVKLAKQNTNKAKDSLRKVRTNSMNKLKKSKDTVSEDTIRLIEKQISQMADDTVAELDRHLAVKTKELLG

SEQ ID NO: 9364 - protein, 419 aa, Homo sapiens
MNVHRGSDSDRLLRQEASCLVDDTLAVAQEKEANSLASSGPHNLTYPLGPRNEDLSLDYASQPANLQFPHIMPLAEDIKGSCFQSGNKRNHEPFIAPERFGNSSVGFGSNSHSQAPEKVTLLVDGTRFVVNPQIFTAHPDTMLGRMFGPGREYNFTRPNEKGEYEIAEGISATVFRTVLDYYKTGIINCPDGISIPDLRDTCDYLCINFDFNTIRCQDLSALLHELSNDGAHKQFDHYLEELILPIMVGCAKKGERECHIVVLTDEDSVDWDEDHPPPMGEEYSQILYSSKLYRFFKYIENRDVAKTVLKERGLKNIRIGIEGYPTCKEKIKRRPGGRSEVIYNYVQRPFIQMSWEKEEGKSRHVDFQCVRSKSLTNLVAAGDDVLEDQEILMHHPPQVDELDRLNAPLSQMASNDFQD

SEQ ID NO: 9365 - protein, 1224 aa, Homo sapiens
MPLPPPGPGPEPIPGCTAPTQSPVGRHVVGVKGVGGMSVACVLKRKAVLWQDSFSPHLKHHPQEPANPNMPVVLTSGTGSQAQPQPAANQALAAGTHSSPVPGSIGVAGRSQDDAMVDYFFQRQHGEQLGGGGSGGGGYNNSKHRWPTGDNIHAEHQVRSMDELNHDFQALALEGRAMGEQLLPGKKFWETDESSKDGPKGIFLGDQWRDSAWGTSDHSVSQPIMVQRRPGQSFHVNSEVNSVLSPRSESGGLGVSMVEYVLSSSPGDSCLRKGGFGPRDADSDENDKGEKKNKGTFDGDKLGDLKEEGDVMDKTNGLPVQNGIDADVKDFSRTPGNCQNSANEVDLLGPNQNGSEGLAQLTSTNGAKPVEDFSNMESQSVPLDPMEHVGMEPLQFDYSGTQVPVDSAAATVGLFDYNSQQQLFQRPNALAVQQLTAAQQQQYALAAAHQPHIGLAPAAFVPNPYIISAAPPGTDPYTAGLAAAATLGPAVVPHQYYGVTPWGVYPASLFQQQAAAAAAATNSANQQTTPQAQQGQQQVLRGGASQRPLTPNQNQQGQQTDPLVAAAAVNSALAFGQGLAAGMPGYPVLAPAAYYDQTGALVVNAGARNGLGAPVRLVAPAPVIISSSAAQAAVAAAAASANGAAGGLAGTTNGPFRPLGTQQPQPQPQQQPNNNLASSSFYGNNSLNSNSQSSSLFSQGSAQPANTSLGFGSSSSLGATLGSALGGFGTAVANSNTGSGSRRDSLTGSSDLYKRTSSSLTPIGHSFYNGLSFSSSPGPVGMPLPSQGPGHSQTPPPSLSSHGSSSSLNLGGLTNGSGRYISAAPGAEAKYRSASSASSLFSPSSTLFSSSRLRYGMSDVMPSGRSRLLEDFRNNRYPNLQLREIAGHIMEFSQDQHGSRFIQLKLERATPAERQLVFNEILQAAYQLMVDVFGNYVIQKFFEFGSLEQKLALAERIRGHVLSLALQMYGCRVIQKALEFIPSDQQVINEMVRELDGHVLKCVKDQNGNHVVQKCIECVQPQSLQFIIDAFKGQVFALSTHPYGCRVIQRILEHCLPDQTLPILEELHQHTEQLVQDQYGNYVIQHVLEHGRPEDKSKIVAEIRGNVLVLSQHKFASNVVEKCVTHASRTERAVLIDEVCTMNDGPHSALYTMMKDQYANYVVQKMIDVAEPGQRKIVMHKIRPHIATLRKYTYGKHILAKLEKYYMKNGVDLGPICGPPNGII

SEQ ID NO: 9366 - protein, 1189 aa, Homo sapiens
MSVACVLKRKAVLWQDSFSPHLKHHPQEPANPNMPVVLTSGTGSQAQPQPAANQALAAGTHSSPVPGSIGVAGRSQDDAMVDYFFQRQHGEQLGGGGSGGGGYNNSKHRWPTGDNIHAEHQVRSMDELNHDFQALALEGRAMGEQLLPGKKFWETDESSKDGPKGIFLGDQWRDSAWGTSDHSVSQPIMVQRRPGQSFHVNSEVNSVLSPRSESGGLGVSMVEYVLSSSPGDSCLRKGGFGPRDADSDENDKGEKKNKGTFDGDKLGDLKEEGDVMDKTNGLPVQNGIDADVKDFSRTPGNCQNSANEVDLLGPNQNGSEGLAQLTSTNGAKPVEDFSNMESQSVPLDPMEHVGMEPLQFDYSGTQVPVDSAAATVGLFDYNSQQQLFQRPNALAVQQLTAAQQQQYALAAAHQPHIAGLAPAAFVPNPYIISAAPPGTDPYTAGLAAAATLGPAVVPHQYYGVTPWGVYPASLFQQQAAAAAAATNSANQQTTPQAQQGQQQVLRGGASQRPLTPNQNQQGQQTDPLVAAAAVNSALAFGQGLAAGMPGYPVLAPAAYYDQTGALVVNAGARNGLGAPVRLVAPAPVIISSSAAQAAVAAAAASANGAAGGLAGTTNGPFRPLGTQQPQPQPQQQPNNNLASSSFYGNNSLNSNSQSSSLFSQGSAQPANTSLGFGSSSSLGATLGSALGGFGTAVANSNTGSGSRRDSLTGSSDLYKRTSSSLTPIGHSFYNGLSFSSSPGPVGMPLPSQGPGHSQTPPPSLSSHGSSSSLNLGGLTNGSGRYISAAPGAEAKYRSASSASSLFSPSSTLFSSSRLRYGMSDVMPSGRSRLLEDFRNNRYPNLQLREIAGHIMEFSQDQHGSRFIQLKLERATPAERQLVFNEILQAAYQLMVDVFGNYVIQKFFEFGSLEQKLALAERIRGHVLSLALQMYGCRVIQKALEFIPSDQQVINEMVRELDGHVLKCVKDQNGNHVVQKCIECVQPQSLQFIIDAFKGQVFALSTHPYGCRVIQRILEHCLPDQTLPILEELHQHTEQLVQDQYGNYVIQHVLEHGRPEDKSKIVAEIRGNVLVLSQHKFASNVVEKCVTHASRTERAVLIDEVCTMNDGPHSALYTMMKDQYANYVVQKMIDVAEPGQRKIVMHKIRPHIATLRKYTYGKHILAKLEKYYMKNGVDLGPICGPPNGII

SEQ ID NO: 9367 - protein, 255 aa, Homo sapiens
MVSWMISRAVVLVFGMLYPAYYSYKAVKTKNVKEYVRWMMYWIVFALYTVIETVADQTVAWFPLYYELKIAFVIWLLSPYTKGASLIYRKFLHPLLSSKEREIDDYIVQAKERGYETMVNFGRQGLNLAATAAVTAAVKSQGAITERLRSFSMHDLTTIQGDEPVGQRPYQPLPEAKKKSKPAPSESAGYGIPLKDGDEKTDEEAEGPYSDNEMLTHKGLRRSQSMKSVKTTKGRKEVRYGSLKYKVKKRPQVYF

SEQ ID NO: 9368 - protein, 496 aa, Homo sapiens
MRVLSGTSLMLCSLLLLLQALCSPGLAPQSRGHLCRTRPTDLVFVVDSSRSVRPVEFEKVKVFLSQVIESLDVGPNATRVGMVNYASTVKQEFSLRAHVSKAALLQAVRRIQPLSTGTMTGLAIQFAITKAFGDAEGGRSRSPDISKVVIVVTDGRPQDSVQDVSARARASGVELFAIGVGSVDKATLRQIASEPQDEHVDYVESYSVIEKLSRKFQEAFCVVSDLCATGDHDCEQVCISSPGSYTCACHEGFTLNSDGKTCNVCSGGGGSSATDLVFLIDGSKSVRPENFELVKKFISQIVDTLDVSDKLAQVGLVQYSSSVRQEFPLGRFHTKKDIKAAVRNMSYMEKGTMTGAALKYLIDNSFTVSSGARPGAQKVGIVFTDGRSQDYINDAAKKAKDLGFKMFAVGVGNAVEDELREIASEPVAEHYFYTADFKTINQIGKKLQKKICVEEDPCACESLVKFQAKVEGLLQALTRKLEAVSKRLAILENTVV

SEQ ID NO: 9369 - protein, 172 aa, Homo sapiens
MPGIVELPTLEELKVDEVKISSAVLKAAAHHYGAQCDKPNKEFMLCRWEEKDPRRCLEEGKLVNKCALDFFRQIKRHCAEPFTEYWTCIDYTGQQLFRHCRKQQAKFDECVLDKLGWVRPDLGELSKVTKVKTDRPLPENPYHSRPRPDPSPEIEGDLQPATHGSRFYFWTK

SEQ ID NO: 9370 - protein, 1436 aa, Homo sapiens
MARAQALVLALTFQLCAPETETPAAGCTFEEASDPAVPCEYSQAQYDDFQWEQVRIHPGTRAPADLPHGSYLMVNTSQHAPGQRAHVIFQSLSENDTHCVQFSYFLYSRDGHSPGTLGVYVRVNGGPLGSAVWNMTGSHGRQWHQAELAVSTFWPNEYQVLFEALISPDRRGYMGLDDILLLSYPCAKAPHFSRLGDVEVNAGQNASFQCMAAGRAAEAERFLLQRQSGALVPAAGVRHISHRRFLATFPLAAVSRAEQDLYRCVSQAPRGAGVSNFAELIVKEPPTPIAPPQLLRAGPTYLIIQLNTNSIIGDGPIVRKEIEYRMARGPWAEVHAVSLQTYKLWHLDPDTEYEISVLLTRPGDGGTGRPGPPLISRTKCAEPMRAPKGLAFAEIQARQLTLQWEPLGYNVTRCHTYTVSLCYHYTLGSSHNQTIRECVKTEQGVSRYTIKNLLPYRNVHVRLVLTNPEGRKEGKEVTFQTDEDVPSGIAAESLTFTPLEDMIFLKWEEPQEPNGLITQYEISYQSIESSDPAVNVPGPRRTISKLRNETYHVFSNLHPGTTYLFSVRARTGKGFGQAALTEITTNISAPSFDYADMPSPLGESENTITVLLRPAQGRGAPISVYQVIVEEERARRLRREPGGQDCFPVPLTFEAALARGLVHYFGAELAASSLPEAMPFTVGDNQTYRGFWNPPLEPRKAYLIYFQAASHLKGETRLNCIRIARKAACKESKRPLEVSQRSEEMGLILGICAGGLAVLILLLGAIIVIIRKGKPVNMTKATVNYRQEKTHMMSAVDRSFTDQSTLQEDERLGLSFMDTHGYSTRGDQRSGGVTEASSLLGGSPRRPCGRKGSPYHTGQLHPAVRVADLLQHINQMKTAEGYGFKQEYESFFEGWDATKKKDKVKGSRQEPMPAYDRHRVKLHPMLGDPNADYINANYIDGYHRSNHFIATQGPKPEMVYDFWRMVWQEHCSSIVMITKLVEVGRVKCSRYWPEDSDTYGDIKIMLVKTETLAEYVVRTFALERRGYSARHEVRQFHFTAWPEHGVPYHATGLLAFIRRVKASTPPDAGPIVIHCSAGTGRTGCYIVLDVMLDMAECEGVVDIYNCVKTLCSRRVNMIQTEEQYIFIHDAILEACLCGETTIPVSEFKATYKEMIRIDPQSNSSQLREEFQTLNSVTPPLDVEECSIALLPRNRDKNRSMDVLPPDRCLPFLISTDGDSNNYINAALTDSYTRSAAFIVTLHPLQSTTPDFWRLVYDYGCTSIVMLNQLNQSNSAWPCLQYWPEPGRQQYGLMEVEFMSGTADEDLVARVFRVQNISRLQEGHLLVRHFQFLRWSAYRDTPDSKKAFLHLLAEVDKWQAESGDGRTIVHCLNGGGRSGTFCACATVLEMIRCHNLVDVFFAAKTLRNYKPNMVETMDQYHFCYDVALEYLEGLESR

SEQ ID NO: 9371 - protein, 270 aa, Homo sapiens
MPRDNMASLIQRIARQACLTFRGSGGGRGASDRDAASGPEAPMQPGFPENLSKLKSLLTQLRAEDLNIAPRKATLQPLPPNLPPVTYMHIYETDGFSLGVFLLKSGTSIPLHDHPGMHGMLKVLYGTVRISCMDKLDAGGGQRPRALPPEQQFEPPLQPREREAVRPGVLRSRAEYTEASGPCILTPHRDNLHQIDAVEGPAAFLDILAPPYDPDDGRDCHYYRVLEPVRPKEASSSACDLPREVWLLETPQADDFWCEGEPYPGPKVFP

SEQ ID NO: 9372 - protein, 1872 aa, Homo sapiens
MGPGCDLLLRTAATITAAAIMSDTDSDEDSAGGGPFSLAGFLFGNINGAGQLEGESVLDDECKKHLAGLGALGLGSLITELTANEELTGTDGALVNDEGWVRSTEDAVDYSDINEVAEDESRRYQQTMGSLQPLCHSDYDEDDYDADCEDIDCKLMPPPPPPPGPMKKDKDQDSITGEKVDFSSSSDSESEMGPQEATQAESEDGKLTLPLAGIMQHDATKLLPSVTELFPEFRPGKVLRFLRLFGPGKNVPSVWRSARRKRKKKHRELIQEEQIQEVECSVESEVSQKSLWNYDYAPPPPPEQCLSDDEITMMAPVESKFSQSTGDIDKVTDTKPRVAEWRYGPARLWYDMLGVPEDGSGFDYGFKLRKTEHEPVIKSRMIEEFRKLEENNGTDLLADENFLMVTQLHWEDDIIWDGEDVKHKGTKPQRASLAGWLPSSMTRNAMAYNVQQGFAATLDDDKPWYSIFPIDNEDLVYGRWEDNIIWDAQAMPRLLEPPVLTLDPNDENLILEIPDEKEEATSNSPSKESKKESSLKKSRILLGKTGVIKEEPQQNMSQPEVKDPWNLSNDEYYYPKQQGLRGTFGGNIIQHSIPAVELRQPFFPTHMGPIKLRQFHRPPLKKYSFGALSQPGPHSVQPLLKHIKKKAKMREQERQASGGGEMFFMRTPQDLTGKDGDLILAEYSEENGPLMMQVGMATKIKNYYKRKPGKDPGAPDCKYGETVYCHTSPFLGSLHPGQLLQAFENNLFRAPIYLHKMPETDFLIIRTRQGYYIRELVDIFVVGQQCPLFEVPGPNSKRANTHIRDFLQVFIYRLFWKSKDRPRRIRMEDIKKAFPSHSESSIRKRLKLCADFKRTGMDSNWWVLKSDFRLPTEEEIRAMVSPEQCCAYYSMIAAEQRLKDAGYGEKSFFAPEEENEEDFQMKIDDEVRTAPWNTTRAFIAAMKGKCLLEVTGVADPTGCGEGFSYVKIPNKPTQQKDDKEPQPVKKTVTGTDADLRRLSLKNAKQLLRKFGVPEEEIKKLSRWEVIDVVRTMSTEQARSGEGPMSKFARGSRFSVAEHQERYKEECQRIFDLQNKVLSSTEVLSTDTDSSSAEDSDFEEMGKNIENMLQNKKTSSQLSREREEQERKELQRMLLAAGSAASGNNHRDDDTASVTSLNSSATGRCLKIYRTFRDEEGKEYVRCETVRKPAVIDAYVRIRTTKDEEFIRKFALFDEQHREEMRKERRRIQEQLRRLKRNQEKEKLKGPPEKKPKKMKERPDLKLKCGACGAIGHMRTNKFCPLYYQTNAPPSNPVAMTEEQEEELEKTVIHNDNEELIKVEGTKIVLGKQLIESADEVRRKSLVLKFPKQQLPPKKKRRVGTTVHCDYLNRPHKSIHRRRTDPMVTLSSILESIINDMRDLPNTYPFHTPVNAKVVKDYYKIITRPMDLQTLRENVRKRLYPSREEFREHLELIVKNSATYNGPKHSLTQISQSMLDLCDEKLKEKEDKLARLEKAINPLLDDDDQVAFSFILDNIVTQKMMAVPDSWPFHHPVNKKFVPDYYKVIVNPMDLETIRKNISKHKYQSRESFLDDVNLILANSVKYNGPESQYTKTAQEIVNVCYQTLTEYDEHLTQLEKDICTAKEAALEEAELESLDPMTPGPYTPQPPDLYDTNTSLSMSRDASVFQDESNMSVLDIPSATPEKQVTQEGEDGDGDLADEEEGTVQQPQASVLYEDLLMSEGEDDEEDAGSDEEGDNPFSAIQLSESGSDSDVGSGGIRPKQPRMLQENTRMDMENEESMMSYEGDGGEASHGLEDSNISYGSYEEPDPKSNTQDTSFSSIGGYEVSEEEEDEEEEEQRSGPSVLSQVHLSEDEEDSEDFHSIAGDSDLDSDE

SEQ ID NO: 9373 - protein, 297 aa, Homo sapiens
MLAAPINPSDINMIQGNYGFLPELPAVGGNEGVAQVVAVGSNVTGLKPGDWVIPANAGLGTWRTEAVFSEEALIQVPSDIPLQSAATLGVNPCTAYRMLMDFEQLQPGDSVIQNASNSGVGQAVIQIAAALGLRTINVVRDRPDIQKLSDRLKSLGAEHVITEEELRRPEMKNFFKDMPQPRLALNCVGGKSSTELLRQLARGGTMVTYGGMAKQPVVASVSLLIFKDLKLRGFWLSQWKKDHSPDQFKELILTLCDLIRRGQLTAPACSQVPLQDYQSALEASMKPFISSKQILTM

SEQ ID NO: 9374 - protein, 494 aa, Homo sapiens
MPRVYIGRLSYQARERDVERFFKGYGKILEVDLKNGYGFVEFDDLRDADDAVYELNGKDLCGERVIVEHARGPRRDGSYGSGRSGYGYRRSGRDKYGPPTRTEYRLIVENLSSRCSWQDLKDYMRQAGEVTYADAHKGRKNEGVIEFVSYSDMKRALEKLDGTEVNGRKIRLVEDKPGSRRRRSYSRSRSHSRSRSRSRHSRKSRSRSGSSKSSHSKSRSRSRSGSRSRSKSRSRSQSRSRSKKEKSRSPSKEKSRSRSHSAGKSRSKSKDQAEEKIQNNDNVGKPKSRSPSRHKSKSKSRSRSQERRVEEEKRGSVSRGRSQEKSLRQSRSRSRSKGGSRSRSRSRSKSKDKRKGRKRSREESRSRSRSRSKSERSRKRGSKRDSKAGSSKKKKKEDTDRSQSRSPSRSVSKEREHAKSESSQREGRGESENAGTNQETRSRSRSNSKSKPNLPSESRSRSKSASKTRSRSKSRSRSASRSPSRSRSRSHSRS

SEQ ID NO: 9375 - protein, 579 aa, Homo sapiens
MSASSLLEQRPKGQGNKVQNGSVHQKDGLNDDDFEPYLSPQARPNNAYTAMSDSYLPSYYSPSIGFSYSLGEAAWSTGGDTAMPYLTSYGQLSNGEPHFLPDAMFGQPGALGSTPFLGQHGFNFFPSGIDFSAWGNNSSQGQSTQSSGYSSNYAYAPSSLGGAMIDGQSAFANETLNKAPGMNTIDQGMAALKLGSTEVASNVPKVVGSAVGSGSITSNIVASNSLPPATIAPPKPASWADIASKPAKQQPKLKTKNGIAGSSLPPPPIKHNMDIGTWDNKGPVAKAPSQALVQNIGQPTQGSPQPVGQQANNSPPVAQASVGQQTQPLPPPPPQPAQLSVQQQAAQPTRWVAPRNRGSGFGHNGVDGNGVGQSQAGSGSTPSEPHPVLEKLRSINNYNPKDFDWNLKHGRVFIIKSYSEDDIHRSIKYNIWCSTEHGNKRLDAAYRSMNGKGPVYLLFSVNGSGHFCGVAEMKSAVDYNTCAGVWSQDKWKGRFDVRWIFVKDVPNSQLRHIRLENNENKPVTNSRDTQEVPLEKAKQVLKIIASYKHTTSIFDDFSHYEKRQEEEESVKKERQGRGK

SEQ ID NO: 9376 - protein, 782 aa, Homo sapiens
MAPHRPAPALLCALSLALCALSLPVRAATASRGASQAGAPQGRVPEARPNSMVVEHPEFLKAGKEPGLQIWRVEKFDLVPVPTNLYGDFFTGDAYVILKTVQLRNGNLQYDLHYWLGNECSQDESGAAAIFTVQLDDYLNGRAVQHREVQGFESATFLGYFKSGLKYKKGGVASGFKHVVPNEVVVQRLFQVKGRRVVRATEVPVSWESFNNGDCFILDLGNNIHQWCGSNSNRYERLKATQVSKGIRDNERSGRARVHVSEEGTEPEAMLQVLGPKPALPAGTEDTAKEDAANRKLAKLYKVSNGAGTMSVSLVADENPFAQGALKSEDCFILDHGKDGKIFVWKGKQANTEERKAALKTASDFITKMDYPKQTQVSVLPEGGETPLFKQFFKNWRDPDQTDGLGLSYLSSHIANVERVPFDAATLHTSTAMAAQHGMDDDGTGQKQIWRIEGSNKVPVDPATYGQFYGGDSYIILYNYRHGGRQGQIIYNWQGAQSTQDEVAASAILTAQLDEELGGTPVQSRVVQGKEPAHLMSLFGGKPMIIYKGGTSREGGQTAPASTRLFQVRANSAGATRAVEVLPKAGALNSNDAFVLKTPSAAYLWVGTGASEAEKTGAQELLRVLRAQPVQVAEGSEPDGFWEALGGKAAYRTSPRLKDKKMDAHPPRLFACSNKIGRFVIEEVPGELMQEDLATDDVMLLDTWDQVFVWVGKDSQEEEKTEALTSAKRYIETDPANRDRRTPITVVKQGFEPPSFVGWFLGWDDDYWSVDPLDRAMAELAA

SEQ ID NO: 9377 - protein, 731 aa, Homo sapiens
MVVEHPEFLKAGKEPGLQIWRVEKFDLVPVPTNLYGDFFTGDAYVILKTVQLRNGNLQYDLHYWLGNECSQDESGAAAIFTVQLDDYLNGRAVQHREVQGFESATFLGYFKSGLKYKKGGVASGFKHVVPNEVVVQRLFQVKGRRVVRATEVPVSWESFNNGDCFILDLGNNIHQWCGSNSNRYERLKATQVSKGIRDNERSGRARVHVSEEGTEPEAMLQVLGPKPALPAGTEDTAKEDAANRKLAKLYKVSNGAGTMSVSLVADENPFAQGALKSEDCFILDHGKDGKIFVWKGKQANTEERKAALKTASDFITKMDYPKQTQVSVLPEGGETPLFKQFFKNWRDPDQTDGLGLSYLSSHIANVERVPFDAATLHTSTAMAAQHGMDDDGTGQKQIWRIEGSNKVPVDPATYGQFYGGDSYIILYNYRHGGRQGQIIYNWQGAQSTQDEVAASAILTAQLDEELGGTPVQSRVVQGKEPAHLMSLFGGKPMIIYKGGTSREGGQTAPASTRLFQVRANSAGATRAVEVLPKAGALNSNDAFVLKTPSAAYLWVGTGASEAEKTGAQELLRVLRAQPVQVAEGSEPDGFWEALGGKAAYRTSPRLKDKKMDAHPPRLFACSNKIGRFVIEEVPGELMQEDLATDDVMLLDTWDQVFVWVGKDSQEEEKTEALTSAKRYIETDPANRDRRTPITVVKQGFEPPSFVGWFLGWDDDYWSVDPLDRAMAELAA

SEQ ID NO: 9378 - protein, 655 aa, Homo sapiens
MERKVLALQARKKRTKAKKDKAQRKSETQHRGSAPHSESDLPEQEEEILGSDDDEQEDPNDYCKGGYHLVKIGDLFNGRYHVIRKLGWGHFSTVWLSWDIQGKKFVAMKVVKSAEHYTETALDEIRLLKSVRNSDPNDPNREMVVQLLDDFKISGVNGTHICMVFEVLGHHLLKWIIKSNYQGLPLPCVKKIIQQVLQGLDYLHTKCRIIHTDIKPENILLSVNEQYIRRLAAEATEWQRSGAPPPSGSAVSTAPQPKPADKMSKNKKKKLKKKQKRQAELLEKRMQEIEEMEKESGPGQKRPNKQEESESPVERPLKENPPNKMTQEKLEESSTIGQDQTLMERDTEGGAAEINCNGVIEVINYTQNSNNETLRHKEDLHNANDCDVQNLNQESSFLSSQNGDSSTSQETDSCTPITSEVSDTMVCQSSSTVGQSFSEQHISQLQESIRAEIPCEDEQEQEHNGPLDNKGKSTAGNFLVNPLEPKNAEKLKVKIADLGNACWVHKHFTEDIQTRQYRSLEVLIGSGYNTPADIWSTACMAFELATGDYLFEPHSGEEYTRDEDHIALIIELLGKVPRKLIVAGKYSKEFFTKKGDLKHITKLKPWGLFEVLVEKYEWSQEEAAGFTDFLLPMLELIPEKRATAAECLRHPWLNS

SEQ ID NO: 9379 - protein, 287 aa, Homo sapiens
MAASLWMGDLEPYMDENFISRAFATMGETVMSVKIIRNRLTGIPAGYCFVEFADLATAEKCLHKINGKPLPGATPAKRFKLNYATYGKQPDNSPEYSLFVGDLTPDVDDGMLYEFFVKVYPSCRGGKVVLDQTGVSKGYGFVKFTDELEQKRALTECQGAVGLGSKPVRLSVAIPKASRVKPVEYSQMYSYSYNQYYQQYQNYYAQWGYDQNTGSYSYSYPQYGYTQSTMQTYEEVGDDALEDPMPQLDVTEANKEFMEQSEELYDALMDCHWQPLDTVSSEIPAMM

SEQ ID NO: 9380 - protein, 421 aa, Homo sapiens
MSPKRIAKRRSPPADAIPKSKKVKVSHRSHSTEPGLVLTLGQGDVGQLGLGENVMERKKPALVSIPEDVVQAEAGGMHTVCLSKSGQVYSFGCNDEGALGRDTSVEGSEMVPGKVELQEKVVQVSAGDSHTAALTDDGRVFLWGSFRDNNGVIGLLEPMKKSMVPVQVQLDVPVVKVASGNDHLVMLTADGDLYTLGCGEQGQLGRVPELFANRGGRQGLERLLVPKCVMLKSRGSRGHVRFQDAFCGAYFTFAISHEGHVYGFGLSNYHQLGTPGTESCFIPQNLTSFKNSTKSWVGFSGGQHHTVCMDSEGKAYSLGRAEYGRLGLGEGAEEKSIPTLISRLPAVSSVACGASVGYAVTKDGRVFAWGMGTNYQLGTGQDEDAWSPVEMMGKQLENRVVLSVSSGGQHTVLLVKDKEQS

SEQ ID NO: 9381 - protein, 702 aa, Homo sapiens
MEDPFEEADQPTTEPGMVLDSVEAGDTTPPTKRKSKFSGFGKIFKPWKWRKKKSSDKFKETSEVLERKISMRKPREELVKRGVLLEDPEQGGEDPGKPSDAMLKNGHTTPIGNARSSSPVQVEEEPVRLASLRKAIPEEDLKKRLGSTGSQPNSEAESVPENVPKPPLLPPKRPLSSSHEASEGQAKDATSSGGTARFIISTSITTAPAATTAATSLAKTVNLSVTPSPAPRTLPAAPASTNTTATPSLTHMVPAKQPPIPPPKPAHRNSNPVIAELSQAINSGTLLSKPSPPLPPKRGIPSTSVPTLESAAAITTKTPSDEREKSTCSMGSELLPMISPRSPSPPLPTHIPPEPPRTPPFPAKTFQVVPEIEFPPSLDLHQEIPQQEDQKKEVPKRILDQNFGEPHIPSRLPPLPLHIRIQQALTSPLPMTPILEGSHRAHSLLFENSDSFSEDSSTLGRTRSLPITIEMLKVPDDEEEEEQTCPSTFSEEMTPTSVIPKLPQCLREEEEKESDSDSEGPIQYRDEEDEDESYQSALANKVKRKDTLAMKLNHRPSEPELNLNSWPCKSKEEWNEIRHQIGNTLIRRLSQRPTPEELEQRNILQPKNEADRQAEKREIKRRLTRKLSQRPTVAELLARKILRFNEYVEVTDAQDYDRRADKPWTKLTPADKAAIRKELNEFKSSEMEVHEESKHFTRYHRP

SEQ ID NO: 9382 - protein, 215 aa, Homo sapiens
MATAPYNYSYIFKYIIIGDMGVGKSCLLHQFTEKKFMADCPHTIGVEFGTRIIEVSGQKIKLQIWDTAGQERFRAVTRSYYRGAAGALMVYDITRRSTYNHLSSWLTDARNLTNPNTVIILIGNKADLEAQRDVTYEEAKQFAEENGLLFLEASAKTGENVEDAFLEAAKKIYQNIQDGSLDLNAAESGVQHKPSAPQGGRLTSEPQPQREGCGC

SEQ ID NO: 9383 - protein, 208 aa, Homo sapiens [sequence omitted]

SEQ ID NO: 9384 - protein, 121 aa, Homo sapiens
MMLPQWLLLLFLLFFFLFLLTRGSLSPTKYNLLELKESCIRNQDCETGCCQRAPDNCESHCAEKGSEGSLCQTQVFFGQYRACPCLRNLTCIYSKNEKWLSIAYGRCQKIGRQKLAKKMFF

SEQ ID NO: 9385 - protein, 573 aa, Homo sapiens
MEEEQDLPEQPVKKAKMQESGEQTISQVSNPDVSDQKPETSSLASNLPMSEEIMTCTDYIPRSSNDYTSQMYSAKPYAHILSVPVSETAYPGQTQYQTLQQTQPYAVYPQATQTYGLPPFGALWPGMKPESGLIQTPSPSQHSVLTCTTGLTTSQPSPAHYSYPIQASSTNASLISTSSTIANIPAAAVASISNQDYPTYTILGQNQYQACYPSSSFGVTGQTNSDAESTTLAATTYQSEKPSVMAPAPAAQRLSSGDPSTSPSLSQTTPSKDTDDQSRKNMTSKNRGKRKADATSSQDSELERVFLWDLDETIIIFHSLLTGSYAQKYGKDPTVVIGSGLTMEEMIFEVADTHLFFNDLEECDQVHVEDVASDDNGQDLSNYSFSTDGFSGSGGSGSHGSSVGVQGGVDWMRKLAFRYRKVREIYDKHKSNVGGLLSPQRKEALQRLRAEIEVLTDSWLGTALKSLLLIQSRKNCVNVLITTTQLVPALAKVLLYGLGEIFPIENIYSATKIGKESCFERIVSRFGKKVTYVVIGDGRDEEIAAKQHNMPFWRITNHGDLVSLHQALELDFL

SEQ ID NO: 9386 - protein, 237 aa, Homo sapiens
MSDSDLGEDEGLLSLAGKRKRRGNLPKESVKILRDWLYLHRYNAYPSEQEKLSLSGQTNLSVLQICNWFINARRRLLPDMLRKDGKDPNQFTISRRGGKASDVALPRGSSPSVLAVSVPAPTNVLSLSVCSMPLHSGQGEKPAAPFPRGELESPKPLVTPGSTLTLLTRAEAGSPTGGLFNTPPPTPPEQDKEDFSSFQLLVEVALQRAAEMELQKQQDPSLPLLHTPIPLVSENPQ

SEQ ID NO: 9387 - protein, 1025 aa, Homo sapiens
MKASSGDQGSPPCFLRFPRPVRVVSGAEAELKCVVLGEPPPVVVWEKGGQQLAASERLSFPADGAEHGLLLTAALPTDAGVYVCRARNAAGEAYAAAAVTVLEPPASDPELQPAERPLPSPGSGEGAPVFLTGPRSQWVLRGAEVVLTCRAGGLPEPTLYWEKDGMALDEVWDSSHFALQPGRAEDGPGASLALRILAARLPDSGVYVCHARNAHGHAQAGALLQVHQPPESPPADPDEAPAPVVEPLKCAPKTFWVNEGKHAKFRCYVMGKPEPEIEWHWEGRPLLPDRRRLMYRDRDGGFVLKVLYCQAKDRGLYVCAARNSAGQTLSAVQLHVKEPRLRFTRPLQDVEGREHGIAVLECKVPNSRIPTAWFREDQRLLPCRKYEQIEEGTVRRLIIHRLKADDDGIYLCEMRGRVRTVANVTVKGPILKRLPRKLDVLEGENAVLLVETLEAGVEGRWSRDGEELPVICQSSSGHMHALVLPGVTREDAGEVTFSLGNSRTTTLLRVKCVKHSPPGPPILAEMFKGHKNTVLLTWKPPEPAPETPFIYRLERQEVGSEDWIQCFSIEKAGAVEVPGDCVPSEGDYRFRICTVSGHGRSPHVVFHGSAHLVPTARLVAGLEDVQVYDGEDAVFSLDLSTIIQGTWFLNGEELKSNEPEGQVEPGALRYRIEQKGLQHRLILHAVKHQDSGALVGFSCPGVQDSAALTIQESPVHILSPQDRVSLTFTTSERVVLTCELSRVDFPATWYKDGQKVEESELLVVKMDGRKHRLILPEAKVQDSGEFECRTEGVSAFFGVTVQDPPVHIVDPREHVFVHAITSECVMLACEVDREDAPVRWYKDGQEVEESDFVVLENEGPHRRLVLPATQPSDGGEFQCVAGDECAYFTVTITDVSSWIVYPSGKVYVAAVRLERVVLTCELCRPWAEVRWTKDGEEVVESPALLLQKEDTVRRLVLPAVQLEDSGEYLCEIDDESASFTVTVTESYQSQDSSNNNPELCVLLKKPKTRRLWSRFPPWRRTAGTE

SEQ ID NO: 9388 - protein, 1804 aa, Homo sapiens
MKASSGDQGSPPCFLRFPRPVRVVSGAEAELKCVVLGEPPPVVVWEKGGQQLAASERLSFPADGAEHGLLLTAALPTDAGVYVCRARNAAGEAYAAAAVTVLEPPASDPELQPAERPLPSPGSGEGAPVFLTGPRSQWVLRGAEVVLTCRAGGLPEPTLYWEKDGMALDEVWDSSHFALQPGRAEDGPGASLALRILAARLPDSGVYVCHARNAHGHAQAGALLQVHQPPESPPADPDEAPAPVVEPLKCAPKTFWVNEGKHAKFRCYVMGKPEPEIEWHWEGRPLLPDRRRLMYRDRDGGFVLKVLYCQAKDRGLYVCAARNSAGQTLSAVQLHVKEPRLRFTRPLQDVEGREHGIAVLECKVPNSRIPTAWFREDQRLLPCRKYEQIEEGTVRRLIIHRLKADDDGIYLCEMRGRVRTVANVTVKGPILKRLPRKLDVLEGENAVLLVETLEAGVEGRWSRDGEELPVICQSSSGHMHALVLPGVTREDAGEVTFSLGNSRTTTLLRVKCVKHSPPGPPILAEMFKGHKNTVLLTWKPPEPAPETPFIYRLERQEVGSEDWIQCFSIEKAGAVEVPGDCVPSEGDYRFRICTVSGHGRSPHVVFHGSAHLVPTARLVAGLEDVQVYDGEDAVFSLDLSTIIQGTWFLNGEELKSNEPEGQVEPGALRYRIEQKGLQHRLILHAVKHQDSGALVGFSCPGVQDSAALTIQESPVHILSPQDRVSLTFTTSERVVLTCELSRVDFPATWYKDGQKVEESELLVVKMDGRKHRLILPEAKVQDSGEFECRTEGVSAFFGVTVQDPPVHIVDPREHVFVHAITSECVMLACEVDREDAPVRWYKDGQEVEESDFVVLENEGPHRRLVLPATQPSDGGEFQCVAGDECAYFTVTITDVSSWIVYPSGKVYVAAVRLERVVLTCELCRPWAEVRWTKDGEEVVESPALLLQKEDTVRRLVLPAVQLEDSGEYLCEIDDESASFTVTVTEPPVRIIYPRDEVTLIAVTLECVVLMCELSREDAPVRWYKDGLEVEESEALVLERDGPRCRLVLPAAQPEDGGEFVCDAGDDSAFFTVTVTAPPERIVHPAARSLDLHFGAPGRVELRCEVAPAGSQVRWYKDGLEVEASDALQLGAEGPTRTLTLPHAQPEDAGEYVCETRHEAITFNVILAEPPVQFLALETTPSPLCVAPGEPVVLSCELSRAGAPVVWSHNGRPVQEGEGLELHAEGPRRVLCIQAAGPAHAGLYTCQSGAAPGAPSLSFTVQVAEPLLVKLVSELTPLTVHEGDDATFRCEVSPPDADVTWLRNGAVVTPGPQVEMAQNGSSRILTLRGCQLGDAGTVTLRAGSTATSARLHVRETELLFLRRLQDVRAEEGQDVCLEVETGRVGAAGAVRWVRGGQPLPHDSRLSMAQDGHIHRLFIHGVILADQGTYGCESHHDRTLARLSVRPRQLRVLRPLEDVTISEGGSATFQLELSQEGVTGEWARGGVQLYPGPKCHIHSDGHRHRLVLNGLGLADSGCVSFTADSLRCAARLIVREVPVTIVRGPHDLEVTEGDTATFECELSQALADVTWEKDGNALTPSPRLRLQALGTRRLLQLRRCGPSDAGTYSCAVGTARAGPVRLTVRERTVAVLSELRSVSAREGDGATFECTVSEVETTGRWELGGRPLRPGARVRIRQEGKKHILVLSELRAEDAGEVRFQAGPAQSLALLEVEALPLQMCRHPPREKTVLVGRRAVLEVTVSRSGGHVCWLREGAELCPGDKYEMRSHGPTHSLVIHDVRPEDQGTYCCQAGQDSTHTRLLVEGN

SEQ ID NO: 9389 - protein, 974 aa, Homo sapiens
MAAQGEPGYLAAQSDPGSNSERSTDSPVPGSEDDLVAGATLHSPEWSEERFRVDRKKLEAMLQAAAEGKGRSGEDFFQKIMEETNTQIAWPSKLKIGAKSKKDPHIKVSGKKEDVKEAKEMIMSVLDTKSNRVTLKMDVSHTEHSHVIGKGGNNIKKVMEETGCHIHFPDSNRNNQAEKSNQVSIAGQPAGVESARVRIRELLPLVLMFELPIAGILQPVPDPNSPSIQHISQTYNISVSFKQRSRMYGATVIVRGSQNNTSAVKEGTAMLLEHLAGSLASAIPVSTQLDIAAQHHLFMMGRNGSNIKHIMQRTGAQIHFPDPSNPQKKSTVYLQGTIESVCLARQYLMGCLPLVLMFDMKEEIEVDPQFIAQLMEQLDVFISIKPKPKQPSKSVIVKSVERNALNMYEARKCLLGLESSGVTIATSPSPASCPAGLACPSLDILASAGLGLTGLGLLGPTTLSLNTSTTPNSLLNALNSSVSPLQSPSSGTPSPTLWAPPLANTSSATGFSAIPHLMIPSTAQATLTNILLSGVPTYGHTAPSPPPGLTPVDVHINSMQTEGKKISAALNGHAQSPDIKYGAISTSSLGEKVLSANHGDPSIQTSGSEQTSPKSSPTEGCNDAFVEVGMPRSPSHSGNAGDLKQMMCPSKVSCAKRQTVELLQGTKNSHLHSTDRLLSDPELSATESPLADKKAPGSERAAERAAAAQQNSERAHLAPRSSYVNMQAFDYEQKKLLATKAMLKKPVVTEVRTPTNTWSGLGFSKSMPAETIKELRRANHVSYKPTMTTTYEGSSMSLSRSNSREHLGGGSESDNWRDRNGIGPGSHSEFAASIGSPKRKQNKSTEHYLSSSNYMDCISSLTGSNGCNLNSSFKGSDLPELFSKLGLGKYTDVFQQQEIDLQTFLTLTDQDLKELGITTFGARRKMLLAISELNKNRRKLFESPNARTSFLEGGASGRLPRQYHSDIASVSGRW

SEQ ID NO: 9390 - protein, 416 aa, Homo sapiens
MASSSGSSPRPAPDENEFPFGCPPTVCQDPKEPRALCCAGCLSENPRNGEDQICPKCRGEDLQSISPGSRLRTQEKAHPEVAEAGIGCPFAGVGCSFKGSPQSVQEHEVTSQTSHLNLLLGFMKQWKARLGCGLESGPMALEQNLSDLQLQAAVEVAGDLEVDCYRAPCSESQEELALQHFMKEKLLAELEGKLRVFENIVAVLNKEVEASHLALATSIHQSQLDRERILSLEQRVVELQQTLAQKDQALGKLEQSLRLMEEASFDGTFLWKITNVTRRCHESACGRTVSLFSPAFYTAKYGYKLCLRLYLNGDGTGKRTHLSLFIVIMRGEYDALLPWPFRNKVTFMLLDQNNREHAIDAFRPDLSSASFQRPQSETNVASGCPLFFPLSKLQSPKHAYVKDDTMFLKCIVETST

SEQ ID NO: 9391 - protein, 373 aa, Homo sapiens
MRLLAWLIFLANWGGARAEPGKFWHIADLHLDPDYKVSKDPFQVCPSAGSQPVPDAGPWGDYLCDSPWALINSSIYAMKEIEPEPDFILWTGDDTPHVPDEKLGEAAVLEIVERLTKLIREVFPDTKVYAALGNHDFHPKNQFPAGSNNIYNQIAELWKPWLSNESIALFKKGAFYCEKLPGPSGAGRIVVLNTNLYYTSNALTADMADPGQQFQWLEDVLTDASKAGDMVYIVGHVPPGFFEKTQNKAWFREGFNEKYLKVVRKHHRVIAGQFFGHHHTDSFRMLYDDAGVPISAMFITPGVTPWKTTLPGVVNGANNPAIRVFEYDRATLSLKVRSPAEARGGGWEGLKCITTFPHSQLIHLPLTTEPQEG

SEQ ID NO: 9392 - protein, 298 aa, Homo sapiens
MRASLLLSVLRPAGPVAVGISLGFTLSLLSVTWVEEPCGPGPPQPGDSELPPRGNTNAARRPNSVQPGAEREKPGAGEGAGENWEPRVLPYHPAQPGQAAKKAVRTRYISTELGIRQRLLVAVLTSQTTLPTLGVAVNRTLGHRLERVVFLTGARGRRAPPGMAVVTLGEERPIGHLHLALRHLLEQHGDDFDWFFLVPDTTYTEAHGLARLTGHLSLASAAHLYLGRPQDFIGGEPTPGRYCHGGFGVLLSRMLLQQLRPHLEGCRNDIVSARPDEWLGRCILDATGVGCTGDHEVG

SEQ ID NO: 9393 - protein, 455 aa, Homo sapiens
MRLLAWLIFLANWGGARAEPGKFWHIADLHLDPDYKVSKDPFQVCPSAGSQPVPDAGPWGDYLCDSPWALINSSIYAMKEIEPEPDFILWTGDDTPHVPDEKLGEAAVLEIVERLTKLIREVFPDTKVYAALGNHDFHPKNQFPAGSNNIYNQIAELWKPWLSNESIALFKKGAFYCEKLPGPSGAGRIVVLNTNLYYTSNALTADMADPGQQFQWLEDVLTDASKAGDMVYIVGHVPPGFFEKTQNKAWFREGFNEKYLKVVRKHHRVIAGQFFGHHHTDSFRMLYDDAGVPISAMFITPGVTPWKTTLPGVVNGANNPAIRVFEYDRATLSLKDMVTYFMNLSQANAQGTPRWELEYQLTEAYGVPDASAHSMHTVLDRIAGDQSTLQRYYVYNSVSYSAGVCDEACSMQHVCAMRQVDIDAYTTCLYASGTTPVPQLPLLLMALLGLCTLVL

SEQ ID NO: 9394 - protein, 580 aa, Homo sapiens
MENRALDPGTRDSYGATSHLPNKGALAKVKNNFKDLMSKLTEGQYVLCRWTDGLYYLGKIKRVSSSKQSCLVTFEDNSKYWVLWKDIQHAGVPGEEPKCNICLGKTSGPLNEILICGKCGLGYHQQCHIPIAGSADQPLLTPWFCRRCIFALAVRKGGALKKGAIARTLQAVKMVLSYQPEELEWDSPHRTNQQQCYCYCGGPGEWYLRMLQCYRCRQWFHEACTQCLNEPMMFGDRFYLFFCSVCNQGPEYIERLPLRWVDVVHLALYNLGVQSKKKYFDFEEILAFVNHHWELLQLGKLTSTPVTDRGPHLLNALNSYKSRFLCGKEIKKKKCIFRLRIRVPPNPPGKLLPDKGLLPNENSASSELRKRGKSKPGLLPHEFQQQKRRVYRRKRSKFLLEDAIPSSDFTSAWSTNHHLASIFDFTLDEIQSLKSASSGQTFFSDVDSTDAASTSGSASTSLSYDSRWTVGSRKRKLAAKAYMPLRAKRWAAELDGRCPSDSSAEGASVPERPDEGIDSHTFESISEDDSSLSHLKSSITNYFGAAGRLACGEKYQVLARRVTPEGKVQYLVEWEGTTPY

SEQ ID NO: 9395 - protein, 278 aa, Homo sapiens
MGRGDRNKRSIRGFESYGSSSYGGAGGYTQSPGGFGSPAPSQAEKKSRARAQHIVPCTISQLLSATLVDEVFRIGNVEISQVTIVGIIRHAEKAPTNIVYKIDDMTAAPMDVRQWVDTDDTSSENTVVPPETYVKVAGHLRSFQNKKSLVAFKIMPLEDMNEFTTHILEVINAHMVLSKANSQPSAGRAPISNPGMSEAGNFGGNSFMPANGLTVAQNQVLNLIKACPRPEGLNFQDLKNQLKHMSVSSIKQAVDFLSNEGHIYSTVDDDHFKSTDAE

SEQ ID NO: 9396 - protein, 217 aa, Homo sapiens
MSSKVSRDTLYEAVREVLHGNQRKRRKFLETVELQISLKNYDPQKDKRFSGTVRLKSTPRPKFSVCVLGDQQHCDEAKAVDIPHMDIEALKKLNKNKKLVKKLAKKYDAFLASESLIKQIPRILGPGLNKAGKFPSLLTHNENMVAKVDEVKSTIKFQMKKVLCLAVAVGHVKMTDDELVYNIHLAVNFLVSLLKKNWQNVRALYIKSTMGKPQRLY

SEQ ID NO: 9397 - protein, 147 aa, Homo sapiens
MALKRIQKELSDLQRDPPAHCSAGPVGDDLFHWQATIMGPPDSAYQGGVFFLTVHFPTDYPFKPPKIAFTTKIYHPNINSNGSICLDILRSQWSPALTVSKVLLSICSLLCDPNPDDPLVPDIAQIYKSDKEKYNRHAREWTQKYAM

SEQ ID NO: 9398 - protein, 270 aa, Homo sapiens
MWNSGFESYGSSSYGGAGGYTQSPGGFGSPAPSQAEKKSRARAQHIVPCTISQLLSATLVDEVFRIGNVEISQVTIVGIIRHAEKAPTNIVYKIDDMTAAPMDVRQWVDTDDTSSENTVVPPETYVKVAGHLRSFQNKKSLVAFKIMPLEDMNEFTTHILEVINAHMVLSKANSQPSAGRAPISNPGMSEAGNFGGNSFMPANGLTVAQNQVLNLIKACPRPEGLNFQDLKNQLKHMSVSSIKQAVDFLSNEGHIYSTVDDDHFKSTDAE

SEQ ID NO: 9399 - protein, 473 aa, Homo sapiens
MLKAVILIGGPQKGTRFRPLSFEVPKPLFPVAGVPMIQHHIEACAQVPGMQEILLIGFYQPDEPLTQFLEAAQQEFNLPVRYLQEFAPLGTGGGLYHFRDQILAGSPEAFFVLNADVCSDFPLSAMLEAHRRQRHPFLLLGTTANRTQSLNYGCIVENPQTHEVLHYVEKPSTFISDIINCGIYLFSPEALKPLRDVFQRNQQDGQLEDSPGLWPGAGTIRLEQDVFSALAGQGQIYVHLTDGIWSQIKSAGSALYASRLYLSRYQDTHPERLAKHTPGGPWIRGTQPAPIPNLWLPPQPSEPGFLTSSPELKPQSLPLPDQIRFGIFAPRASLLLLGNVYIHPTAKVAPSAVLGPNVSIGKGVTVGEGVRLRESIVLHGATLQEHTCVLHSIVGWGSTVGRWARVEGTPSDPNPNDPRARMDSESLFKDGKLLPAITILGCRVRIPAEVLILNSIVLPHKELSRSFTNQIIL

SEQ ID NO: 9400 - protein, 602 aa, Homo sapiens
MNGGAERAMRSLPSLGGLALLCCAAAAAAAAVASAASAGNVTGGGGAAGQVDASPGPGLRGEPSHPFPRATAPTAQAPRTGPPRATVHRPLAATSPAQSPETTPLWATAGPSSTTFQAPLGPSPTTPPAAERTSTTSQAPTRPAPTTLSTTTGPAPTTPVATTVPAPTTPRTPTPDLPSSSNSSVLPTPPATEAPSSPPPEYVCNCSVVGSLNVNRCNQTTGQCECRPGYQGLHCETCKEGFYLNYTSGLCQPCDCSPHGALSIPCNSSGKCQCKVGVIGSICDRCQDGYYGFSKNGCLPCQCNNRSASCDALTGACLNCQENSKGNHCEECKEGFYQSPDATKECLRCPCSAVTSTGSCSIKSSELEPECDQCKDGYIGPNCNKCENGYYNFDSICRKCQCHGHVDPVKTPKICKPESGECINCLHNTTGFWCENCLEGYVHDLEGNCIKKEVILPTPEGSTILVSNASLTTSVPTPVINSTFTPTTLQTIFSVSTSENSTSALADVSWTQFNIIILTVIIIVVVLLMGFVGAVYMYREYQNRKLNAPFWTIELKEDNISFSSYHDSIPNADVSGLLEDDGNEVAPNGQLTLTTPIHNYKA

SEQ ID NO: 9401 - protein, 108 aa, Homo sapiens
MSLTSSSSVRVEWIAAVTIAAGTAAIGYLAYKRFYVKDHRNKAMINLHIQKDNPKIVHAFDMEDLGDKAVYCRCWRSKKFPFCDGAHTKHNEETGDNVGPLIIKKKET

SEQ ID NO: 9402 - protein, 276 aa, Homo sapiens
MSYGPLDMYRNPGPSGPQLRDFSSIIQTCSGNIQRISQATAQIKNLMSQLGTKQDSSKLQENLQQLQHSTNQLAKETNELLKELGSLPLPLSTSEQRQQRLQKERLMNDFSAALNNFQAVQRRVSEKEKESIARARAGSRLSAEERQREEQLVSFDSHEEWNQMQSQEDEVAITEQDLELIKERETAIRQLEADILDVNQIFKDLAMMIHDQGDLIDSIEANVESSEVHVERATEQLQRAAYYQKKSRKKMCILVLVLSVIILILGLIIWLVYKTK

SEQ ID NO: 9403 - protein, 277 aa, Homo sapiens
MEAAETEAEAAALEVLAEVAGILEPVGLQEEAELPAKILVEFVVDSQKKDKLLCSQLQVADFLQNILAQEDTAKGLDPLASEDTSRQKAIAAKEQWKELKATYREHVEAIKIGLTKALTQMEEAQRKRTQLREAFEQLQAKKQMAMEKRRAVQNQWQLQQEKHLQHLAEVSAEVRERKTGTQQELDRVFQKLGNLKQQAEQERDKLQRYQTFLQLLYTLQGKLLFPEAEAEAENLPDDKPQQPTRPQEQSTGDTMGRDPGVSFKAVGLQPAGDVNLP

SEQ ID NO: 9404 - protein, 307 aa, Homo sapiens
MAALYACTKCHQRFPFEALSQGQQLCKECRIAHPVVKCTYCRTEYQQESKTNTICKKCAQNVQLYGTPKPCQYCNIIAAFIGNKCQRCTNSEKKYGPPYSCEQCKQQCAFDRKDDRKKVDGKLLCWLCTLSYKRVLQKTKEQRKHLSSSSRAGHQEKEQYSRLSGGGHYNSQKTLSTSSIQNEIPKKKSKFESITTNGDSFSPDLALDSPGTDHFVIIAQLKEEVATLKKMLHQKDQMILEKEKKITELKADFQYQESQMRAKMNQMEKTHKEVTEQLQAKNRELLKQAAALSKSKKSEKSGAITSP

SEQ ID NO: 9405 - protein, 961 aa, Homo sapiens
MFRQFYLWTCLASGIILGSLFEICLGQYDDDCKLARGGPPATIVAIDEESRNGTILVDNMLIKGTAGGPDPTIELSLKDNVDYWVLMDPVKQMLFLNSTGRVLDRDPPMNIHSIVVQVQCINKKVGTIIYHEVRIVVRDRNDNSPTFKHESYYATVNELTPVGTTIFTGFSGDNGATDIDDGPNGQIEYVIQYNPDDPTSNDTFEIPLMLTGNIVLRKRLNYEDKTRYFVIIQANDRAQNLNERRTTTTTLTVDVLDGDDLGPMFLPCVLVPNTRDCRPLTYQAAIPELRTPEELNPIIVTPPIQAIDQDRNIQPPSDRPGILYSILVGTPEDYPRFFHMHPRTAELSLLEPVNRDFHQKFDLVIKAEQDNGHPLPAFAGLHIEILDENNQSPYFTMPSYQGYILESAPVGATISDSLNLTSPLRIVALDKDIEDTKDPELHLFLNDYTSVFTVTQTGITRYLTLLQPVDREEQQTYTFSITAFDGVQESEPVIVNIQVMDANDNTPTFPEISYDVYVYTDMRPGDSVIQLTAVDADEGSNGEITYEILVGAQGDFIINKTTGLITIAPGVEMIVGRTYALTVQAADNAPPAERRNSICTVYIEVLPPNNQSPPRFPQLMYSLEISEAMRVGAVLLNLQATDREGDSITYAIENGDPQRVFNLSETTGILTLGKALDRESTDRYILIITASDGRPDGTSTATVNIVVTDVNDNAPVFDPYLPRNLSVVEEEANAFVGQVKATDPDAGINGQVHYSLGNFNNLFRITSNGSIYTAVKLNREVRDYYELVVVATDGAVHPRHSTLTLAIKVLDIDDNSPVFTNSTYTVLVEENLPAGTTILQIEAKDVDLGANVSYRIRSPEVKHFFALHPFTGELSLLRSLDYEAFPDQEASITFLVEAFDIYGTMPPGIATVTVIVKDMNDYPPVFSKRIYKGMVAPDAVKGTPITTVYAEDADPPVSRRH

SEQ ID NO: 9406 - protein, 654 aa, Homo sapiens
MFRQFYLWTCLASGIILGSLFEICLGQYDDDCKLARGGPPATIVAIDEESRNGTILVDNMLIKGTAGGPDPTIELSLKDNVDYWVLMDPVKQMLFLNSTGRVLDRDPPMNIHSIVVQVQCINKKVGTIIYHEVRIVVRDRNDNSPTFKHESYYATVNELTPVGTTIFTGFSGDNGATDIDDGPNGQIEYVIQYNPDDPTSNDTFEIPLMLTGNIVLRKRLNYEDKTRYFVIIQANDRAQNLNERRTTTTTLTVDVLDGDDLGPMFLPCVLVPNTRDCRPLTYQAAIPELRTPEELNPIIVTPPIQAIDQDRNIQPPSDRPGILYSILVGTPEDYPRFFHMHPRTAELSLLEPVNRDFHQKFDLVIKAEQDNGHPLPAFAGLHIEILDENNQSPYFTMPSYQGYILESAPVGATISDSLNLTSPLRIVALDKDIEDTKDPELHLFLNDYTSVFTVTQTGITRYLTLLQPVDREEQQTYTFSITAFDGVQESEPVIVNIQVMDANDNTPTFPEISYDVYVYTDMRPGDSVIQLTAVDADEGSNGEITYEILVGAQGDFIINKTTGLITIAPGVEMIVGRTYALTVQAADNAPPAERRNSICTVYIEVLPPNNQSPPRFPQLMYSLEISEAMRVGAVLLNLQHGDSNLRESTGQGKH

SEQ ID NO: 9407 - protein, 1962 aa, Homo sapiens
MFRQFYLWTCLASGIILGSLFEICLGQYDDDWQYEDCKLARGGPPATIVAIDEESRNGTILVDNMLIKGTAGGPDPTIELSLKDNVDYWVLMDPVKQMLFLNSTGRVLDRDPPMNIHSIVVQVQCINKKVGTIIYHEVRIVVRDRNDNSPTFKHESYYATVNELTPVGTTIFTGFSGDNGATDIDDGPNGQIEYVIQYNPDDPTSNDTFEIPLMLTGNIVLRKRLNYEDKTRYFVIIQANDRAQNLNERRTTTTTLTVDVLDGDDLGPMFLPCVLVPNTRDCRPLTYQAAIPELRTPEELNPIIVTPPIQAIDQDRNIQPPSDRPGILYSILVGTPEDYPRFFHMHPRTAELSLLEPVNRDFHQKFDLVIKAEQDNGHPLPAFAGLHIEILDENNQSPYFTMPSYQGYILESAPVGATISDSLNLTSPLRIVALDKDIEDTKDPELHLFLNDYTSVFTVTQTGITRYLTLLQPVDREEQQTYTFSITAFDGVQESEPVIVNIQVMDANDNTPTFPEISYDVYVYTDMRPGDSVIQLTAVDADEGSNGEITYEILVGAQGDFIINKTTGLITIAPGVEMIVGRTYALTVQAADNAPPAERRNSICTVYIEVLPPNNQSPPRFPQLMYSLEISEAMRVGAVLLNLQATDREGDSITYAIENGDPQRVFNLSETTGILTLGKALDRESTDRYILIITASDGRPDGTSTATVNIVVTDVNDNAPVFDPYLPRNLSVVEEEANAFVGQVKATDPDAGINGQVHYSLGNFNNLFRITSNGSIYTAVKLNREVRDYYELVVVATDGAVHPRHSTLTLAIKVLDIDDNSPVFTNSTYTVLVEENLPAGTTILQIEAKDVDLGANVSYRIRSPEVKHFFALHPFTGELSLLRSLDYEAFPDQEASITFLVEAFDIYGTMPPGIATVTVIVKDMNDYPPVFSKRIYKGMVAPDAVKGTPITTVYAEDADPPGLPASRVRYRVDDVQFPYPASIFEVEEDSGRVITRVNLNEEPTTIFKLVVVAFDDGEPVMSSSATVKILVLHPGEIPRFTQEEYRPPPVSELATKGTMVGVISAAAINQSIVYSIVSGNEEDTFGINNITGVIYVNGPLDYETRTSYVLRVQADSLEVVLANLRVPSKSNTAKVYIEIQDENNHPPVFQKKFYIGGVSEDARMFTSVLRVKATDKDTGNYSVMAYRLIIPPIKEGKEGFVVETYTGLIKTAMLFHNMRRSYFKFQVIATDDYGKGLSGKADVLVSVVNQLDMQVIVSNVPPTLVEKKIEDLTEILDRYVQEQIPGAKVVVESIGARRHGDAFSLEDYTKCDLTVYAIDPQTNRAIDRNELFKFLDGKLLDINKDFQPYYGEGGRILEIRTPEAVTSIKKRGESLGYTEGALLALAFIIILCCIPAILVVLVSYRQFKVRQAECTKTARIQAALPAAKPAVPAPAPVAAPPPPPPPPPGAHLYEELGDSSMHNLFLLYHFQQSRGNNSVSEDRKHQQVVMPFSSNTIEAHKSAHVDGSLKSNKLKSARKFTFLSDEDDLSAHNPLYKENISQVSTNSDISQRTDFVDPFSPKIQAKSKSLRGPREKIQRLWSQSVSLPRRLMRKVPNRPEIIDLQQWQGTRQKAENENTGICTNKRGSSNPLLTTEEANLTEKEEIRQGETLMIEGTEQLKSLSSDSSFCFPRPHFSFSTLPTVSRTVELKSEPNVISSPAECSLELSPSRPCVLHSSLSRRETPICMLPIETERNIFENFAHPPNISPSACPLPPPPPISPPSPPPAPAPLAPPPDISPFSLFCPPPSPPSIPLPLPPPTFFPLSVSTSGPPTPPLLPPFPTPLPPPPPSIPCPPPPSASFLSTECVCITGVKCTTNLMPAEKIKSSMTQLSTTTVCKTDPQREPKGILRHVKNLAELEKSVANMYSQIEKNYLRTNVSELQTMCPSEVTNMEITSEQNKGSLNNIVEGTEKQSHSQSTSL

SEQ ID NO: 9408 - protein, 320 aa, Homo sapiens
MNWRFVELLYFLFIWGRISVQPSHQEPAGTDQHVSKEFDWLISDRGPFHHSRSYLSFVERHRQGFTTRYKIYREFARWKVRNTAIERRDLVRHPVPLMPEFQRSIRLLGRRPTTQQFIDTIIKKYGTHLLISATLGGEEALTMYMDKSRLDRKSGNATQSVEALHQLASSYFVDRDGTMRRLHEIQISTGAIKVTETRTGPLGCNSYDNLDSVSSVLLQSTESKLHLQGLQIIFPQYLQEKFVQSALSYIMCNGEGEYLCQNSQCRCQCAEEFPQCNCPITDIQIMEYTLANMAKSWAEAYKDLENSGRESHSVPLHEWP

SEQ ID NO: 9409 - protein, 1677 aa, Homo sapiens
MFRQFYLWTCLASGIILGSLFEICLGQYDDDCKLARGGPPATIVAIDEESRNGTILVDNMLIKGTAGGPDPTIELSLKDNVDYWVLMDPVKQMLFLNSTGRVLDRDPPMNIHSIVVQVQCINKKVGTIIYHEVRIVVRDRNDNSPTFKHESYYATVNELTPVGTTIFTGFSGDNGATDIDDGPNGQIEYVIQYNPDDPTSNDTFEIPLMLTGNIVLRKRLNYEDKTRYFVIIQANDRAQNLNERRTTTTTLTVDVLDGDDLGPMFLPCVLVPNTRDCRPLTYQAAIPELRTPEELNPIIVTPPIQAIDQDRNIQPPSDRPGILYSILVGTPEDYPRFFHMHPRTAELSLLEPVNRDFHQKFDLVIKAEQDNGHPLPAFAGLHIEILDENNQSPYFTMPSYQGYILESAPVGATISDSLNLTSPLRIVALDKDIEDTKDPELHLFLNDYTSVFTVTQTGITRYLTLLQPVDREEQQTYTFSITAFDGVQESEPVIVNIQVMDANDNTPTFPEISYDVYVYTDMRPGDSVIQLTAVDADEGSNGEITYEILVGAQGDFIINKTTGLITIAPGVEMIVGRTYALTVQAADNAPPAERRNSICTVYIEVLPPNNQSPPRFPQLMYSLEISEAMRVGAVLLNLQATDREGDSITYAIENGDPQRVFNLSETTGILTLGKALDRESTDRYILIITASDGRPDGTSTATVNIVVTDVNDNAPVFDPYLPRNLSVVEEEANAFVGQVKATDPDAGINGQVHYSLGNFNNLFRITSNGSIYTAVKLNREVRDYYELVVVATDGAVHPRHSTLTLAIKVLDIDDNSPVFTNSTYTVLVEENLPAGTTILQIEAKDVDLGANVSYRIRSPEVKHFFALHPFTGELSLLRSLDYEAFPDQEASITFLVEAFDIYGTMPPGIATVTVIVKDMNDYPPVFSKRIYKGMVAPDAVKGTPITTVYAEDADPPGLPASRVRYRVDDVQFPYPASIFEVEEDSGRVITRVNLNEEPTTIFKLVVVAFDDGEPVMSSSATVKILVLHPGEIPRFTQEEYRPPPVSELATKGTMVGVISAAAINQSIVYSIVSGNEEDTFGINNITGVIYVNGPLDYETRTSYVLRVQADSLEVVLANLRVPSKSNTAKVYIEIQDENNHPPVFQKKFYIGGVSEDARMFTSVLRVKATDKDTGNYSVMAYRLIIPPIKEGKEGFVVETYTGLIKTAMLFHNMRRSYFKFQVIATDDYGKGLSGKADVLVSVVNQLDMQVIVSNVPPTLVEKKIEDLTEILDRYVQEQIPGAKVVVESIGARRHGDAFSLEDYTKCDLTVYAIDPQTNRAIDRNELFKFLDGKLLDINKDFQPYYGEGGRILEIRTPEAVTSIKKRGESLGYTEGALLALAFIIILCCIPAILVVLVSYRQFKVRQAECTKTARIQAALPAAKPAVPAPAPVAAPPPPPPPPPGAHLYEELGDSSMHKYEMPQYGSRRRLLPPAGQEEYGEVVGEAEEEYEEEEWARKRMIKLVVDREYETSSTGEDSAPECQRNRLHHPSIHSNINGNIYIAQNGSVVRTRRACLTDNLKVASPVRLGGPFKKLDKLAVTHEENVPLNTLSKGPFSTEKMNARPTLVTFAPCPVGTDNTAVKPLRNRLKSTVEQESMIDSKNIKEALEFHSDHTQSDDEELWMGPWNNLHIPMTKL

SEQ ID NO: 9410 - protein, 248 aa, Homo sapiens
MSLFPSLPLLLLSMVAASYSETVTCEDAQKTCPAVIACSSPGINGFPGKDGRDGTKGEKGEPGQGLRGLQGPPGKLGPPGNPGPSGSPGPKGQKGDPGKSPDGDSSLAASERKALQTEMARIKKWLTFSLGKQVGNKFFLTNGEIMTFEKVKALCVKFQASVATPRNAAENGAIQNLIKEEAFLGITDEKTEGQFVDLTGNRLTYTNWNEGEPNNAGSDEDCVLLLKNGQWNDVPCSTSHLAVCEFPI

SEQ ID NO: 9411 - protein, 266 aa, Homo sapiens
MMALGAAGATRVFVAMVAAALGGHPLLGVSATLNSVLNSNAIKNLPPPLGGAAGHPGSAVSAAPGILYPGGNKYQTIDNYQPYPCAEDEECGTDEYCASPTRGGDAGVQICLACRKRRKRCMRHAMCCPGNYCKNGICVSSDQNHFRGEIEETITESFGNDHSTLDGYSRRTTLSSKMYHTKGQEGSVCLRSSDCASGLCCARHFWSKICKPVLKEGQVCTKHRRKGSHGLEIFQRCYCGEGLSCRIQKDHHQASNSSRLHTCQRH

SEQ ID NO: 9412 - protein, 839 aa, Homo sapiens
MMSASRLAGTLIPAMAFLSCVRPESWEPCVEVVPNITYQCMELNFYKIPDNLPFSTKNLDLSFNPLRHLGSYSFFSFPELQVLDLSRCEIQTIEDGAYQSLSHLSTLILTGNPIQSLALGAFSGLSSLQKLVAVETNLASLENFPIGHLKTLKELNVAHNLIQSFKLPEYFSNLTNLEHLDLSSNKIQSIYCTDLRVLHQMPLLNLSLDLSLNPMNFIQPGAFKEIRLHKLTLRNNFDSLNVMKTCIQGLAGLEVHRLVLGEFRNEGNLEKFDKSALEGLCNLTIEEFRLAYLDYYLDDIIDLFNCLTNVSSFSLVSVTIERVKDFSYNFGWQHLELVNCKFGQFPTLKLKSLKRLTFTSNKGGNAFSEVDLPSLEFLDLSRNGLSFKGCCSQSDFGTTSLKYLDLSFNGVITMSSNFLGLEQLEHLDFQHSNLKQMSEFSVFLSLRNLIYLDISHTHTRVAFNGIFNGLSSLEVLKMAGNSFQENFLPDIFTELRNLTFLDLSQCQLEQLSPTAFNSLSSLQVLNMSHNNFFSLDTFPYKCLNSLQVLDYSLNHIMTSKKQELQHFPSSLAFLNLTQNDFACTCEHQSFLQWIKDQRQLLVEVERMECATPSDKQGMPVLSLNITCQMNKTIIGVSVLSVLVVSVVAVLVYKFYFHLMLLAGCIKYGRGENIYDAFVIYSSQDEDWVRNELVKNLEEGVPPFQLCLHYRDFIPGVAIAANIIHEGFHKSRKVIVVVSQHFIQSRWCIFEYEIAQTWQFLSSRAGIIFIVLQKVEKTLLRQQVELYRLLSRNTYLEWEDSVLGRHIFWRRLRKALLDGKSWNPEGTVGTGCNWQEATSI

SEQ ID NO: 9413 - protein, 686 aa, Homo sapiens
MGTLRDLQYALQEKIEELRQRDALIDELELELDQKDELIQKLQNELDKYRSVIRPATQQAQKQSASTLQGEPRTKRQAISAEPTAFDIQDLSHVTLPFYPKSPQSKDLIKEAILDNDFMKNLELSQIQEIVDCMYPVEYGKDSCIIKEGDVGSLVYVMEDGKVEVTKEGVKLCTMGPGKVFGELAILYNCTRTATVKTLVNVKLWAIDRQCFQTIMMRTGLIKHTEYMEFLKSVPTFQSLPEEILSKLADVLEETHYENGEYIIRQGARGDTFFIISKGTVNVTREDSPSEDPVFLRTLGKGDWFGEKALQGEDVRTANVIAAEAVTCLVIDRDSFKHLIGGLDDVSNKAYEDAEAKAKYEAEAAFFANLKLSDFNIIDTLGVGGFGRVELVQLKSEESKTFAMKILKKRHIVDTRQQEHIRSEKQIMQGAHSDFIVRLYRTFKDSKYLYMLMEACLGGELWTILRDRGSFEDSTTRFYTACVVEAFAYLHSKGIIYRDLKPENLILDHRGYAKLVDFGFAKKIGFGKKTWTFCGTPEYVAPEIILNKGHDISADYWSLGILMYELLTGSPPFSGPDPMKTYNIILRGIDMIEFPKKIAKNAANLIKKLCRDNPSERLGNLKNGVKDIQKHKWFEGFNWEGLRKGTLTPPIIPSVASPTDTSNFDSFPEDNDEPPPDDNSGWDIDF

SEQ ID NO: 9414 - protein, 653 aa, Homo sapiens
MAAAAASHLNLDALREVLECPICMESFTEEQLRPKLLHCGHTICRQCLEKLLASSINGVRCPFCSKITRITSLTQLTDNLTVLKIIDTAGLSEAVGLLMCRSCGRRLPRQFCRSCGLVLCEPCREADHQPPGHCTLPVKEAAEERRRDFGEKLTRLRELMGELQRRKAALEGVSKDLQARYKAVLQEYGHEERRVQDELARSRKFFTGSLAEVEKSNSQVVEEQSYLLNIAEVQAVSRCDYFLAKIKQADVALLEETADEEEPELTASLPRELTLQDVELLKVGHVGPLQIGQAVKKPRTVNVEDSWAMEATASAASTSVTFREMDMSPEEVVASPRASPAKQRGPEAASNIQQCLFLKKMGAKGSTPGMFNLPVSLYVTSQGEVLVADRGNYRIQVFTRKGFLKEIRRSPSGIDSFVLSFLGADLPNLTPLSVAMNCQGLIGVTDSYDNSLKVYTLDGHCVACHRSQLSKPWGITALPSGQFVVTDVEGGKLWCFTVDRGSGVVKYSCLCSAVRPKFVTCDAEGTVYFTQGLGLNLENRQNEHHLEGGFSIGSVGPDGQLGRQISHFFSENEDFRCIAGMCVDARGDLIVADSSRKEILHFPKGGGYSVLIREGLTCPVGIALTPKGQLLVLDCWDHCIKIYSYHLRRYSTP

SEQ ID NO: 9415 - protein, 1372 aa, Homo sapiens
MDPSDFPSPFDPLTLPEKPLAGDLPVDMEFGEDLLESQTAPTRGWAPPGPSPSSGALDLLDTPAGLEKDPGVLDGATELLGLGGLLYKAPSPPEVDHGPEGTLAWDAGDQTLEPGPGGQTPEVVPPDPGAGANSCSPEGLLEPLAPDSPITLQSPHIEEEETTSIATARRGSPGQEEELPQGQPQSPNAPPSPSVGETLGDGINSSQTKPGGSSPPAHPSLPGDGLTAKASEKPPERVQKRSERVRRAEPPKPEVVDSTESIPVSDEDSDAMVDDPNDEDFVPFRPRRSPRMSLRSSVSQRAGRSAVGTKMTCAHCRTPLQKGQTAYQRKGLPQLFCSSSCLTTFSKKPSGKKTCTFCKKEIWNTKDSVVAQTGSGGSFHEFCTSVCLSLYEAQQQRPIPQSGDPADATRCSICQKTGEVLHEVSNGSVVHRLCSDSCFSKFRANKGLKTNCCDQCGAYIYTKTGSPGPELLFHEGQQKRFCNTTCLGAYKKKNTRVYPCVWCKTLCKNFEMLSHVDRNGKTSLFCSLCCTTSYKVKQAGLTGPPRPCSFCRRSLSDPCYYNKVDRTVYQFCSPSCWTKFQRTSPEGGIHLSCHYCHSLFSGKPEVLDWQDQVFQFCCRDCCEDFKRLRGVVSQCEHCRQEKLLHEKLRFSGVEKSFCSEGCVLLYKQDFTKKLGLCCITCTYCSQTCQRGVTEQLDGSTWDFCSEDCKSKYLLWYCKAARCHACKRQGKLLETIHWRGQIRHFCNQQCLLRFYSQQNQPNLDTQSGPESLLNSQSPESKPQTPSQTKVENSNTVRTPEENGNLGKIPVKTRSAPTAPTPPPPPPPATPRKNKAAMCKPLMQNRGVSCKVEMKSKGSQTEEWKPQVIVLPIPVPIFVPVPMHLYCQKVPVPFSMPIPVPVPMFLPTTLESTDKIVETIEELKVKIPSNPLEADILAMAEMIAEAEELDKASSDLCDLVSNQSAEGLLEDCDLFGPARDDVLAMAVKMANVLDEPGQDLEADFPKNPLDINPSVDFLFDCGLVGPEDVSTEQDLPRTMRKGQKRLVLSESCSRDSMSSQPSCTGLNYSYGVNAWKCWVQSKYANGETSKGDELRFGPKPMRIKEDILACSAAELNYGLAQFVREITRPNGERYEPDSIYYLCLGIQQYLLENNRMVNIFTDLYYLTFVQELNKSLSTWQPTLLPNNTVFSRVEEEHLWECKQLGVYSPFVLLNTLMFFNTKFFGLQTAEEHMQLSFTNVVRQSRKCTTPRGTTKVVSIRYYAPVRQRKGRDTGPGKRKREDEAPILEQRENRMNPLRCPVKFYEFYLSKCPESLRTRNDVFYLQPERSCIAESPLWYSVIPMDRSMLESMLNRILAVREIYEELGRPGEEDLD

SEQ ID NO: 9416 - protein, 594 aa, Homo sapiens
MESNHKSGDGLSGTQKEAALRALVQRTGYSLVQENGQRKYGGPPPGWDAAPPERGCEIFIGKLPRDLFEDELIPLCEKIGKIYEMRMMMDFNGNNRGYAFVTFSNKVEAKNAIKQLNNYEIRNGRLLGVCASVDNCRLFVGGIPKTKKREEILSEMKKVTEGVVDVIVYPSAADKTKNRGFAFVEYESHRAAAMARRKLLPGRIQLWGHGIAVDWAEPEVEVDEDTMSSVKILYVRNLMLSTSEEMIEKEFNNIKPGAVERVKKIRDYAFVHFSNREDAVEAMKALNGKVLDGSPIEVTLAKPVDKDSYVRYTRGTGGRGTMLQGEYTYSLGQVYDPTTTYLGAPVFYAPQTYAAIPSLHFPATKGHLSNRAIIRAPSVREIYMNVPVGAAGVRGLGGRGYLAYTGLGRGYQVKGDKREDKLYDILPGMELTPMNPVTLKPQGIKLAPQILEEICQKNNWGQPVYQLHSAIGQDQRQLFLYKITIPALASQNPAIHPFTPPKLSAFVDEAKTYAAEYTLQTLGIPTDGGDGTMATAAAAATAFPGYAVPNATAPVSAAQLKQAVTLGQDLAAYTTYEVYPTFAVTARGDGYGTF

SEQ ID NO: 9417 - protein, 1358 aa, Homo sapiens
MDPSDFPSPFDPLTLPEKPLAGDLPVDMEFGEDLLESQTAPTRGWAPPGPSPSSGALDLLDTPAGLEKDPGVLDGATELLGLGGLLYKAPSPPEVDHGPEGTLAWDAGDQTLEPGPGGQTPEVVPPDPGAGANSCSPEGLLEPLAPDSPITLQSPHIEEEETTSIATARRGSPGQEEELPQGQPQSPNAPPSPSVGETLGDGINSSQTKPGGSSPPAHPSLPGDGLTAKASEKPPERKRSERVRRAEPPKPEVVDSTESIPVSDEDSDAMVDDPNDEDFVPFRPRRSPRMSLRSSVSQRAGRSAVGTKMTCAHCRTPLQKGQTAYQRKGLPQLFCSSSCLTTFSKKPSGKKTCTFCKKEIWNTKDSVVAQTGSGGSFHEFCTSVCLSLYEAQQQRPIPQSGDPADATRCSICQKTGEVLHEVSNGSVVHRLCSDSCFSKFRANKGLKTNCCDQCGAYIYTKTGSPGPELLFHEGQQKRFCNTTCLGAYKKKNTRVYPCVWCKTLCKNFEMLSHVDRNGKTSLFCSLCCTTSYKVKQAGLTGPPRPCSFCRRSLSDPCYYNKVDRTVYQFCSPSCWTKFQRTSPEGGIHLSCHYCHSLFSGKPEVLDWQDQVFQFCCRDCCEDFKRLRGVVSQCEHCRQEKLLHEKLRFSGVEKSFCSEGCVLLYKQDFTKKLGLCCITCTYCSQTCQRGVTEQLDGSTWDFCSEDCKSKYLLWYCKAARCHACKRQGKLLETIHWRGQIRHFCNQQCLLRFYSQQNQPNLDTQSGPESLLNSQSPESKPQTPSQTKVENSNTIPVKTRSAPTAPTPPPPPPPATPRKNKAAMCKPLMQNRGVSCKVEMKSKGSQTEEWKPQVIVLPIPVPIFVPVPMHLYCQKVPVPFSMPIPVPVPMFLPTTLESTDKIVETIEELKVKIPSNPLEADILAMAEMIAEAEELDKASSDLCDLVSNQSAEGLLEDCDLFGPARDDVLAMAVKMANVLDEPGQDLEADFPKNPLDINPSVDFLFDCGLVGPEDVSTEQDLPRTMRKGQKRLVLSESCSRDSMSSQPSCTGLNYSYGVNAWKCWVQSKYANGETSKGDELRFGPKPMRIKEDILACSAAELNYGLAQFVREITRPNGERYEPDSIYYLCLGIQQYLLENNRMVNIFTDLYYLTFVQELNKSLSTWQPTLLPNNTVFSRVEEEHLWECKQLGVYSPFVLLNTLMFFNTKFFGLQTAEEHMQLSFTNVVRQSRKCTTPRGTTKVVSIRYYAPVRQRKGRDTGPGKRKREDEAPILEQRENRMNPLRCPVKFYEFYLSKCPESLRTRNDVFYLQPERSCIAESPLWYSVIPMDRSMLESMLNRILAVREIYEELGRPGEEDLD

SEQ ID NO: 9418 - protein, 298 aa, Homo sapiens
MEGMDVDLDPELMQKFSCLGTTDKDVLISEFQRLLGFQLNPAGCAFFLDMTNWNLQAAIGAYYDFESPNISVPSMSFVEDVTIGEGESIPPDTQFVKTWRIQNSGAEAWPPGVCLKYVGGDQFGHVNMVMVRSLEPQEIADVSVQMCSPSRAGMYQGQWRMCTATGLYYGDVIWVILSVEVGGLLGVTQQLSSFETEFNTQPHRKVEGNFNPFASPQKNRQSDENNLKDPGGSEFDSISKNTWAPAPDTWAPAPDQTEQDQNRLSQNSVNLSPSSHANNLSVVTYSKGLHGPYPFGQS

SEQ ID NO: 9419 - protein, 173 aa, Homo sapiens
MEAPGPRALRTALCGGCCCLLLCAQLAVAGKGARGFGRGALIRLNIWPAVQGACKQLEVCEHCVEGDGARNLSSCVWEQCRPEEPGHCVAQSEVVKEGCSIYNRSEACPAAHHHPTYEPKTVTTGSPPVPEAHSPGFDGASFIGGVVLVLSLQAVAFFVLHFLKAKDSTYQTL

SEQ ID NO: 9420 - protein, 174 aa, Homo sapiens
MEAPGPRALRTALCGGCCCLLLCAQLAVAGKGARGFGRGALIRLNIWPAVQGACKQLEVCEHCVEGDGARNLSSCVWEQCRPEEPGHCVAQSEVVKEGCSIYNRSEACPAAHHHPTYEPKTVTTGSPPVPEAHSPGFDGASFIGGVVLVLSLQAVAFFVLHFLKAKDSTYQTLI

SEQ ID NO: 9421 - protein, 1280 aa, Homo sapiens
MAGPCPRSGAERAGSCWQDPLAVALSRGRQLAAPPGRGCARSRPLSVVYVLTREPQPGLEPREGTEAEPLPLRCLREACAQVPRPRPPPQLRSLPFGTLELGDTAALDAFYNADVVVLEVSSSLVQPSLFYHLGVRESFSMTNNVLLCSQADLPDLQALRDCVGSYTLIPYVVTATGRVLCGDAGLLRGLADGLVQAGVGTEALLTPLVGRLARLLEATPTDSCGYFRETIRRDIRQARERFSGPQLRQELARLQRRLDSVELLSPDIIMNLLLSYRDVQDYSAIIELVETLQALPTCDVAEQHNVCFHYTFALNRRNRPGDRAKALSVLLPLVQLEGSVAPDLYCMCGRIYKDMFFSSGFQDAGHREQAYHWYRKAFDVEPSLHSGINAAVLLIAAGQHFEDSKELRLIGMKLGCLLARKGCVEKMQYYWDVGFYLGAQILANDPTQVVLAAEQLYKLNAPIWYLVSVMETFLLYQHFRPTPEPPGGPPRRAHFWLHFLLQSCQPFKTACAQGDQCLVLVLEMNKVLLPAKLEVRGTDPVSTVTLSLLEPETQDIPSSWTFPVASICGVSASKRDERCCFLYALPPAQDVQLCFPSVGHCQWFCGLIQAWVTNPDSTAPAEEAEGAGEMLEFDYEYTETGERLVLGKGTYGVVYAGRDRHTRVRIAIKEIPERDSRFSQPLHEEIALHRRLRHKNIVRYLGSASQGGYLKIFMEEVPGGSLSSLLRSVWGPLKDNESTISFYTRQILQGLGYLHDNHIVHRDIKGDNVLINTFSGLLKISDFGTSKRLAGITPCTETFTGTLQYMAPEIIDQGPRGYGKAADIWSLGCTVIEMATGRPPFHELGSPQAAMFQVGMYKVHPPMPSSLSAEAQAFLLRTFEPDPRLRASAQTLLGDPFLQPGKRSRSPSSPRHAPRPSDAPSASPTPSANSTTQSQTFPCPQAPSQHPPSPPKRCLSYGGTSQLRVPEEPAAEEPASPEESSGLSLLHQESKRRAMLAAVLEQELPALAENLHQEQKQEQGARLGRNHVEELLRCLGAHIHTPNRRQLAQELRALQGRLRAQGLGPALLHRPLFAFPDAVKQILRKRQIRPHWMFVLDSLLSRAVRAALGVLGPEVEKEAVSPRSEELSNEGDSQQSPGQQSPLPVEPEQGPAPLMVQLSLLRAETDRLREILAGKEREYQALVQRALQRLNEEARTYVLAPEPPTALSTDQGLVQWLQELNVDSGTIQMLLNHSFTLHTLLTYATRDDLIYTRIRGGMVCRIWRAILAQRAGSTPVTSGP

SEQ ID NO: 9422 - protein, 174 aa, Homo sapiens
MRHFLSKVYSFPMRKLILFLVFPVVRQTPTQHFKNQFPALHWEHELGLAFTKNRMNYTNKFLLIPESGDYFIYSQVTFRGMTSECSEIRQAGRPNKPDSITVVITKVTDSYPEPTQLLMGTKSVCEVGSNWFQPIYLGAMFSLQEGDKLMVNVSDISLVDYTKEDKTFFGAFLL

SEQ ID NO: 9423 - protein, 118 aa, Homo sapiens
MASQSQGIQQLLQAEKRAAEKVSEARKRKNRRLKQAKEEAQAEIEQYRLQREKEFKAKEAAALGSRGSCSTEVEKETQEKMTILQTYFRQNRDEVLDNLLAFVCDIRPEIHENYRING

SEQ ID NO: 9424 - protein, 457 aa, Homo sapiens
MLLRAAWRRAAVAVTAAPGPKPAAPTRGLRLRVGDRAPQSAVPADTAAAPEVGPVLRPLYMDVQATTPLDPRVLDAMLPYLINYYGNPHSRTHAYGWESEAAMERARQQVASLIGADPREIIFTSGATESNNIAIKGVARFYRSRKKHLITTQTEHKCVLDSCRSLEAEGFQVTYLPVQKSGIIDLKELEAAIQPDTSLVSVMTVNNEIGVKQPIAEIGRICSSRKVYFHTDAAQAVGKIPLDVNDMKIDLMSISGHKIYGPKGVGAIYIRRRPRVRVEALQSGGGQERGMRSGTVPTPLVVGLGAACEVAQQEMEYDHKRISKLSERLIQNIMKSLPDVVMNGDPKHHYPGCINLSFAYVEGESLLMALKDVALSSGSACTSASLEPSYVLRAIGTDEDLAHSSIRFGIGRFTTEEEVDYTVEKCIQHVKRLREMSPLWEMVQDGIDLKSIKWTQH

SEQ ID NO: 9425 - protein, 954 aa, Homo sapiens
MNQPGGAAAPQADGASAAGRKSTASRERLKRSQKSTKVEGPEPVPAEASLSAEQGTMTEVKVKTELPDDYIQEVIWQGEAKEEKKAVSKDGTSDVPAEICVVIGGVRNQQTLDGKAPEGSPHGGSVRSRYSGTWIFDQALRYASGSYECGICGKKYKYYNCFQTHVRAHRDTEATSGEGASQSNNFRYTCDICGKKYKYYSCFQEHRDLHAVDVFSVEGAPENRADPFDQGVVATDEVKEEPPEPFQKIGPKTGNYTCEFCGKQYKYYTPYQEHVALHAPISTAPGWEPPDDPDTGSECSHPEVSPSPRFVAAKTQTNQSGKKAPASVVRCATLLHRTPPATQTQTFRTPNSGSPASKATAAESAFSRRVEGKAQNHFEETNSSSQNSSEPYTCGACGIQFQFYNNLLEHMQSHAADNENNIASNQSRSPPAVVEEKWKPQAQRNSANNTTTSGLTPNSMIPEKERQNIAERLLRVMCADLGALSVVSGKEFLKLAQTLVDSGARYGAFSVTEILGNFNTLALKHLPRMYNQVKVKVTCALGSNACLGIGVTCHSQSVGPDSCYILTAYQAEGNHIKSYVLGVKGADIRDSGDLVHHWVQNVLSEFVMSEIRTVYVTDCRVSTSAFSKAGMCLRCSACALNSVVQSVLSKRTLQARSMHEVIELLNVCEDLAGSTGLAKETFGSLEETSPPPCWNSVTDSLLLVHERYEQICEFYSRAKKMNLIQSLNKHLLSNLAAILTPVKQAVIELSNESQPTLQLVLPTYVRLEKLFTAKANDAGTVSKLCHLFLEALKENFKVHPAHKVAMILDPQQKLRPVPPYQHEEIIGKVCELINEVKESWAEEADFEPAAKKPRSAAVENPAAQEDDRLGKNEVYDYLQEPLFQATPDLFQYWSCVTQKHTKLAKLAFWLLAVPAVGARSGCVNMCEQALLIKRRRLLSPEDMNKLMFLKSNML

SEQ ID NO: 9426 - protein, 310 aa, Homo sapiens
MAGAAPTTAFGQAVIGPPGSGKTTYCLGMSEFLRALGRRVAVVNLDPANEGLPYECAVDVGELVGLGDVMDALRLGPNGGLLYCMEYLEANLDWLRAKLDPLRGHYFLFDCPGQVELCTHHGALRSIFSQMAQWDLRLTAVHLVDSHYCTDPAKFISVLCTSLATMLHVELPHINLLSKMDLIEHYGKLAFNLDYYTEVLDLSYLLDHLASDPFFRHYRQLNEKLVQLIEDYSLVSFIPLNIQDKESIQRVLQAVDKANGYCFRAQEQRSLEAMMSAAMGADFHFSSTLGIQEKYLAPSNQSVEQEAMQL

SEQ ID NO: 9427 - protein, 388 aa, Homo sapiens
MKDCEYQQISPGAAPLPASPGARRPGPAASPTPGPGPAPPAAPAPPRWSSSGSGSGSGSGSLGRRPRRKWEVFPGRNRFYCGGRLMLAGHGGVFALTLLLILTTTGLFFVFDCPYLARKLTLAIPIIAAILFFFVMSCLLQTSFTDPGILPRATVCEAAALEKQIDNTGSSTYRPPPRTREVLINGQMVKLKYCFTCKMFRPPRTSHCSVCDNCVERFDHHCPWVGNCVGRRNYRFFYAFILSLSFLTAFIFACVVTHLTLRAQGSNFLSTLKETPASVLELVICFFSIWSILGLSGFHTYLVASNLTTNEDIKGSWSSKRGGEASVNPYSHKSIITNCCAVLCGPLPPSLIDRRGFVQSDTVLPSPIRSDEPACRAKPDASMVGGHP

SEQ ID NO: 9428 - protein, 147 aa, Homo sapiens
MAERPEDLNLPNAVITRIIKEALPDGVNISKEARSAISRAASVFVLYATSCANNFAMKGKRKTLNASDVLSAMEEMEFQRFVTPLKEALEAYRREQKGKKEASEQKKKDKDKKTDSEEQDKSRDEDNDEDEERLEEEEQNEEEEVDN

SEQ ID NO: 9429 - protein, 865 aa, Homo sapiens
MPGKRGLGWWWARLPLCLLLSLYGPWMPSSLGKPKGHPHMNSIRIDGDITLGGLFPVHGRGSEGKPCGELKKEKGIHRLEAMLFALDRINNDPDLLPNITLGARILDTCSRDTHALEQSLTFVQALIEKDGTEVRCGSGGPPIITKPERVVGVIGASGSSVSIMVANILRLFKIPQISYASTAPDLSDNSRYDFFSRVVPSDTYQAQAMVDIVRALKWNYVSTVASEGSYGESGVEAFIQKSREDGGVCIAQSVKIPREPKAGEFDKIIRRLLETSNARAVIIFANEDDIRRVLEAARRANQTGHFFWMGSDSWGSKIAPVLHLEEVAEGAVTILPKRMSVRDRERIGQDSAYEQEGKVQFVIDAVYAMGHALHAMHRDLCPGRVGLCPRMDPVDGTQLLKYIRNVNFSGIAGNPVTFNENGDAPGRYDIYQYQLRNDSAEYKVIGSWTDHLHLRIERMHWPGSGQQLPRSICSLPCQPGERKKTVKGMPCCWHCEPCTGYQYQVDRYTCKTCPYDMRPTENRTGCRPIPIIKLEWGSPWAVLPLFLAVVGIAATLFVVITFVRYNDTPIVKASGRELSYVLLAGIFLCYATTFLMIAEPDLGTCSLRRIFLGLGMSISYAALLTKTNRIYRIFEQGKRSVSAPRFISPASQLAITFSLISLQLLGICVWFVVDPSHSVVDFQDQRTLDPRFARGVLKCDISDLSLICLLGYSMLLMVTCTVYAIKTRGVPETFNEAKPIGFTMYTTCIVWLAFIPIFFGTSQSADKLYIQTTTLTVSVSLSASVSLGMLYMPKVYIILFHPEQNVPKRKRSLKAVVTAATMSNKFTQKGNFRPNGEAKSELCENLEAPALATKQTYVTYTNHAI

SEQ ID NO: 9430 - protein, 367 aa, Homo sapiens
MLLLRCQLKQAPPQKVSFRFCVVMGKQQSKLKHSTYKYGRPDEIIEERIQTKAFQEYSPAHMDTVSVVAALNSDLCVSGGKDKTVVAYNWKTGNVVKRFKGHEHEITKVACIPKSSQFFSASRDRMVMMWDLHGSSQPRQQLCGHAMVVTGLAVSPDSSQLCTGSRDNTLLLWDVVTGQSVERASVSRNVVTHLCWVPREPYILQTSEDKTLRLWDSRGLQVAHMFPAKQHIQTYCEVSVDGHKCISCSNGFGGEGCEATLWDLRQTRNRICEYKGHFQTVASCVFLPRALALMPLIATSSHDCKVKIWNQDTGACLFTLSLDGSGPLTSLAVGDAISLLCASFNRGIHLLRMDHSQGLELQEVAAF

SEQ ID NO: 9431 - protein, 521 aa, Homo sapiens
MASSRASSTATKTKAPDDLVAPVVKKPHIYYGSLEEKERERLAKGESGILGKDGLKAGIEAGNINITSGEVFEIEEHISERQAEVLAEFERRKRARQINVSTDDSEVKACLRALGEPITLFGEGPAERRERLRNILSVVGTDALKKTKKDDEKSKKSKEEYQQTWYHEGPNSLKVARLWIANYSLPRAMKRLEEARLHKEIPETTRTSQMQELHKSLRSLNNFCSQIGDDRPISYCHFSPNSKMLATACWSGLCKLWSVPDCNLLHTLRGHNTNVGAIVFHPKSTVSLDPKDVNLASCAADGSVKLWSLDSDEPVADIEGHTVRVARVMWHPSGRFLGTTCYDRSWRLWDLEAQEEILHQEGHSMGVYDIAFHQDGSLAGTGGLDAFGRVWDLRTGRCIMFLEGHLKEIYGINFSPNGYHIATGSGDNTCKVWDLRQRRCVYTIPAHQNLVTGVKFEPIHGNFLLTGAYDNTAKIWTHPGWSPLKTLAGHEGKVMGLDISSDGQLIATCSYDRTFKLWMAE

SEQ ID NO: 9432 - protein, 522 aa, Homo sapiens
MASSRASSTQATKTKAPDDLVAPVVKKPHIYYGSLEEKERERLAKGESGILGKDGLKAGIEAGNINITSGEVFEIEEHISERQAEVLAEFERRKRARQINVSTDDSEVKACLRALGEPITLFGEGPAERRERLRNILSVVGTDALKKTKKDDEKSKKSKEEYQQTWYHEGPNSLKVARLWIANYSLPRAMKRLEEARLHKEIPETTRTSQMQELHKSLRSLNNFCSQIGDDRPISYCHFSPNSKMLATACWSGLCKLWSVPDCNLLHTLRGHNTNVGAIVFHPKSTVSLDPKDVNLASCAADGSVKLWSLDSDEPVADIEGHTVRVARVMWHPSGRFLGTTCYDRSWRLWDLEAQEEILHQEGHSMGVYDIAFHQDGSLAGTGGLDAFGRVWDLRTGRCIMFLEGHLKEIYGINFSPNGYHIATGSGDNTCKVWDLRQRRCVYTIPAHQNLVTGVKFEPIHGNFLLTGAYDNTAKIWTHPGWSPLKTLAGHEGKVMGLDISSDGQLIATCSYDRTFKLWMAE

SEQ ID NO: 9433 - protein, 369 aa, Homo sapiens
MLKPSLPFTSLLFLQLPLLGVGLNTTILTPNGNEDTTADFFLTTMPTDSLSVSTLPLPEVQCFVFNVEYMNCTWNSSSEPQPTNLTLHYWYKNSDNDKVQKCSHYLFSEEITSGCQLQKKEIHLYQTFVVQLQDPREPRRQATQMLKLQNLVIPWAPENLTLHKLSESQLELNWNNRFLNHCLEHLVQYRTDWDHSWTEQSVDYRHKFSLPSVDGQKRYTFRVRSRFNPLCGSAQHWSEWSHPIHWGSNTSKENPFLFALEAVVISVGSMGLIISLLCVYFWLERTMPRIPTLKNLEDLVTEYHGNFSAWSGVSKGLAESLQPDYSERLCLVSEIPPKGGALGEGPGASPCNQHSPYWAPPCYTLKPET

SEQ ID NO: 9434 - protein, 190 aa, Homo sapiens
MDHSHHMGMSYMDSNSTMQPSHHHPTTSASHSHGGGDSSMMMMPMTFYFGFKNVELLFSGLVINTAGEMAGAFVAVFLLAMFYEGLKIARESLLRKSQVSIRYNSMPVPGPNGTILMETHKTVGQQMLSFPHLLQTVLHIIQVVISYFLMLIFMTYNGYLCIAVAAGAGTGYFLFSWKKAVVVDITEHCH

SEQ ID NO: 9435 - protein, 61 aa, Homo sapiens
MKRFLFLLLTISLLVMVQIQTGLSGQNDTSQTSSPSASSNISGGIFLFFVANAIIHLFCFS

SEQ ID NO: 9436 - protein, 74 aa, Homo sapiens
MQNQSSTNHPGASIALSRPSLNKDFRDHAEQQHIAAQQKAALQHAHAHSSGYFITQDSAFGNLILPVLPRLDPE

SEQ ID NO: 9437 - protein, 104 aa, Homo sapiens
MAANSSGQGFQNKNRVAILAELDKEKRKLLMQNQSSTNHPGASIALSRPSLNKDFRDHAEQQHIAAQQKAALQHAHAHSSGYFITQDSAFGNLILPVLPRLDPE

SEQ ID NO: 9438 - protein, 524 aa, Homo sapiens
MNSSTPSTGVYANGNDSKKFKRDRPPCSPSRVLHLRKIPCDVTEAEIISLGLPFGKVTNLLMLKGKSQAFLEMASEEAAVTMVNYYTPITPHLRSQPVYIQYSNHRELKTDNLPNQARAQAALQAVSAVQSGSLALSGGPSNEGTVLPGQSPVLRIIIENLFYPVTLEVLHQIFSKFGTVLKIITFTKNNQFQALLQYADPVNAHYAKMALDGQNIYNACCTLRIDFSKLTSLNVKYNNDKSRDFTRLDLPTGDGQPSLEPPMAAAFGAPGIISSPYAGAAGFAPAIGFPQATGLSVPAVPGALGPLTITSSAVTGRMAIPGASGIPGNSVLLVTNLNPDLITPHGLFILFGVYGDVHRVKIMFNKKENALVQMADANQAQLAMNHLSGQRLYGKVLRATLSKHQAVQLPREGQEDQGLTKDFSNSPLHRFKKPGSKNFQNIFPPSATLHLSNIPPSVTVDDLKNLFIEAGCSVKAFKFFQKDRKMALIQLGSVEEAIQALIELHNHDLGENHHLRVSFSKSTI

SEQ ID NO: 9439 - protein, 505 aa, Homo sapiens
MDPGNENSATEAAAIIDLDPDFEPQSRPRSCTWPLPRPEIANQPSEPPEVEPDLGEKVHTEGRSEPILLPSRLPEPAGGPQPGILGAVTGPRKGGSRRNAWGNQSYAELISQAIESAPEKRLTLAQIYEWMVRTVPYFKDKGDSNSSAGWKNSIRHNLSLHSKFIKVHNEATGKSSWWMLNPEGGKSGKAPRRRAASMDSSSKLLRGRSKAPKKKPSVLPAPPEGATPTSPVGHFAKWSGSPCSRNREEADMWTTFRPRSSSNASSVSTRLSPLRPESEVLAEEIPASVSSYAGGVPPTLNEGLELLDGLNLTSSHSLLSRSGLSGFSLQHPGVTGPLHTYSSSLFSPAEGPLSAGEGCFSSSQALEALLTSDTPPPPADVLMTQVDPILSQAPTLLLLGGLPSSSKLATGVGLCPKPLEAPGPSSLVPTLSMIAPPPVMASAPIPKALGTPVLTPPTEAASQDRMPQDLDLDMYMENLECDMDNIISDLMDEGEGLDFNFEPDP

SEQ ID NO: 9440 - protein, 722 aa, Homo sapiens
MGRGPWDAGPSRRLLPLLLLLGLARGAAGAPGPDGLDVCATCHEHATCQQREGKKICICNYGFVGNGRTQCVDKNECQFGATLVCGNHTSCHNTPGGFYCICLEGYRATNNNKTFIPNDGTFCTDIDECEVSGLCRHGGRCVNTHGSFECYCMDGYLPRNGPEPFHPTTDATSCTEIDCGTPPEVPDGYIIGNYTSSLGSQVRYACREGFFSVPEDTVSSCTGLGTWESPKLHCQEINCGNPPEMRHAILVGNHSSRLGGVARYVCQEGFESPGGKITSVCTEKGTWRESTLTCTEILTKINDVSLFNDTCVRWQINSRRINPKISYVISIKGQRLDPMESVREETVNLTTDSRTPEVCLALYPGTNYTVNISTAPPRRSMPAVIGFQTAEVDLLEDDGSFNISIFNETCLKLNRRSRKVGSEHMYQFTVLGQRWYLANFSHATSFNFTTREQVPVVCLDLYPTTDYTVNVTLLRSPKRHSVQITIATPPAVKQTISNISGFNETCLRWRSIKTADMEEMYLFHIWGQRWYQKEFAQEMTFNISSSSRDPEVCLDLRPGTNYNVSLRALSSELPVVISLTTQITEPPLPEVEFFTVHRGPLPRLRLRKAKEKNGPISSYQVLVLPLALQSTFSCDSEGASSFFSNASDADGYVAAELLAKDVPDDAMEIPIGDRLYYGEYYNAPLKRGSDYCIILRITSEWNKIRHSCCCRWRVLDWVPWLL

SEQ ID NO: 9441 - protein, 757 aa, Homo sapiens
MGRGPWDAGPSRRLLPLLLLLGLARGAAGAPGPDGLDVCATCHEHATCQQREGKKICICNYGFVGNGRTQCVDKNECQFGATLVCGNHTSCHNTPGGFYCICLEGYRATNNNKTFIPNDGTFCTDIDECEVSGLCRHGGRCVNTHGSFECYCMDGYLPRNGPEPFHPTTDATSCTEIDCGTPPEVPDGYIIGNYTSSLGSQVRYACREGFFSVPEDTVSSCTGLGTWESPKLHCQEINCGNPPEMRHAILVGNHSSRLGGVARYVCQEGFESPGGKITSVCTEKGTWRESTLTCTEILTKINDVSLFNDTCVRWQINSRRINPKISYVISIKGQRLDPMESVREETVNLTTDSRTPEVCLALYPGTNYTVNISTAPPRRSMPAVIGFQTAEVDLLEDDGSFNISIFNETCLKLNRRSRKVGSEHMYQFTVLGQRWYLANFSHATSFNFTTREQVPVVCLDLYPTTDYTVNVTLLRSPKRHSVQITIATPPAVKQTISNISGFNETCLRWRSIKTADMEEMYLFHIWGQRWYQKEFAQEMTFNISSSSRDPEVCLDLRPGTNYNVSLRALSSELPVVISLTTQITEPPLPEVEFFTVHRGPLPRLRLRKAKEKNGPISSYQVLVLPLALQSTFSCDSEGASSFFSNASDADGYVAAELLAKDVPDDAMEIPIGDRLYYGEYYNAPLKRGSDYCIILRITSEWNKVRRHSCAVWAQVKEIPCNCNFLRLHIHRANSGDTQIRHSCCCRWRVLDWVPWLL

SEQ ID NO: 9442 - protein, 134 aa, Homo sapiens
MGRSRRTGAHRAHSLARQMKAKRRRPDLDEIHRELRPQGSARPQPDPNAEFDPDLPGGGLHRCLACARYFIDSTNLKTHFRSKDHKKRLKQLSVEPYSQEEAERAAGMGSYVPPRRLAVPTEVSTEVPEMDTST

SEQ ID NO: 9443 - protein, 747 aa, Homo sapiens
MGRGPWDAGPSRRLLPLLLLLGLARGAAGAPGPDGLDVCATCHEHATCQQREGKKICICNYGFVGNGRTQCVDKNECQFGATLVCGNHTSCHNTPGGFYCICLEGYRATNNNKTFIPNDGTFCTDIDECEVSGLCRHGGRCVNTHGSFECYCMDGYLPRNGPEPFHPTTDATSCTEIDCGTPPEVPDGYIIGNYTSSLGSQVRYACREGFFSVPEDTVSSCTGLGTWESPKLHCQEINCGNPPEMRHAILVGNHSSRLGGVARYVCQEGFESPGGKITSVCTEKGTWRESTLTCTEILTKINDVSLFNDTCVRWQINSRRINPKISYVISIKGQRLDPMESVREETVNLTTDSRTPEVCLALYPGTNYTVNISTAPPRRSMPAVIGFQTAEVDLLEDDGSFNISIFNETCLKLNRRSRKVGSEHMYQFTVLGQRWYLANFSHATSFNFTTREQVPVVCLDLYPTTDYTVNVTLLRSPKRHSVQITIATPPAVKQTISNISGFNETCLRWRSIKTADMEEMYLFHIWGQRWYQKEFAQEMTFNISSSSRDPEVCLDLRPGTNYNVSLRALSSELPVVISLTTQITEPPLPEVEFFTVHRGPLPRLRLRKAKEKNGPISSYQVLVLPLALQSTFSCDSEGASSFFSNASDADGYVAAELLAKDVPDDAMEIPIGDRLYYGEYYNAPLKRGSDYCIILRITSEWNKVRRHSCAVWAQVKDSSLMLLQMAGVGLGSLAVVIILTFLSFSAV

SEQ ID NO: 9444 - protein, 162 aa, Homo sapiens
MSDTAVADTRRLNSKPQDLTDAYGPPSNFLEIDIFNPQTVGVGRARFTTYEVRMRTNLPIFKLKESCVRRRYSDFEWLKNELERDSKIVVPPLPGKALKRQLPFRGDEGIFEESFIEERRQGLEQFINKIAGHPLAQNERCLHMFLQEEAIDRNYVPGKVRQ

SEQ ID NO: 9445 - protein, 394 aa, Homo sapiens
MALLDLALEGMAVFGFVLFLVLWLMHFMAIIYTRLHLNKKATDKQPYSKLPGVSLLKPLKGVDPNLINNLETFFELDYPKYEVLLCVQDHDDPAIDVCKKLLGKYPNVDARLFIGGKKVGINPKINNLMPGYEVAKYDLIWICDSGIRVIPDTLTDMVNQMTEKVGLVHGLPYVADRQGFAATLEQVYFGTSHPRYYISANVTGFKCVTGMSCLMRKDVLDQAGGLIAFAQYIAEDYFMAKAIADRGWRFAMSTQVAMQNSGSYSISQFQSRMIRWTKLRINMLPATIICEPISECFVASLIIGWAAHHVFRWDIMVFFMCHCLAWFIFDYIQLRGVQGGTLCFSKLDYAVAWFIRESMTIYIFLSALWDPTISWRTGRYRLRCGGTAEEILDV

SEQ ID NO: 9446 - protein, 392 aa, Homo sapiens
MGVNQSVGFPPVTGPHLVGCGDVMEGQNLQGSFFRLFYPCQKAEETMEQPLWIPRYEYCTGLAEYLQFNKRCGGLLFNLAVGSCRLPVSWNGPFKTKDSGYPLIIFSHGLGAFRTLYSAFCMELASRGFVVAVPEHRDRSAATTYFCKQAPEENQPTNESLQEEWIPFRRVEEGEKEFHVRNPQVHQRVSECLRVLKILQEVTAGQTVFNILPGGLDLMTLKGNIDMSRVAVMGHSFGGATAILALAKETQFRCAVALDAWMFPLERDFYPKARGPVFFINTEKFQTMESVNLMKKICAQHEQSRIITVLGSVHRSQTDFAFVTGNLIGKFFSTETRGSLDPYEGQEVMVRAMLAFLQKHLDLKEDYNQWNNLIEGIGPSLTPGAPHHLSSL

SEQ ID NO: 9447 - protein, 68 aa, Homo sapiens
MSSGASASALQRLVEQLKLEAGVERIKVSQAAAELQQYCMQNACKDALLVGVPAGSNPFREPRSCALL

SEQ ID NO: 9448 - protein, 153 aa, Homo sapiens
MGAPLLSPGWGAGAAGRRWWMLLAPLLPALLLVRPAGALVEGLYCGTRDCYEVLGVSRSAGKAEIARAYRQLARRYHPDRYRPQPGDEGPGRTPQSAEEAFLLVATAYETLKVSQAAAELQQYCMQNACKDALLVGVPAGSNPFREPRSCALL

SEQ ID NO: 9449 - protein, 346 aa, Homo sapiens
MAMAQKLSHLLPSLRQVIQEPQLSLQPEPVFTVDRAEVPPLFWKPYIYAGYRPLHQTWRFYFRTLFQQHNEAVNVWTHLLAALVLLLRLALFVETVDFWGDPHALPLFIIVLASFTYLSFSALAHLLQAKSEFWHYSFFFLDYVGVAVYQFGSALAHFYYAIEPAWHAQVQAVFLPMAAFLAWLSCIGSCYNKYIQKPGLLGRTCQEVPSVLAYALDISPVVHRIFVSSDPTTDDPALLYHKCQVVFFLLAAAFFSTFMPERWFPGSCHVFGQGHQLFHIFLVLCTLAQLEAVALDYEARRPIYEPLHTHWPHNFSGLFLLTVGSSILTAFLLSQLVQRKLDQKTK

SEQ ID NO: 9450 - protein, 2671 aa, Homo sapiens
MSEMSSFLHIGDIVSLYAEGSVNGFISTLGLVDDRCVVEPAAGDLDNPPKKFRDCLFKVCPMNRYSAQKQYWKAKQTKQDKEKIADVVLLQKLQHAAQMEQKQNDTENKKVHGDVVKYGSVIQLLHMKSNKYLTVNKRLPALLEKNAMRVTLDATGNEGSWLFIQPFWKLRSNGDNVVVGDKVILNPVNAGQPLHASNYELSDNAGCKEVNSVNCNTSWKINLFMQFRDHLEEVLKGGDVVRLFHAEQEKFLTCDEYKGKLQVFLRTTLRQSATSATSSNALWEVEVVHHDPCRGGAGHWNGLYRFKHLATGNYLAAEENPSYKGDASDPKAAGMGAQGRTGRRNAGEKIKYCLVAVPHGNDIASLFELDPTTLQKTDSFVPRNSYVRLRHLCTNTWIQSTNVPIDIEEERPIRLMLGTCPTKEDKEAFAIVSVPVSEIRDLDFANDASSMLASAVEKLNEGFISQNDRRFVIQLLEDLVFFVSDVPNNGQNVLDIMVTKPNRERQKLMREQNILKQVFGILKAPFREKGGEGPLVRLEELSDQKNAPYQHMFRLCYRVLRHSQEDYRKNQEHIAKQFGMMQSQIGYDILAEDTITALLHNNRKLLEKHITKTEVETFVSLVRKNREPRFLDYLSDLCVSNHIAIPVTQELICKCVLDPKNSDILIRTELRPVKEMAQSHEYLSIEYSEEEVWLTWTDKNNEHHEKSVRQLAQEARAGNAHDENVLSYYRYQLKLFARMCLDRQYLAIDEISQQLGVDLIFLCMADEMLPFDLRASFCHLMLHVHVDRDPQELVTPVKFARLWTEIPTAITIKDYDSNLNASRDDKKNKFANTMEFVEDYLNNVVSEAVPFANEEKNKLTFEVVSLAHNLIYFGFYSFSELLRLTRTLLGIIDCVQGPPAMLQAYEDPGGKNVRRSIQGVGHMMSTMVLSRKQSVFSAPSLSAGASAAEPLDRSKFEENEDIVVMETKLKILEILQFILNVRLDYRISYLLSVFKKEFVEVFPMQDSGADGTAPAFDSTTANMNLDRIGEQAEAMFGVGKTSSMLEVDDEGGRMFLRVLIHLTMHDYAPLVSGALQLLFKHFSQRQEAMHTFKQVQLLISAQDVENYKVIKSELDRLRTMVEKSELWVDKKGSGKGEEVEAGAAKDKKERPTDEEGFLHPPGEKSSENYQIVKGILERLNKMCGVGEQMRKKQQRLLKNMDAHKVMLDLLQIPYDKGDAKMMEILRYTHQFLQKFCAGNPGNQALLHKHLHLFLTPGLLEAETMQHIFLNNYQLCSEISEPVLQHFVHLLATHGRHVQYLDFLHTVIKAEGKYVKKCQDMIMTELTNAGDDVVVFYNDKASLAHLLDMMKAARDGVEDHSPLMYHISLVDLLAACAEGKNVYTEIKCTSLLPLEDVVSVVTHEDCITEVKMAYVNFVNHCYVDTEVEMKEIYTSNHIWTLFENFTLDMARVCSKREKRVADPTLEKYVLSVVLDTINAFFSSPFSENSTSLQTHQTIVVQLLQSTTRLLECPWLQQQHKGSVEACIRTLAMVAKGRAILLPMDLDAHISSMLSSGASCAAAAQRNASSYKATTRAFPRVTPTANQWDYKNIIEKLQDIITALEERLKPLVQAELSVLVDVLHWPELLFLEGSEAYQRCESGGFLSKLIQHTKDLMESEEKLCIKVLRTLQQMLLKKTKYGDRGNQLRKMLLQNYLQNRKSTSRGDLPDPIGTGLDPDWSAIAATQCRLDKEGATKLVCDLITSTKNEKIFQESIGLAIHLLDGGNTEIQKSFHNLMMSDKKSERFFKVLHDRMKRAQQETKSTVAVNMNDLGSQPHEDREPVDPTTKGRVASFSIPGSSSRYSLGPSLRRGHEVSERVQSSEMGTSVLIMQPILRFLQLLCENHNRDLQNFLRCQNNKTNYNLVCETLQFLDIMCGSTTGGLGLLGLYINEDNVGLVIQTLETLTEYCQGPCHENQTCIVTHESNGIDIITALILNDISPLCKYRMDLVLQLKDNASKLLLALMESRHDSENAERILISLRPQELVDVIKKAYLQEEERENSEVSPREVGHNIYILALQLSRHNKQLQHLLKPVKRIQEEEAEGISSMLSLNNKQLSQMLKSSAPAQEEEEDPLAYYENHTSQIEIVRQDRSMEQIVFPVPGICQFLTEETKHRLFTTTEQDEQGSKVSDFFDQSSFLHNEMEWQRKLRSMPLIYWFSRRMTLWGSISFNLAVFINIIIAFFYPYMEGASTGVLDSPLISLLFWILICFSIAALFTKRYSIRPLIVALILRSIYYLGIGPTLNILGALNLTNKIVFVVSFVGNRGTFIRGYKAMVMDMEFLYHVGYILTSVLGLFAHELFYSILLFDLIYREETLFNVIKSVTRNGRSILLTALLALILVYLFSIVGFLFLKDDFILEVDRLPNNHSTASPLGMPHGAAAFVDTCSGDKMDCVSGLSVPEVLEEDRELDSTERACDTLLMCIVTVMNHGLRNGGGVGDILRKPSKDESLFPARVVYDLLFFFIVIIIVLNLIFGVIIDTFADLRSEKQKKEEILKTTCFICGLERDKFDNKTVSFEEHIKLEHNMWNYLYFIVLVRVKNKTDYTGPESYVAQMIKNKNLDWFPRMRAMSLVSNEGEGEQNEIRILQDKLNSTMKLVSHLTAQLNELKEQMTEQRKRRQRLGFVDVQNCISR

SEQ ID NO: 9451 - protein, 308 aa, Homo sapiens
MDALKSAGRALIRSPSLAKQSWGGGGRHRKLPENWTDTRETLLEGMLFSLKYLGMTLVEQPKGEELSAAAIKRIVATAKASGKKLQKVTLKVSPRGIILTDNLTNQLIENVSIYRISYCTADKMHDKVFAYIAQSQHNQSLECHAFLCTKRKMAQAVTLTVAQAFKVAFEFWQVSKEEKEKRDKASQEGGDVLGARQDCTPSLKSLVATGNLLDLEETAKAPLSTVSANTTNMDEVPRPQALSGSSVVWELDDGLDEAFSRLAQSRTNPQVLDTGLTAQDMHYAQCLSPVDWDKPDSSGTEQDDLFSF

SEQ ID NO: 9452 - protein, 664 aa, Homo sapiens
MKRRNADCSKLRRPLKRNRITEGIYGSTFLYLKFLVVWALVLLADFVLEFRFEYLWPFWLFIRSVYDSFRYQGLAFSVFFVCVAFTSNIICLLFIPIQWLFFAASTYVWVQYVWHTERGVCLPTVSLWILFVYIEAAIRFKDLKNFHVDLCRPFAAHCIGYPVVTLGFGFKSYVSYKMRLRKQKEVQKENEFYMQLLQQALPPEQQMLQKQEKEAEEAAKGLPDMDSSILIHHNGGIPANKKLSTTLPEIEYREKGKEKDKDAKKHNLGINNNNILQPVDSKIQEIEYMENHINSKRLNNDLVGSTENLLKEDSCTASSKNYKNASGVVNSSPRSHSATNGSIPSSSSKNEKKQKCTSKSPSTHKDLMENCIPNNQLSKPDALVRLEQDIKKLKADLQASRQVEQELRSQISSLSSTERGIRSEMGQLRQENELLQNKLHNAVQMKQKDKQNISQLEKKLKAEQEARSFVEKQLMEEKKRKKLEEATAARAVAFAAASRGECTETLRNRIRELEAEGKKLTMDMKVKEDQIRELELKVQELRKYKENEKDTEVLMSALSAMQDKTQHLENSLSAETRIKLDLFSALGDAKRQLEIAQGQILQKDQEIKDLKQKIAEVMAVMPSITYSAATSPLSPVSPHYSSKFVETSPSGLDPNASVYQPLKK

SEQ ID NO: 9453 - protein, 157 aa, Homo sapiens
MSGFLEGLRCSECIDWGEKRNTIASIAAGVLFFTGWWIIIDAAVIYPTMKDFNHSYHACGVIATIAFLMINAVSNGQVRGDSYSEGCLGQTGARIWLFVGFMLAFGSLIASMWILFGGYVAKEKDIVYPGIAVFFQNAFIFFGGLVFKFGRTEDLWQ

SEQ ID NO: 9454 - protein, 501 aa, Homo sapiens
MRLPKLLTFLLWYLAWLDLEFICTVLGAPDLGQRPQGTRPGLAKAEAKERPPLARNVFRPGGHSYGGGATNANARAKGGTGQTGGLTQPKKDEPKKLPPRPGGPEPKPGHPPQTRQATARTVTPKGQLPGGKAPPKAGSVPSSFLLKKAREPGPPREPKEPFRPPPITPHEYMLSLYRTLSDADRKGGNSSVKLEAGLANTITSFIDKGQDDRGPVVRKQRYVFDISALEKDGLLGAELRILRKKPSDTAKPAAPGGGRAAQLKLSSCPSGRQPAALLDVRSVPGLDGSGWEVFDIWKLFRNFKNSAQLCLELEAWERGRAVDLRGLGFDRAARQVHEKALFLVFGRTKKRDLFFNEIKARSGQDDKTVYEYLFSQRRKRRAPLATRQGKRPSKNLKARCSRKALHVNFKDMGWDDWIIAPLEYEAFHCEGLCEFPLRSHLEPTNHAVIQTLMNSMDPESTPPTCCVPTRLSPISILFIDSANNVVYKQYEDMVVESCGCR

SEQ ID NO: 9455 - protein, 253 aa, Homo sapiens
MALSMPLNGLKEEDKEPLIELFVKAGSDGESIGNCPFSQRLFMILWLKGVVFSVTTVDLKRKPADLQNLAPGTHPPFITFNSEVKTDVNKIEEFLEEVLCPPKYLKLSPKHPESNTAGMDIFAKFSAYIKNSRPEANEALERGLLKTLQKLDEYLNSPLPDEIDENSMEDIKFSTRKFLDGNEMTLADCNLLPKLHIVKVVAKKYRNFDIPKEMTGIWRYLTNAYSRDEFTNTCPSDKEVEIAYSDVAKRLTK

SEQ ID NO: 9456 - protein, 231 aa, Homo sapiens
MALLVRVLRNQTSISQWVPVCSRLIPVSPTQGQGDRALSRTSQKIKIAALRMYTSCVEKTDFEEFFLRCQMPDTFNSWFLITLLHVWMCLVRMKQEGRSGKYMCRIIVHFMWEDVQQRGRVMGVNPYILKKNMILMTNHFYAAILGYDEGILSDDHGLAAALWRTFFNRKCEDPRHLELLVEYVRKQIQYLDSMNGEDLLLTGEVSWRPLVEKNPQSILKPHSPTYNDEGL

SEQ ID NO: 9457 - protein, 299 aa, Homo sapiens
MALLVRVLRNQTSISQWVPVCSRLIPVSPTQGQGDRALSRTSQWPQMSQSRACGGSEQIPGIDIQLNRKYHTTRKLSTTKDSPQPVEEKVGAFTKIIEAMGFTGPLKYSKWKIKIAALRMYTSCVEKTDFEEFFLRCQMPDTFNSWFLITLLHVWMCLVRMKQEGRSGKYMCRIIVHFMWEDVQQRGRVMGVNPYILKKNMILMTNHFYAAILGYDEGILSDDHGLAAALWRTFFNRKCEDPRHLELLVEYVRKQIQYLDSMNGEDLLLTGEVSWRPLVEKNPQSILKPHSPTYNDEGL

SEQ ID NO: 9458 - protein, 913 aa, Homo sapiens
MDAGFFRGTSAEQDNRFSNKQKKLLKQLKFAECLEKKVDMSKVNLEVIKPWITKRVTEILGFEDDVVIEFIFNQLEVKNPDSKMMQINLTGFLNGKNAREFMGELWPLLLSAQENIAGIPSAFLELKKEEIKQRQIEQEKLASMKKQDEDKDKRDKEEKESSREKRERSRSPRRRKSRSPSPRRRSSPVRRERKRSHSRSPRHRTKSRSPSPAPEKKEKTPELPEPSVKVKEPSVQEATSTSDILKVPKPEPIPEPKEPSPEKNSKKEKEKEKTRPRSRSRSKSRSRTRSRSPSHTRPRRRHRSRSRRRPSPRRRPSPRRRTPPRRMPPPPRHRRSRSPVRRRRRSSASLSGSSSSSSSSRSRSPPKKPPKRTSSPPRKTRRLSPSASPPRRRHRPSPPATPPPKTRHSPTPQQSNRTRKSRVSVSPGRTSGKVTKHKGTEKRESPSPAPKPRKVELSESEEDKGGKMAAADSVQQRRQYRRQNQQSSSDSGSSSSSEDERPKRSHVKNGEVGRRRRHSPSRSASPSPRKRQKETSPRMQMGKRWQSPVTKSGRRRRSPSPPPTRRRRSPSPAPPPRRRRTPTPPPRRRTPSPPPRRRSPSPRRYSPPIQRRYSPSPPPKRRTASPPPPPKRRASPSPPPKRRVSHSPPPKQRSSPVTKRRSPSLSSKHRKGSSPSRSTREARSPQPNKRHSPSPRPRAPQTSSSPPPVRRGASSSPQRRQSPSPSTRPIRRVSRTPEPKKIKKAASPSPQSVRRVSSSRSVSGSPEPAAKKPPAPPSPVQSQSPSTNWSPAVPVKKAKSPTPSPSPPRNSDQEGGGKKKKKKKDKKHKKDKKHKKHKKHKKEKAVAAAAAAAVTPAAIAAATTTLAQEEPVAAPEPKKETESEAEDNLDDLEKHLREKALRSMRKAQVSPQS

SEQ ID NO: 9459 - protein, 406 aa, Homo sapiens
MDGSHSAALKLQQLPPTSSSSAVSEASFSYKENLIGALLAIFGHLVVSIALNLQKYCHIRLAGSKDPRAYFKTKTWWLGLFLMLLGELGVFASYAFAPLSLIVPLSAVSVIASAIIGIIFIKEKWKPKDFLRRYVLSFVGCGLAVVGTYLLVTFAPNSHEKMTGENVTRHLVSWPFLLYMLVEIILFCLLLYFYKEKNANNIVVILLLVALLGSMTVVTVKAVAGMLVLSIQGNLQLDYPIFYVMFVCMVATAVYQAAFLSQASQMYDSSLIASVGYILSTTIAITAGAIFYLDFIGEDVLHICMFALGCLIAFLGVFLITRNRKKPIPFEPYISMDAMPGMQNMHDKGMTVQPELKASFSYGALENNDNISEIYAPATLPVMQEEHGSRSASGVPYRVLEHTKKE

SEQ ID NO: 9460 - protein, 211 aa, Homo sapiens
MAGPERWGPLLLCLLQAAPGRPRLAPPQNVTLLSQNFSVYLTWLPGLGNPQDVTYFVAYQSSPTRRRWREVEECAGTKELLCSMMCLKKQDLYNKFKGRVRTVSPSSKSPWVESEYLDYLFEVEPAPPVLVLTQTEEILSANATYQLPPCMPPLDLKYEVAFWKEGAGNKVGSSFPAPRLGPLLHPFLLRFFSPSQPAPAPLLQEVFPVHS

SEQ ID NO: 9461 - protein, 491 aa, Homo sapiens
MAGPERWGPLLLCLLQAAPGRPRLAPPQNVTLLSQNFSVYLTWLPGLGNPQDVTYFVAYQSSPTRRRWREVEECAGTKELLCSMMCLKKQDLYNKFKGRVRTVSPSSKSPWVESEYLDYLFEVEPAPPVLVLTQTEEILSANATYQLPPCMPPLDLKYEVAFWKEGAGNKTLFPVTPHGQPVQITLQPAASEHHCLSARTIYTFSVPKYSKFSKPTCFLLEVPEANWAFLVLPSLLILLLVIAAGGVIWKTLMGNPWFQRAKMPRALELTRGVRPTPRVRAPATQQTRWKKDLAEDEEEEDEEDTEDGVSFQPYIEPPSFLGQEHQAPGHSEAGGVDSGRPRAPLVPSEGSSAWDSSDRSWASTVDSSWDRAGSSGYLAEKGPGQGPGGDGHQESLPPPEFSKDSGFLEELPEDNLSSWATWGTLPPEPNLVPGGPPVSLQTLTFCWESSPEEEEEARESEIEDSDAGSWGAESTQRTEDRGRTLGHYMAR

SEQ ID NO: 9462 - protein, 2354 aa, Homo sapiens
MQKRQGYCSYCRVQYNNLEQHLFSAQHRSLTRQSRRQICTSSLMERFLQDVLQHHPYHCQESSSTQDETHVNTGSSSEVVHLDDAFSEEEEEDEDKVEDEDATEERPSEVSEPIEELHSRPHKSQEGTQEVSVRPSVIQKLEKGQQQPLEFVHKIGASVRKCNLVDIGQATNNRSNLVRPPVICNAPASCLPESSNDRPVTANTTSLPPAAHLDSVSKCDPNKVEKYLEQPDGASRNPVPSSHVETTSFSYQKHKESNRKSLRMNSDKLVLWKDVKSQGKTLSAGLKFHERMGTKGSLRVKSPSKLAVNPNKTDMPSNKGIFEDTIAKNHEEFFSNMDCTQEEKHLVFNKTAFWEQKCSVSSEMKFDCISLQSASDQPQETAQDLSLWKEEQIDQEDNYESRGSEMSFDCSSSFHSLTDQSKVSAKEVNLSKEVRTDVQYKNNKSYVSKISSDCDDILHLVTNQSQMIVKEISLQNARHISLVDQSYESSSSETNFDCDASPQSTSDYPQQSVTEVNLPKEVHIGLVDKNYGSSSSEVSADSVFPLQSVVDRPPVAVTETKLRKKAHTSLVDNYGSSCSETSFDCDVSLESVVDHPQLTVKGRNLKGRQVHLKHKKRKPSSAKAHLDCDVSLGTVADESQRAVEKINLLKEKNADLMDMNCESHGPEMGFQADAQLADQSQVAEIERQKVDVDLENKSVQSSRSSLSSDSPASLYHSAHDEPQEALDEVNLKELNIDMEVRSYDCSSSELTFDSDPPLLSVTEQSHLDAEGKERHIDLEDESCESDSSEITFDSDIPLYSVIDQPEVAVYEEETVDLESKSNESCVSEITFDSDIPLHSGNDHPEVAVKEVIQKEEYIHLERKNDEPSGSEISSDSHAPLHSVTNSPEVAVKKLNPQKEEQVHLENKENEPIDSEVSLDYNIIFHSVTGRSEDPIKEISLHTKEHMYLENKSVFETSLDSDVPLQAATHKPEVIVKETWLQREKHAEFQGRSTEFSGSKTSLDSGVPHYSVTEPQVAVNKINRKKQYVLENKNDKCSGSEIILDSNVPPQSMTDQPQLAFLKEKHVNLKDKNSKSGDSKITFDSEQLQEAVKKIDQWKEEVIGLKNKINEPSTYKLIHHPDVSVQSVADQPKVAIKHVNLGNENHMYLEVKNSQYSCSEMNLDSGFLGQSIVNRPQITILEQEHIELEGKHNQCCGSEVSFDSDDPLQSVADRLRETVKEISLWKDEEVDTEDRRNEAKGFEIMYDSDVLQPVAGQPEEVVKEVSLWKEHVDLENKIVKPTDSRINFDSHEPLQSVTNKIPGANKEINLLREEHVCLDDKGYVPSDSEIIYVSNIPLQSVIKQPHILEEEHASLEDKSSNSYSPEESSDSNDSFQAAADELQKPVKEINLWKEDHIYLEDKSYKLGDFDVSYASHIPVQFVTDQSSVPVKEINLQKKDHNDLENKNCEVCGSEIKCHSCVHLQSEVDQPQVSYKEADLQKEEHVVMEEKTDQPSDSEMMYDSDVPFQIVVNQFPGSVKETHLPKVVLVDLVPGDSDYEVISDDIPLQLVTDPPQLTVKDISCINTECIDIEDKSCDFFGSEVRCNCKASTPSMTNQCKETFKIINRKKDYIILGEPSCQSCGSEMNFNVDASDQSMTYESQGPDEKMVKYIDSEDKSCGYNGSKGKFNLEDTSHRTTHRLQKAHKEASLRKDPRNAGLKGKSCQSSASAVDFGASSKSALHRRADKKKRSKLKHRDLEVSCEPDGFEMNFQCAPPLPSDTDQPQETVKKRHPCKKVSSDLKEKNHDSQSSSVLKVDSVRNLKKAKDVIEDNPDEPVLEALPHVPPSFVGKTWSQIMREDDIKINALVKEFREGRFHCYFDDDCETKKVSSKGKKKVTWADLQGKEDTAPTQAVSESDDIVCGISDIDDLSVALDKPCHRHPPAERPPKQKGRVASQCQTAKISHSTQTSCKNYPVMKRKIIRQEEDPPKSKCSRLQDDRKTKKKVKIGTVEFPASCTKVLKPMQPKALVCVLSSLNIKLKEGEGLPFPKMRHHSWDNDIRFICKYKRNIFDYYEPLIKQIVISPPLSVIVPEFERRNWVKIHFNRSNQNSSAGDNDADGQGSASAPLMAVPARYGFNSHQGTSDSSLFLEESKVLHARELPKKRNFQLTFLNHDVVKISPKSVRNKLLESQSKKKIHGKRVTTSSNKLGFPKKVYKPIILQQKPRKASEKQSIWIRTKPSDIIRKYISKYSVFLRHRYQSRSAFLGRYLKKKKSVVSRLKKAKRTAKVLLNSSVPPAGAEELSSAMANPPPKRPVRASCRVARRRKKTDESYHGRQKGPSTPVRAYDLRSSSCLQQRERMMTRLANKLRGNEVK

SEQ ID NO: 9463 - protein, 119 aa, Homo sapiens
MNAKVVVVLVLVLTALCLSDGKPVSLSYRCPCRFFESHVARANVKHLKILNTPNCALQIVARLKNNNRQVCIDPKLKWIQEYLEKALNKGRREEKVGKKEKIGKKKRQKKRKAAQKRKN

SEQ ID NO: 9464 - protein, 93 aa, Homo sapiens
MNAKVVVVLVLVLTALCLSDGKPVSLSYRCPCRFFESHVARANVKHLKILNTPNCALQIVARLKNNNRQVCIDPKLKWIQEYLEKALNKRFKM

SEQ ID NO: 9465 - protein, 245 aa, Homo sapiens
MAVRASFENNCEIGCFAKLTNTYCLVAIGGSENFYSVFEGELSDTIPVVHASIAGCRIIGRMCVGNRHGLLVPNNTTDQELQHIRNSLPDTVQIRRVEERLSALGNVTTCNDYVALVHPDLDRETEEILADVLKVEVFRQTVADQVLVGSYCVFSNQGGLVHPKTSIEDQDELSSLLQVPLVAGTVNRGSEVIAAGMVVNDWCAFCGLDTTSTELSVVESVFKLNEAQPSTIATSMRDSLIDSLT

SEQ ID NO: 9466 - protein, 783 aa, Homo sapiens [sequence omitted]

SEQ ID NO: 9467 - protein, 869 aa, Homo sapiens
MRELVNIPLVHILTLVAFSGTEKLPKAPVITTPLETVDALVEEVATFMCAVESYPQPEISWTRNKILIKLFDTRYSIRENGQLLTILSVEDSDDGIYCCTANNGVGGAVESCGALQVKMKPKITRPPINVKIIEGLKAVLPCTTMGNPKPSVSWIKGDSPLRENSRIAVLESGSLRIHNVQKEDAGQYRCVAKNSLGTAYSKVVKLEVEVFARILRAPESHNVTFGSFVTLHCTATGIPVPTITWIENGNAVSSGSIQESVKDRVIDSRLQLFITKPGLYTCIATNKHGEKFSTAKAAATISIAEWSKPQKDNKGYCAQYRGEVCNAVLAKDALVFLNTSYADPEEAQELLVHTAWNELKVVSPVCRPAAEALLCNHIFQECSPGVVPTPIPICREYCLAVKELFCAKEWLVMEEKTHRGLYRSEMHLLSVPECSKLPSMHWDPTACARLPHLDYNKENLKTFPPMTSSKPSVDIPNLPSSSSSSFSVSPTYSMTVIISIMSSFAIFVLLTITTLYCCRRRKQWKNKKRESAAVTLTTLPSELLLDRLHPNPMYQRMPLLLNPKLLSLEYPRNNIEYVRDIGEGAFGRVFQARAPGLLPYEPFTMVAVKMLKEEASADMQADFQREAALMAEFDNPNIVKLLGVCAVGKPMCLLFEYMAYGDLNEFLRSMSPHTVCSLSHSDLSMRAQVSSPGPPPLSCAEQLCIARQVAAGMAYLSERKFVHRDLATRNCLVGENMVVKIADFGLSRNIYSADYYKANENDAIPIRWMPPESIFYNRYTTESDVWAYGVVLWEIFSYGLQPYYGMAHEEVIYYVRDGNILSCPENCPVELYNLMRLCWSKLPADRPSFTSIHRILERMCERAEGTVSV

SEQ ID NO: 9468 - protein, 173 aa, Homo sapiens
MSRYLRPPNTSLFVRNVADDTRSEDLRREFGRYGPIVDVYVPLDFYTRRPRGFAYVQFEDVRDAEDALHNLDRKWICGRQIEIQFAQGDRKTPNQMKAKEGRNVYSSSRYDDYDRYRRSRSRSYERRRSRSRSFDYNYRRSYSPRNSRPTGRPRRSRSHSDNDSQVSKKKNER

SEQ ID NO: 9469 - protein, 172 aa, Homo sapiens
MSRYLRPPNTSLFVRNVADDTRSEDLRREFGRYGPIVDVYVPLDFYTRRPRGFAYVQFEDVRDAEDALHNLDRKWICGRQIEIQFAQGDRKTPNQMKAKEGRNVYSSSRYDDYDRYRRSRSRSYERRRSRSRSFDYNYRRSYSPRNRPTGRPRRSRSHSDNDSQVSKKKNER

SEQ ID NO: 9470 - protein, 868 aa, Homo sapiens
MWPRLAFCCWGLALVSGWATFQQMSPSRNFSFRLFPETAPGAPGSIPAPPAPGDEAAGSRVERLGQAFRRRVRLLRELSERLELVFLVDDSSSVGEVNFRSELMFVRKLLSDFPVVPTATRVAIVTFSSKNYVVPRVDYISTRRARQHKCALLLQEIPAISYRGGGTYTKGAFQQAAQILLHARENSTKVVFLITDGYSNGGDPRPIAASLRDSGVEIFTFGIWQGNIRELNDMASTPKEEHCYLLHSFEEFEALARRALHEDLPSGSFIQDDMVHCSYLCDEGKDCCDRMGSCKCGTHTGHFECICEKGYYGKGLQYECTACPSGTYKPEGSPGGISSCIPCPDENHTSPPGSTSPEDCVCREGYRASGQTCELVHCPALKPPENGYFIQNTCNNHFNAACGVRCHPGFDLVGSSIILCLPNGLWSGSESYCRVRTCPHLRQPKHGHISCSTREMLYKTTCLVACDEGYRLEGSDKLTCQGNSQWDGPEPRCVERHCSTFQMPKDVIISPHNCGKQPAKFGTICYVSCRQGFILSGVKEMLRCTTSGKWNVGVQAAVCKDVEAPQINCPKDIEAKTLEQQDSANVTWQIPTAKDNSGEKVSVHVHPAFTPPYLFPIGDVAIVYTATDLSGNQASCIFHIKVIDAEPPVIDWCRSPPPVQVSEKVHAASWDEPQFSDNSGAELVITRSHTQGDLFPQGETIVQYTATDPSGNNRTCDIHIVIKGSPCEIPFTPVNGDFICTPDNTGVNCTLTCLEGYDFTEGSTDKYYCAYEDGVWKPTYTTEWPDCAKKRFANHGFKSFEMFYKAARCDDTDLMKKFSEAFETTLGKMVPSFCSDAEDIDCRLEENLTKKYCLEYNYDYENGFAIGN

SEQ ID NO: 9471 - protein, 542 aa, Homo sapiens
MPRRGLILHTRTHWLLLGLALLCSLVLFMYLLECAPQTDGNASLPGVVGENYGKEYYQALLQEQEEHYQTRATSLKRQIAQLKQELQEMSEKMRSLQERRNVGANGIGYQSNKEQAPSDLLEFLHSQIDKAEVSIGAKLPSEYGVIPFESFTLMKVFQLEMGLTRHPEEKPVRKDKRDELVEVIEAGLEVINNPDEDDEQEDEEGPLGEKLIFNENDFVEGYYRTERDKGTQYELFFKKADLTEYRHVTLFRPFGPLMKVKSEMIDITRSIINIIVPLAERTEAFVQFMQNFRDVCIHQDKKIHLTVVYFGKEGLSKVKSILESVTSESNFHNYTLVSLNEEFNRGRGLNVGARAWDKGEVLMFFCDVDIYFSAEFLNSCRLNAEPGKKVFYPVVFSLYNPAIVYANQEVPPPVEQQLVHKKDSGFWRDFGFGMTCQYRSDFLTIGGFDMEVKGWGGEDVHLYRKYLHGDLIVIRTPVPGLFHLWHEKRCADELTPEQYRMCIQSKAMNEASHSHLGMLVFREEIETHLHKQAYRTNSEAVG

SEQ ID NO: 9472 - protein, 3571 aa, Homo sapiens
MWPRLAFCCWGLALVSGWATFQQMSPSRNFSFRLFPETAPGAPGSIPAPPAPGDEAAGSRVERLGQAFRRRVRLLRELSERLELVFLVDDSSSVGEVNFRSELMFVRKLLSDFPVVPTATRVAIVTFSSKNYVVPRVDYISTRRARQHKCALLLQEIPAISYRGGGTYTKGAFQQAAQILLHARENSTKVVFLITDGYSNGGDPRPIAASLRDSGVEIFTFGIWQGNIRELNDMASTPKEEHCYLLHSFEEFEALARRALHEDLPSGSFIQDDMVHCSYLCDEGKDCCDRMGSCKCGTHTGHFECICEKGYYGKGLQYECTACPSGTYKPEGSPGGISSCIPCPDENHTSPPGSTSPEDCVCREGYRASGQTCELVHCPALKPPENGYFIQNTCNNHFNAACGVRCHPGFDLVGSSIILCLPNGLWSGSESYCRVRTCPHLRQPKHGHISCSTREMLYKTTCLVACDEGYRLEGSDKLTCQGNSQWDGPEPRCVERHCSTFQMPKDVIISPHNCGKQPAKFGTICYVSCRQGFILSGVKEMLRCTTSGKWNVGVQAAVCKDVEAPQINCPKDIEAKTLEQQDSANVTWQIPTAKDNSGEKVSVHVHPAFTPPYLFPIGDVAIVYTATDLSGNQASCIFHIKVIDAEPPVIDWCRSPPPVQVSEKVHAASWDEPQFSDNSGAELVITRSHTQGDLFPQGETIVQYTATDPSGNNRTCDIHIVIKGSPCEIPFTPVNGDFICTPDNTGVNCTLTCLEGYDFTEGSTDKYYCAYEDGVWKPTYTTEWPDCAKKRFANHGFKSFEMFYKAARCDDTDLMKKFSEAFETTLGKMVPSFCSDAEDIDCRLEENLTKKYCLEYNYDYENGFAIGPGGWGAANRLDYSYDDFLDTVQETATSIGNAKSSRIKRSAPLSDYKIKLIFNITASVPLPDERNDTLEWENQQRLLQTLETITNKLKRTLNKDPMYSFQLASEILIADSNSLETKKASPFCRPGSVLRGRMCVNCPLGTYYNLEHFTCESCRIGSYQDEEGQLECKLCPSGMYTEYIHSRNISDCKAQCKQGTYSYSGLETCESCPLGTYQPKFGSRSCLSCPENTSTVKRGAVNISACGVPCPEGKFSRSGLMPCHPCPRDYYQPNAGKAFCLACPFYGTTPFAGSRSITECSSFSSTFSAAEESVVPPASLGHIKKRHEISSQVFHECFFNPCHNSGTCQQLGRGYVCLCPLGYTGLKCETDIDECSPLPCLNNGVCKDLVGEFICECPSGYTGQRCEENINECSSSPCLNKGICVDGVAGYRCTCVKGFVGLHCETEVNECQSNPCLNNAVCEDQVGGFLCKCPPGFLGTRCGKNVDECLSQPCKNGATCKDGANSFRCLCAAGFTGSHCELNINECQSNPCRNQATCVDELNSYSCKCQPGFSGKRCETEQSTGFNLDFEVSGIYGYVMLDGMLPSLHALTCTFWMKSSDDMNYGTPISYAVDNGSDNTLLLTDYNGWVLYVNGREKITNCPSVNDGRWHHIAITWTSANGIWKVYIDGKLSDGGAGLSVGLPIPGGGALVLGQEQDKKGEGFSPAESFVGSISQLNLWDYVLSPQQVKSLATSCPEELSKGNVLAWPDFLSGIVGKVKIDSKSIFCSDCPRLGGSVPHLRTASEDLKPGSKVNLFCDPGFQLVGNPVQYCLNQGQWTQPLPHCERISCGVPPPLENGFHSADDFYAGSTVTYQCNNGYYLLGDSRMFCTDNGSWNGVSPSCLDVDECAVGSDCSEHASCLNVDGSYICSCVPPYTGDGKNCAEPIKCKAPGNPENGHSSGEIYTVGAEVTFSCQEGYQLMGVTKITCLESGEWNHLIPYCKAVSCGKPAIPENGCIEELAFTFGSKVTYRCNKGYTLAGDKESSCLANSSWSHSPPVCEPVKCSSPENINNGKYILSGLTYLSTASYSCDTGYSLQGPSIIECTASGIWDRAPPACHLVFCGEPPAIKDAVITGNNFTFRNTVTYTCKEGYTLAGLDTIECLADGKWSRSDQQCLAVSCDEPPIVDHASPETAHRLFGDIAFYYCSDGYSLADNSQLLCNAQGKWVPPEGQDMPRCIAHFCEKPPSVSYSILESVSKAKFAAGSVVSFKCMEGFVLNTSAKIECMRGGQWNPSPMSIQCIPVRCGEPPSIMNGYASGSNYSFGAMVAYSCNKGFYIKGEKKSTCEATGQWSSPIPTCHPVSCGEPPKVENGFLEHTTGRIFESEVRYQCNPGYKSVGSPVFVCQANRHWHSESPLMCVPLDCGKPPPIQNGFMKGENFEVGSKVQFFCNEGYELVGDSSWTCQKSGKWNKKSNPKCMPAKCPEPPLLENQLVLKELTTEVGVVTFSCKEGHVLQGPSVLKCLPSQQWNDSFPVCKIVLCTPPPLISFGVPIPSSALHFGSTVKYSCVGGFFLRGNSTTLCQPDGTWSSPLPECVPVECPQPEEIPNGIIDVQGLAYLSTALYTCKPGFELVGNTTTLCGENGHWLGGKPTCKAIECLKPKEILNGKFSYTDLHYGQTVTYSCNRGFRLEGPSALTCLETGDWDVDAPSCNAIHCDSPQPIENGFVEGADYSYGAIIIYSCFPGFQVAGHAMQTCEESGWSSSIPTCMPIDCGLPPHIDFGDCTKLKDDQGYFEQEDDMMEVPYVTPHPPYHLGAVAKTWENTKESPATHSSNFLYGTMVSYTCNPGYELLGNPVLICQEDGTWNGSAPSCISIECDLPTAPENGFLRFTETSMGSAVQYSCKPGHILAGSDLRLCLENRKWSGASPRCEAISCKKPNPVMNGSIKGSNYTYLSTLYYECDPGYVLNGTERRTCQDDKNWDEDEPICIPVDCSSPPVSANGQVRGDEYTFQKEIEYTCNEGFLLEGARSRVCLANGSWSGATPDCVPVRCATPPQLANGVTEGLDYGFMKEVTFHCHEGYILHGAPKLTCQSDGNWDAEIPLCKPVNCGPPEDLAHGFPNGFSFIHGGHIQYQCFPGYKLHGNSSRRCLSNGSWSGSSPSCLPCRCSTPVIEYGTVNGTDFDCGKAARIQCFKGFKLLGLSEITCEADGQWSSGFPHCEHTSCGSLPMIPNAFISETSSWKENVITYSCRSGYVIQGSSDLICTEKGVWSQPYPVCEPLSCGSPPSVANAVATGEAHTYESEVKLRCLEGYTMDTDTDTFTCQKDGRWFPERISCSPKKCPLPENITHILVHGDDFSVNRQVSVSCAEGYTFEGVNISVCQLDGTWEPPFSDESCSPVSCGKPESPEHGFVVGSKYTFESTIIYQCEPGYELEGNRERVCQENRQWSGGVAICKETRCETPLEFLNGKADIENRTTGPNVVYSCNRGYSLEGPSEAHCTENGTWSHPVPLCKPNPCPVPFVIPENALLSEKEFYVDQNVSIKCREGFLLQGHGIITCNPDETWTQTSAKCEKISCGPPAHVENAIARGVHYQYGDMITYSCYSGYMLEGFLRSVCLENGTWTSPPICRAVCRFPCQNGGICQRPNACSCPEGWMGRLCEEPICILPCLNGGRCVAPYQCDCPPGWTGSRCHTAVCQSPCLNGGKCVRPNRCHCLSSWTGHNCSRKRRTGF

SEQ ID NO: 9473 - protein, 466 aa, Homo sapiens
MRAPGMRSRPAGPALLLLLLFLGAAESVRRAQPPRRYTPDWPSLDSRPLPAWFDEAKFGVFIHWGVFSVPAWGSEWFWWHWQGEGRPQYQRFMRDNYPPGFSYADFGPQFTARFFHPEEWADLFQAAGAKYVVLTTKHHEGFTNWPSPVSWNWNSKDVGPHRDLVGELGTALRKRNIRYGLYHSLLEWFHPLYLLDKKNGFKTQHFVSAKTMPELYDLVNSYKPDLIWSDGEWECPDTYWNSTNFLSWLYNDSPVKDEVVVNDRWGQNCSCHHGGYYNCEDKFKPQSLPDHKWEMCTSIDKFSWGYRRDMALSDVTEESEIISELVQTVSLGGNYLLNIGPTKDGLIVPIFQERLLAVGKWLSINGEAIYASKPWRVQWEKNTTSVWYTSKGSAVYAIFLHWPENGVLNLESPITTSTTKITMLGIQGDLKWSTDPDKGLFISLPQLPPSAVPAEFAWTIKLTGVK

SEQ ID NO: 9474 - protein, 325 aa, Homo sapiens
MAAMRKALPRRLVGLASLRAVSTSSMGTLPKRVKIVEVGPRDGLQNEKNIVSTPVKIKLIDMLSEAGLSVIETTSFVSPKWVPQMGDHTEVLKGIQKFPGINYPVLTPNLKGFEAAVAAGAKEVVIFGAASELFTKKNINCSIEESFQRFDAILKAAQSANISVRGYVSCALGCPYEGKISPAKVAEVTKKFYSMGCYEISLGDTIGVGTPGIMKDMLSAVMQEVPLAALAVHCHDTYGQALANTLMALQMGVSVVDSSVAGLGGCPYAQGASGNLATEDLVYMLEGLGIHTGVNLQKLLEAGNFICQALNRKTSSKVAQATCKL

SEQ ID NO: 9475 - protein, 541 aa, Homo sapiens
MPFRLLIPLGLLCALLPQHHGAPGPDGSAPDPAHYSFSLTLIDALDTLLILGNVSEFQRVVEVLQDSVDFDIDVNASVFETNIRVVGGLLSAHLLSKKAGVEVEAGWPCSGPLLRMAEEAARKLLPAFQTPTGMPYGTVNLLHGVNPGETPVTCTAGIGTFIVEFATLSSLTGDPVFEDVARVALMRLWESRSDIGLVGNHIDVLTGKWVAQDAGIGAGVDSYFEYLVKGAILLQDKKLMAMFLEYNKAIRNYTRFDDWYLWVQMYKGTVSMPVFQSLEAYWPGLQSLIGDIDNAMRTFLNYYTVWKQFGGLPEFYNIPQGYTVEKREGYPLRPELIESAMYLYRATGDPTLLELGRDAVESIEKISKVECGFATIKDLRDHKLDNRMESFFLAETVKYLYLLFDPTNFIHNNGSTFDAVITPYGECILGAGGYIFNTEAHPIDPAALHCCQRLKEEQWEVEDLMREFYSLKRSRSKFQKNTVSSGPWEPPARPGTLFSPENHDQARERKPAKQKVPLLSCPSQPFTSKLALLGQVFLDSS

SEQ ID NO: 9476 - protein, 578 aa, Homo sapiens
MPFRLLIPLGLLCALLPQHHGAPGPDGSAPDPAHYRERVKAMFYHAYDSYLENAFPFDELRPLTCDGHDTWGSFSLTLIDALDTLLILGNVSEFQRVVEVLQDSVDFDIDVNASVFETNIRVVGGLLSAHLLSKKAGVEVEAGWPCSGPLLRMAEEAARKLLPAFQTPTGMPYGTVNLLHGVNPGETPVTCTAGIGTFIVEFATLSSLTGDPVFEDVARVALMRLWESRSDIGLVGNHIDVLTGKWVAQDAGIGAGVDSYFEYLVKGAILLQDKKLMAMFLEYNKAIRNYTRFDDWYLWVQMYKGTVSMPVFQSLEAYWPGLQSLIGDIDNAMRTFLNYYTVWKQFGGLPEFYNIPQGYTVEKREGYPLRPELIESAMYLYRATGDPTLLELGRDAVESIEKISKVECGFATIKDLRDHKLDNRMESFFLAETVKYLYLLFDPTNFIHNNGSTFDAVITPYGECILGAGGYIFNTEAHPIDPAALHCCQRLKEEQWEVEDLMREFYSLKRSRSKFQKNTVSSGPWEPPARPGTLFSPENHDQARERKPAKQKVPLLSCPSQPFTSKLALLGQVFLDSS

SEQ ID NO: 9477 - protein, 156 aa, Homo sapiens
MPALLPVASRLLLLPRVLLTMASGSPPTQPSPASDSGSGYVPGSVSAAFVTCPNEKVAKEIARAVVEKRLAACVNLIPQITSIYEWKGKIEEDSEVLMMIKTQSSLVPALTDFVRSVHPYEVAEVIALPVEQGNFPYLQWVRQVTESVSDSITVLP

SEQ ID NO: 9478 - protein, 348 aa, Homo sapiens
MAEKVLVTGGAGYIGSHTVLELLEAGYLPVVIDNFHNAFRGGGSLPESLRRVQELTGRSVEFEEMDILDQGALQRLFKKYSFMAVIHFAGLKAVGESVQKPLDYYRVNLTGTIQLLEIMKAHGVKNLVFSSSATVYGNPQYLPLDEAHPTGGCTNPYGKSKFFIEEMIRDLCQADKTWNAVLLRYFNPTGAHASGCIGEDPQGIPNNLMPYVSQVAIGRREALNVFGNDYDTEDGTGVRDYIHVVDLAKGHIAALRKLKEQCGCRIYNLGTGTGYSVLQMVQAMEKASGKKIPYKVVARREGDVAACYANPSLAQEELGWTAALGLDRMCEDLWRWQKQNPSGFGTQA

SEQ ID NO: 9479 - protein, 105 aa, Homo sapiens
MVKQIESKTAFQEALDAAGDKLVVVDFSATWCGPCKMIKPFFHSLSEKYSNVIFLEVDVDDCQDVASECEVKCMPTFQFFKKGQKVGEFSGANKEKLEATINELV

SEQ ID NO: 9480 - protein, 1282 aa, Homo sapiens
MEAKDQKKHRKKNSGPKAAKKKKRLLQDLQLGDEEDARKRNPKAFAVQSAVRMARSFHRTQDLKTKKHHIPVVDRTPLEPPPIVVVVMGPPKVGKSTLIQCLIRNFTRQKLTEIRGPVTIVSGKKRRLTIIECGCDINMMIDLAKVADLVLMLIDASFGFEMETFEFLNICQVHGFPKIMGVLTHLDSFKHNKQLKKTKKRLKHRFWTEVYPGAKLFYLSGMVHGEYQNQEIHNLGRFITVMKFRPLTWQTSHPYILADRMEDLTNPEDIRTNIKCDRKVSLYGYLRGAHLKNKSQIHMPGVGDFAVSDISFLPDPCALPEQQKKRCLNEKEKLVYAPLSGVGGVLYDKDAVYVDLGGSHVFQDEVGPTHELVQSLISTHSTIDAKMASSRVTLFSDSKPLGSEDIDNQGLMMPKEEKQMDLNTGRMRRKAIFGDEDESGDSDDEEDDEMSEDDGLENGSSDEEAEEEENAEMTDQYMAVKGIKRRKLELEEDSEMDLPAFADSDDDLERSSAEEGEAEEADESSEEEDCTAGEKGISGSKAAGEGSKAGLSPANCQSDRVNLEKSLLMKKAALPTFDSGHCTAEEVFASEDESEESSSLSAEEEDSENEEAIRKKLSKPSQVSSGQKLGPQNFIDETSDIENLLKEEEDYKEENNDSKETSGALKWKEDLSRKAAEAFLRQQQAAPNLRKLIYGTVTEDNEEEDDDTLEELGGLFRVNQPDRECKHKADSLDCSRFLVEAPHDWDLEEVMNSIRDCFVTGKWEDDKDAAKVLAEDEELYGDFEDLETGDVHKGKSGPNTQNEDIEKEVKEEIDPDEEESAKKKHLDKKRKLKEMFDAEYDEGESTYFDDLKGEMQKQAQLNRAEFEDQDDEARVQYEGFRPGMYVRIEIENVPCEFVQNFDPHYPIILGGLGNSEGNVGYVQMRLKKHRWYKKILKSRDPIIFSVGWRRFQTIPLYYIEDHNGRQRLLKYTPQHMHCGAAFWGPITPQGTGFLAIQSVSGIMPDFRIAATGVVLDLDKSIKIVKKLKLTGFPYKIFKNTSFIKGMFNSALEVAKFEGAVIRTVSGIRGQIKKALRAPEGAFRASFEDKLLMSDIVFMRTWYPVSIPAFYNPVTSLLKPVGEKDTWSGMRTTGQLRLAHGVRLKANKDSLYKPILRQKKHFNSLHIPKALQKALPFKNKPKTQAKAGKVPKDRRRPAVIREPHERKILALLDALSTVHSQKMKKAKEQRHLHNKEHFRAKQKEEEEKLKRQKDLRKKLFRIQGQKERRNQKSSLKGAEGQLQ

SEQ ID NO: 9481 - protein, 98 aa, Homo sapiens
MSFDDTEREPDQTFSLNRDLTGELEYATKISRFSNVYHLSIHISKNFGADTTKVFYIGLRGEWTELRRHEVTICNYEASANPADHRVHQVTPQTHFIS

SEQ ID NO: 9482 - protein, 1103 aa, Homo sapiens
MAEAELHKERLQAIAEKRKRQTEIEGKRQQLDEQILLLQHSKSKVLREKWLLQGIPAGTAEEEEARRRQSEEDEFRVKQLEDNIQRLEQEIQTLESEESQISAKEQIILEKLKETEKSFKDFQKGFSSTDGDAVNYISSQLPDLPILCSRTAEPSPGQDGTSRAAGVGWENVLLKEGESASNATETSGPDMTIKKPPQLSEDDIWLKSEGDNYSATLLEPAASSLSPDHKNMEIEVSVAECKSVPGITSTPHPMDHPSAFYSPPHNGLLTDHHESLDNDVAREIRYLDEVLEANCCDSAVDGTYNGTSSPEPGAVVLVGGLSPPVHEATQPEPTERTASRQAPPHIELSNSSPDPMAEAERTNGHSPSQPRDALGDSLQVPVSPSSTTSSRCSSRDGEFTLTTLKKEAKFELRAFHEDKKPSKLFEDDEHEKEQYCIRKVRPSEEMLELEKERRELIRSQAVKKNPGIAAKWWNPPQEKTIEEQLDEEHLESHKKYKERKERRAQQEQLLLQKQLQQQQQQPPSQLCTAPASSHERASMIDKAKEDIVTEQIDFSAARKQFQLMENSRQAVAKGQSTPRLFSIKPFYRPLGSVNSDKPLTNPRPPSVGGPPEDSGASAAKGQKSPGALETPSAAGSQGNTASQGKEGPYSEPSKRGPLSKLWAEDGEFTSARAVLTVVKDDDHGILDQFSRSVNVSLTQEELDSGLDELSVRSQDTTVLETLSNDFSMDNISDSGASNETTNALQENSLADFSLPQTPQTDNPSEGRGEGVSKSFSDHGFYSPSSTLGDSPLVDDPLEYQAGLLVQNAIQQAIAEQVDKAVSKTSRDGAEQQGPEATVEEAEAAAFGSEKPQSMFEPPQVSSPVQEKRDVLPKILPAEDRALRERGPPQPLPAVQPSGPINMEETRPEGSYFSKYSEAAELRSTASLLATQESDVMVGPFKLRSRKQRTLSMIEEEIRAAQEREEELKRQRQVLQSTQSPRTKNAPSLPSRTCYKTAPGKIEKVKPPPSPTTEGPSLQPDLAPEEAAGTQRPKNLMQTLMEDYETHKSKRRERMDDSSYTSKLLSCKVTSEVLEATRVNRRKSALALRWEAGIYANQEEEDNE

SEQ ID NO: 9483 - protein, 119 aa, Homo sapiens
MKALSPVRGCYEAVCCLSERSLAIARGRGKGPAAEEPLSLLDDMNHCYSRLRELVPGVPRGTQLSQVEILQRVIDYILDLQVVLAEPAPGPPDGPHLPIQTAELTPELVISNDKRSFCH

SEQ ID NO: 9484 - protein, 530 aa, Homo sapiens
MTSSLQRPWRVPWLPWTILLVSTAAASQNQERLCAFKDPYQQDLGIGESRISHENGTILCSKGSTCYGLWEKSKGDINLVKQGCWSHIGDPQECHYEECVVTTTPPSIQNGTYRFCCCSTDLCNVNFTENFPPPDTTPLSPPHSFNRDETIIIALASVSVLAVLIVALCFGYRMLTGDRKQGLHSMNMMEAAASEPSLDLDNLKLLELIGRGRYGAVYKGSLDERPVAVKVFSFANRQNFINEKNIYRVPLMEHDNIARFIVGDERVTADGRMEYLLVMEYYPNGSLCKYLSLHTSDWVSSCRLAHSVTRGLAYLHTELPRGDHYKPAISHRDLNSRNVLVKNDGTCVISDFGLSMRLTGNRLVRPGEEDNAAISEVGTIRYMAPEVLEGAVNLRDCESALKQVDMYALGLIYWEIFMRCTDLFPGESVPEYQMAFQTEVGNHPTFEDMQVLVSREKQRPKFPEAWKENSLAVRSLKETIEDCWDQDAEARLTAQCAEERMAELMMIWERNKSVSPTVNPMSTAMQNERR

SEQ ID NO: 9485 - protein, 1038 aa, Homo sapiens
MTSSLQRPWRVPWLPWTILLVSTAAASQNQERLCAFKDPYQQDLGIGESRISHENGTILCSKGSTCYGLWEKSKGDINLVKQGCWSHIGDPQECHYEECVVTTTPPSIQNGTYRFCCCSTDLCNVNFTENFPPPDTTPLSPPHSFNRDETIIIALASVSVLAVLIVALCFGYRMLTGDRKQGLHSMNMMEAAASEPSLDLDNLKLLELIGRGRYGAVYKGSLDERPVAVKVFSFANRQNFINEKNIYRVPLMEHDNIARFIVGDERVTADGRMEYLLVMEYYPNGSLCKYLSLHTSDWVSSCRLAHSVTRGLAYLHTELPRGDHYKPAISHRDLNSRNVLVKNDGTCVISDFGLSMRLTGNRLVRPGEEDNAAISEVGTIRYMAPEVLEGAVNLRDCESALKQVDMYALGLIYWEIFMRCTDLFPGESVPEYQMAFQTEVGNHPTFEDMQVLVSREKQRPKFPEAWKENSLAVRSLKETIEDCWDQDAEARLTAQCAEERMAELMMIWERNKSVSPTVNPMSTAMQNERNLSHNRRVPKIGPYPDYSSSSYIEDSIHHTDSIVKNISSEHSMSSTPLTIGEKNRNSINYERQQAQARIPSPETSVTSLSTNTTTTNTTGLTPSTGMTTISEMPYPDETNLHTTNVAQSIGPTPVCLQLTEEDLETNKLDPKEVDKNLKESSDENLMEHSLKQFSGPDPLSSTSSSLLYPLIKLAVEATGQQDFTQTANGQACLIPDVLPTQIYPLPKQQNLPKRPTSLPLNTKNSTKEPRLKFGSKHKSNLKQVETGVAKMNTINAAEPHVVTVTMNGVAGRNHSVNSHAATTQYANGTVLSGQTTNIVTHRAQEMLQNQFIGEDTRLNINSSPDEHEPLLRREQQAGHDEGVLDRLVDRRERPLEGGRTNSNNNNSNPCSEQDVLAQGVPSTAADPGPSKPRRAQRPNSLDLSATNVLDGSSIQIGESTQDGKSGSGEKIKKRVKTPYSLKRWRPSTWVISTESLDCEVNNNGSNRAVHSKSSTAVYLAEGGTATTMVSKDIGMNCL

SEQ ID NO: 9486 - protein, 879 aa, Homo sapiens [sequence omitted]

SEQ ID NO: 9487 - protein, 129 aa, Homo sapiens
MAELIQKKLQGEVEKYQQLQKDLSKSMSGRQKLEAQLTENNIVKEELALLDGSNVVFKLLGPVLVKQELGEARATVGKRLDYITAEIKRYESQLRDLERQSEQQRETLAQLQQEFQRAQAAKAGAPGKA

SEQ ID NO: 9488 - protein, 636 aa, Homo sapiens
MANQVNGNAVQLKEEEEPMDTSSVTHTEHYKTLIEAGLPQKVAERLDEIFQTGLVAYVDLDERAIDALREFNEEGALSVLQQFKESDLSHVQNKSAFLCGVMKTYRQREKQGSKVQESTKGPDEAKIKALLERTGYTLDVTTGQRKYGGPPPDSVYSGVQPGIGTEVFVGKIPRDLYEDELVPLFEKAGPIWDLRLMMDPLSGQNRGYAFITFCGKEAAQEAVKLCDSYEIRPGKHLGVCISVANNRLFVGSIPKNKTKENILEEFSKVTGLTEGLVDVILYHQPDDKKKNRGFCFLEYEDHKSAAQARRRLMSGKVKVWGNVVTVEWADPVEEPDPEVMAKVKVLFVRNLATTVTEEILEKSFSEFGKLERVKKLKDYAFVHFEDRGAAVKAMDEMNGKEIEGEEIEIVLAKPPDKKRKERQAARQASRSTAYEDYYYHPPPRMPPPIRGRGRGGGRGGYGYPPDYYGYEDYYDDYYGYDYHDYRGGYEDPYYGYDDGYAVRGRGGGRGGRGAPPPPRGRGAPPPRGRAGYSQRGAPLGPPRGSRGGRGGPAQQQRGRGSRGSRGNRGGNVGGKRKADGYNQPDSKRRQTNNQQNWGSQPIAQQPLQQGGDYSGNYGYNNDNQEFYQDTYGQQWK

SEQ ID NO: 9489 - protein, 610 aa, Homo sapiens
METAPKPGKDVPPKKDKLQTKRKKPRRYWEEETVPTTAGASPGPPRNKKNRELRPQRPKNAYILKKSRISKKPQVPKKPREWKNPESQRGLSGTQDPFPGPAPVPVEVVQKFCRIDKSRKLPHSKAKTRSRLEVAEAEEEETSIKAARSELLLAEEPGFLEGEDGEDTAKICQADIVEAVDIASAAKHFDLNLRQFGPYRLNYSRTGRHLAFGGRRGHVAALDWVTKKLMCEINVMEAVRDIRFLHSEALLAVAQNRWLHIYDNQGIELHCIRRCDRVTRLEFLPFHFLLATASETGFLTYLDVSVGKIVAALNARAGRLDVMSQNPYNAVIHLGHSNGTVSLWSPAMKEPLAKILCHRGGVRAVAVDSTGTYMATSGLDHQLKIFDLRGTYQPLSTRTLPHGAGHLAFSQRGLLVAGMGDVVNIWAGQGKASPPSLEQPYLTHRLSGPVHGLQFCPFEDVLGVGHTGGITSMLVPGAGEPNFDGLESNPYRSRKQRQEWEVKALLEKVPAELICLDPRALAEVDVISLEQGKKEQIERLGYDPQAKAPFQPKPKQKGRSSTASLVKRKRKVMDEEHRDKVRQSLQQQHHKEAKAKPTGARPSALDRFVR

SEQ ID NO: 9490 - protein, 699 aa, Homo sapiens
MLTKEQGDVIGIPFNVDVSSFPSRKMFCQCDSCGMSFNTVSELVISKINYLGKKSDEFNACGKLLLNIKHDETHTQEKNEVLKNRNTLSHHEETLQHEKIQTLEHNFEYSICQETLLEKAVFNTQKRENAEENNCDYNEFGRTLCDSSSLLFHQISPSRDNHYEFSDCEKFLCVKSTLSKPHGVSMKHYDCGESGNNFRRKLCLSHLQKGDKGEKHFECNECGKAFWEKSHLTRHQRVHTGQKPFQCNECEKAFWDKSNLTKHQRSHTGEKPFECNECGKAFSHKSALTLHQRTHTGEKPYQCNACGKTFCQKSDLTKHQRTHTGLKPYECYECGKSFRVTSHLKVHQRTHTGEKPFECLECGKSFSEKSNLTQHQRIHIGDKSYECNACGKTFYHKSLLTRHQIIHTGWKPYECYECGKTFCLKSDLTVHQRTHTGQKPFACPECGKFFSHKSTLSQHYRTHTGEKPYECHECGKIFYNKSYLTKHNRTHTGEKPYECNECGKAFYQKSQLTQHQRIHIGEKPYKCNECGKAFCHKSALIVHQRTHTQEKPYKCNECGKSFCVKSGLIFHERKHTGEKPYECNECGKFFRHKSSLTVHHRAHTGEKSCQCNECGKIFYRKSELAQHQRSHTGEKPYECNTCRKTFSQKSNLIVHQRRHIGENLMNEMDIRNFQPQVSLHNASEYSHCGESPDDILNVQ

SEQ ID NO: 9491 - protein, 193 aa, Homo sapiens
MAEAEESPGDPGTASPRPLMRDLKAVGKKFMHVLYPRKSNTLLRDWDLWGPLILCVTLALMLQRDSADSEKDGGPQFAEVFVIVWFGAVTITLNSKLLGGNISFFQSLCVLGYCILPLTVAMLICRLVLLADPGPVNFMVRLFVVIVMFAWSIVASTAFLADSQPPNRRALAVYPVFLFYFVISWMILTFTPQ

SEQ ID NO: 9492 - protein, 181 aa, Homo sapiens
MATEPEAAEPVVPSLVDRYFTRWYKPDVKGKFCEDHCILQHSNRICVITLAESHPVLQSGKTIKSISYQISTNCSRLQNKVSGKFKRGAQFLTELAPLCKIYCSDGEEYTVSSCVRGRLMEVNENILHKPSILQEKPSTEGYIAVVLPKFEESKSITEGLLTQKQYEEVMVKRINATTATS

SEQ ID NO: 9493 - protein, 986 aa, Homo sapiens
MALRRLGAALLLLPLLAAVEETLMDSTTATAELGWMVHPPSGWEEVSGYDENMNTIRTYQVCNVFESSQNNWLRTKFIRRRGAHRIHVEMKFSVRDCSSIPSVPGSCKETFNLYYYEADFDSATKTFPNWMENPWVKVDTIAADESFSQVDLGGRVMKINTEVRSFGPVSRSGFYLAFQDYGGCMSLIAVRVFYRKCPRIIQNGAIFQETLSGAESTSLVAARGSCIANAEEVDVPIKLYCNGDGEWLVPIGRCMCKAGFEAVENGTVCRGCPSGTFKANQGDEACTHCPINSRTTSEGATNCVCRNGYYRADLDPLDMPCTTIPSAPQAVISSVNETSLMLEWTPPRDSGGREDLVYNIICKSCGSGRGACTRCGDNVQYAPRQLGLTEPRIYISDLLAHTQYTFEIQAVNGVTDQSPFSPQFASVNITTNQAAPSAVSIMHQVSRTVDSITLSWSQPDQPNGVILDYELQYYEKELSEYNATAIKSPTNTVTVQGLKAGAIYVFQVRARTVAGYGRYSGKMYFQTMTEAEYQTSIQEKLPLIIGSSAAGLVFLIAVVVIAIVCNRRGFERADSEYTDKLQHYTSGHMTPGMKIYIDPFTYEDPNEAVREFAKEIDISCVKIEQVIGAGEFGEVCSGHLKLPGKREIFVAIKTLKSGYTEKQRRDFLSEASIMGQFDHPNVIHLEGVVTKSTPVMIITEFMENGSLDSFLRQNDGQFTVIQLVGMLRGIAAGMKYLADMNYVHRDLAARNILVNSNLVCKVSDFGLSRFLEDDTSDPTYTSALGGKIPIRWTAPEAIQYRKFTSASDVWSYGIVMWEVMSYGERPYWDMTNQDVINAIEQDYRLPPPMDCPSALHQLMLDCWQKDRNHRPKFGQIVNTLDKMIRNPNSLKAMAPLSSGINLPLLDRTIPDYTSFNTVDEWLEAIKMGQYKESFANAGFTSFDVVSQMMMEDILRVGVTLAGHQKKILNSIQVMRAQMNQIQSVEV

SEQ ID NO: 9494 - protein, 987 aa, Homo sapiens
MALRRLGAALLLLPLLAAVEETLMDSTTATAELGWMVHPPSGWEEVSGYDENMNTIRTYQVCNVFESSQNNWLRTKFIRRRGAHRIHVEMKFSVRDCSSIPSVPGSCKETFNLYYYEADFDSATKTFPNWMENPWVKVDTIAADESFSQVDLGGRVMKINTEVRSFGPVSRSGFYLAFQDYGGCMSLIAVRVFYRKCPRIIQNGAIFQETLSGAESTSLVAARGSCIANAEEVDVPIKLYCNGDGEWLVPIGRCMCKAGFEAVENGTVCRGCPSGTFKANQGDEACTHCPINSRTTSEGATNCVCRNGYYRADLDPLDMPCTTIPSAPQAVISSVNETSLMLEWTPPRDSGGREDLVYNIICKSCGSGRGACTRCGDNVQYAPRQLGLTEPRIYISDLLAHTQYTFEIQAVNGVTDQSPFSPQFASVNITTNQAAPSAVSIMHQVSRTVDSITLSWSQPDQPNGVILDYELQYYEKELSEYNATAIKSPTNTVTVQGLKAGAIYVFQVRARTVAGYGRYSGKMYFQTMTEAEYQTSIQEKLPLIIGSSAAGLVFLIAVVVIAIVCNRRRGFERADSEYTDKLQHYTSGHMTPGMKIYIDPFTYEDPNEAVREFAKEIDISCVKIEQVIGAGEFGEVCSGHLKLPGKREIFVAIKTLKSGYTEKQRRDFLSEASIMGQFDHPNVIHLEGVVTKSTPVMIITEFMENGSLDSFLRQNDGQFTVIQLVGMLRGIAAGMKYLADMNYVHRDLAARNILVNSNLVCKVSDFGLSRFLEDDTSDPTYTSALGGKIPIRWTAPEAIQYRKFTSASDVWSYGIVMWEVMSYGERPYWDMTNQDVINAIEQDYRLPPPMDCPSALHQLMLDCWQKDRNHRPKFGQIVNTLDKMIRNPNSLKAMAPLSSGINLPLLDRTIPDYTSFNTVDEWLEAIKMGQYKESFANAGFTSFDVVSQMMMEDILRVGVTLAGHQKKILNSIQVMRAQMNQIQSVEV

SEQ ID NO: 9495 - protein, 245 aa, Homo sapiens
MDVGPSSLPHLGLKLLLLLLLLPLRGQANTGCYGIPGMPGLPGAPGKDGYDGLPGPKGEPGIPAIPGIRGPKGQKGEPGLPGHPGKNGPMGPPGMPGVPGPMGIPGEPGEEGRYKQKFQSVFTVTRQTHQPPAPNSLIRFNAVLTNPQGDYDTSTGKFTCKVPGLYYFVYHASHTANLCVLLYRSGVKVVTFCGHTSKTNQVNSGGVLLRLQVGEEVWLAVNDYYDMVGIQGSDSVFSGFLLFPD

SEQ ID NO: 9496 - protein, 245 aa, Homo sapiens
MEGPRGWLVLCVLAISLASMVTEDLCRAPDGKKGEAGRPGRRGRPGLKGEQGEPGAPGIRTGIQGLKGDQGEPGPSGNPGKVGYPGPSGPLGARGIPGIKGTKGSPGNIKDQPRPAFSAIRRNPPMGGNVVIFDTVITNQEEPYQNHSGRFVCTVPGYYYFTFQVLSQWEICLSIVSSSRGQVRRSLGFCDTTNKGLFQVVSGGMVLQLQQGDQVWVEKDPKKGHIYQGSEADSVFSGFLIFPSA

SEQ ID NO: 9497 - protein, 495 aa, Homo sapiens
MAPARGRLPPALWVVTAAAAAATCVSAARGEVNLLDTSTIHGDWGWLTYPAHGWDSINEVDESFQPIHTYQVCNVMSPNQNNWLRTSWVPRDGARRVYAEIKFTLRDCNSMPGVLGTCKETFNLYYLESDRDLGASTQESQFLKIDTIAADESFTGADLGVRRLKLNTEVRSVGPLSKRGFYLAFQDIGACLAILSLRIYYKKCPAMVRNLAAFSEAVTGADSSSLVEVRGQCVRHSEERDTPKMYCSAEGEWLVPIGKCVCSAGYEERRDACVACELGFYKSAPGDQLCARCPPHSHSAAPAAQACHCDLSYYRAALDPPSSACTRPPSAPVNLISSVNGTSVTLEWAPPLDPGGRSDITYNAVCRRCPWALSRCEACGSGTRFVPQQTSLVQASLLVANLLAHMNYSFWIEAVNGVSDLSPEPRRAAVVNITTNQAGRRRNSVPQRPGPPASPASDPSRDQSSAGDVLWAFRQVPLWPCAPHQDPELEALHCL

SEQ ID NO: 9498 - protein, 406 aa, Homo sapiens
MTTPANAQNASKTWELSLYELHRTPQEAIMDGTEIAVSPRSLHSELMCPICLDMLKNTMTTKECLHRFCSDCIVTALRSGNKECPTCRKKLVSKRSLRPDPNFDALISKIYPSREEYEAHQDRVLIRLSRLHNQQALSSSIEEGLRMQAMHRAQRVRRPIPGSDQTTTMSGGEGEPGEGEGDGEDVSSDSAPDSAPGPAPKRPRGGGAGGSSVGTGGGGTGGVGGGAGSEDSGDRGGTLGGGTLGPPSPPGAPSPPEPGGEIELVFRPHPLLVEKGEYCQTRYVKTTGNATVDHLSKYLALRIALERRQQQEAGEPGGPGGGASDTGGPDGCGGEGGGAGGGDGPEEPALPSLEGVSEKQYTIYIAPGGGAFTTLNGSLTLELVNEKFWKVSRPLELCYAPTKDPK

SEQ ID NO: 9499 - protein, 261 aa, Homo sapiens
MASQLQNRLRSALALVTGAGSGIGRAVSVRLAGEGATVAACDLDRAAAQETVRLLGGPGSKEGPPRGNHAAFQADVSEARAARCLLEQVQACFSRPPSVVVSCAGITQDEFLLHMSEDDWDKVIAVNLKGTFLVTQAAAQALVSNGCRGSIINISSIVGKVGNVGQTNYAASKAGVIGLTQTAARELGRHGIRCNSVLPGFIATPMTQKVPQKVVDKITEMIPMGHLGDPEDVADVVAFLASEDSGYITGTSVEVTGGLFM

SEQ ID NO: 9500 - protein, 479 aa, Homo sapiens
MRQPPGESDMAVSDALLPSFSTFASGPAGREKTLRQAGAPNNRWREELSHMKRLPPVLPGRPYDLAAATVATDLESGGAGAACGGSNLAPLPRRETEEFNDLLDLDFILSNSLTHPPESVAATVSSSASASSSSSPSSSGPASAPSTCSFTYPIRAGNDPGVAPGGTGGGLLYGRESAPPPTAPFNLADINDVSPSGGFVAELLRPELDPVYIPPQQPQPPGGGLMGKFVLKASLSAPGSEYGSPSVISVSKGSPDGSHPVVVAPYNGGPPRTCPKIKQEAVSSCTHLGAGPPLSNGHRPAAHDFPLGRQLPSRTTPTLGLEEVLSSRDCHPALPLPPGFHPHPGPNYPSFLPDQMQPQVPPLHYQELMPPGSCMPEEPKPKRGRRSWPRKRTATHTCDYAGCGKTYTKSSHLKAHLRTHTGEKPYHCDWDGCGWKFARSDELTRHYRKHTGHRPFQCQKCDRAFSRSDHLALHMKRHF

SEQ ID NO: 9501 - protein, 469 aa, Homo sapiens
MARGLGAPHWVAVGLLTWATLGLLVAGLGGHDDLHDDLQEDFHGHSHRHSHEDFHHGHSHAHGHGHTHESIWHGHTHDHDHGHSHEDLHHGHSHGYSHESLYHRGHGHDHEHSHGGYGESGAPGIKQDLDAVTLWAYALGATVLISAAPFFVLFLIPVESNSPRHRSLLQILLSFASGGLLGDAFLHLIPHALEPHSHHTLEQPGHGHSHSGQGPILSVGLWVLSGIVAFLVVEKFVRHVKGGHGHSHGHGHAHSHTRGSHGHGRQERSTKEKQSSEEEEKETRGVQKRRGGSTVPKDGPVRPQNAEEEKRGLDLRVSGYLNLAADLAHNFTDGLAIGASFRGGRGLGILTTMTVLLHEVPHEVGDFAILVQSGCSKKQAMRLQLLTAVGALAGTACALLTEGGAVGSEIAGGAGPGWVLPFTAGGFIYVATVSVLPELLREASPLQSLLEVLGLLGGVIMMVLIAHLE

SEQ ID NO: 9502 - protein, 533 aa, Homo sapiens
MSWAARPPFLPQRHAAGQCGPVGVRKEMHCGVASRWRRRRPWLDPAAAAAAAVAGGEQQTPEPEPGEAGRDGMGDSGRDSRSPDSSSPNPLPQGVPPPSPPGPPLPPSTAPSLGGSGAPPPPPMPPPPLGSPFPVISSSMGSPGLPPPAPPGFSGPVSSPQINSTVSLPGGGSGPPEDVKPPVLGVRGLHCPPPPGGPGAGKRLCAICGDRSSGKHYGVYSCEGCKGFFKRTIRKDLTYSCRDNKDCTVDKRQRNRCQYCRYQKCLATGMKREAVQEERQRGKDKDGDGEGAGGAPEEMPVDRILEAELAVEQKSDQGVEGPGGTGGSGSSPNDPVTNICQAADKQLFTLVEWAKRIPHFSSLPLDDQVILLRAGWNELLIASFSHRSIDVRDGILLATGLHVHRNSAHSAGVGAIFDRVLTELVSKMRDMRMDKTELGCLRAIILFNPDAKGLSNPSEVEVLREKVYASLETYCKQKYPEQQGRFAKLLLRLPALRSIGLKCLEHLFFFKLIGDTPIDTFLMEMLEAPHQLA

SEQ ID NO: 9503 - protein, 537 aa, Homo sapiens
MSWAARPPFLPQRHAAGQCGPVGVRKEMHCGVASRWRRRRPWLDPAAAAAAAVAGGEQQTPEPEPGEAGRDGMGDSGRDSRSPDSSSPNPLPQGVPPPSPPGPPLPPSTAPSLGGSGAPPPPPMPPPPLGSPFPVISSSMGSPGLPPPAPPGFSGPVSSPQINSTVSLPGGGSGPPEDVKPPVLGVRGLHCPPPPGGPGAGKRLCAICGDRSSGKHYGVYSCEGCKGFFKRTIRKDLTYSCRDNKDCTVDKRQRNRCQYCRYQKCLATGMKREAVQEERQRGKDKDGDGEGAGGAPEEMPVDRILEAELAVEQKSDQGVEGPGGTGGSGSSPNDPVTNICQAADKQLFTLVEWAKRIPHFSSLPLDDQVILLRAGWNELLIASFSHRSIDVRDGILLATGLHVHRNSAHSAGVGAIFDRSLSRVLTELVSKMRDMRMDKTELGCLRAIILFNPDAKGLSNPSEVEVLREKVYASLETYCKQKYPEQQGRFAKLLLRLPALRSIGLKCLEHLFFFKLIGDTPIDTFLMEMLEAPHQLA

SEQ ID NO: 9504 - protein, 920 aa, Homo sapiens
MEVQLGLGRVYPRPPSKTYRGAFQNLFQSVREVIQNPGPRHPEAASAAPPGASLLLLQQQQQQQQQQQQQQQQQQQQQQQETSPRQQQQQQGEDGSPQAHRRGPTGYLVLDEEQQPSQPQSALECHPERGCVPEPGAAVAASKGLPQQLPAPPDEDDSAAPSTLSLLGPTFPGLSSCSADLKDILSEASTMQLLQQQQQEAVSEGSSSGRAREASGAPTSSKDNYLGGTSTISDNAKELCKAVSVSMGLGVEALEHLSPGEQLRGDCMYAPLLGVPPAVRPTPCAPLAECKGSLLDDSAGKSTEDTAEYSPFKGGYTKGLEGESLGCSGSAAAGSSGTLELPSTLSLYKSGALDEAAAYQSRDYYNFPLALAGPPPPPPPPHPHARIKLENPLDYGSAWAAAAAQCRYGDLASLHGAGAAGPGSGSPSAAASSSWHTLFTAEEGQLYGPCGGGGGGGGGGGGGGGGGGGGGGGEAGAVAPYGYTRPPQGLAGQESDFTAPDVWYPGGMVSRVPYPSPTCVKSEMGPWMDSYSGPYGDMRLETARDHVLPIDYYFPPQKTCLICGDEASGCHYGALTCGSCKVFFKRAAEGKQKYLCASRNDCTIDKFRRKNCPSCRLRKCYEAGMTLGARKLKKLGNLKLQEEGEASSTTSPTEETTQKLTVSHIEGYECQPIFLNVLEAIEPGVVCAGHDNNQPDSFAALLSSLNELGERQLVHVVKWAKALPGFRNLHVDDQMAVIQYSWMGLMVFAMGWRSFTNVNSRMLYFAPDLVFNEYRMHKSRMYSQCVRMRHLSQEFGWLQITPQEFLCMKALLLFSIIPVDGLKNQKFFDELRMNYIKELDRIIACKRKNPTSCSRRFYQLTKLLDSVQPIARELHQFTFDLLIKSHMVSVDFPEMMAEIISVQVPKILSGKVKPIYFHTQ

SEQ ID NO: 9505 - protein, 291 aa, Homo sapiens
MDSPWDELALAFSRTSMFPFFDIAHYLVSVMAVKRQPGAAALAWKNPISSWFTAMLHCFGGGILSCLLLAEPPLKFLANHTNILLASSIWYITFFCPHDLVSQGYSYLPVQLLASGMKEVTRTWKIVGGVTHANSYYKNGWIVMIAIGWARGAGGTIITNFERLVKGDWKPEGDEWLKMSYPAKVTLLGSVIFTFQHTQHLAISKHNLMFLYTIFIVATKITMMTTQTSTMTFAPFEDTLSWMLFGWQQPFSSCEKKSEAKSPSNGVGSLASKPVDVASDNVKKKHTKKNE

SEQ ID NO: 9506 - protein, 694 aa, Homo sapiens
MEWGYLLEVTSLLAALALLQRSSGAAAASAKELACQEITVPLCKGIGYNYTYMPNQFNHDTQDEAGLEVHQFWPLVEIQCSPDLKFFLCSMYTPICLEDYKKPLPPCRSVCERAKAGCAPLMRQYGFAWPDRMRCDRLPEQGNPDTLCMDYNRTDLTTAAPSPPRRLPPPPPGEQPPSGSGHGRPPGARPPHRGGGRGGGGGDAAAPPARGGGGGGKARPPGGGAAPCEPGCQCRAPMVSVSSERHPLYNRVKTGQIANCALPCHNPFFSQDERAFTVFWIGLWSVLCFVSTFATVSTFLIDMERFKYPERPIIFLSACYLFVSVGYLVRLVAGHEKVACSGGAPGAGGAGGAGGAAAGAGAAGAGAGGPGGRGEYEELGAVEQHVRYETTGPALCTVVFLLVYFFGMASSIWWVILSLTWFLAAGMKWGNEAIAGYSQYFHLAAWLVPSVKSIAVLALSSVDGDPVAGICYVGNQSLDNLRGFVLAPLVIYLFIGTMFLLAGFVSLFRIRSVIKQQDGPTKTHKLEKLMIRLGLFTVLYTVPAAVVVACLFYEQHNRPRWEATHNCPCLRDLQPDQARRPDYAVFMLKYFMCLVVGITSGVWVWSGKTLESWRSLCTRCCWASKGAAVGGGAGATAAGGGGGPGGGGGGGPGGGGGPGGGGGSLYSDVSTGLTWRSGTASSVSYPKQMPLSQV

SEQ ID NO: 9507 - protein, 4391 aa, Homo sapiens
MGWRAAGALLLALLLHGRLLAVTHGLRAYDGLSLPEDIETVTASQMRWTHSYLSDDEDMLADSISGDDLGSGDLGSGDFQMVYFRALVNFTRSIEYSPQLEDAGSREFREVSEAVVDTLESEYLKIPGDQVVSVVFIKELDGWVFVELDVGSEGNADGAQIQEMLLRVISSGSVASYVTSPQGFQFRRLGTVPQFPRACTEAEFACHSYNECVALEYRCDRRPDCRDMSDELNCEEPVLGISPTFSLLVETTSLPPRPETTIMRQPPVTHAPQPLLPGSVRPLPCGPQEAACRNGHCIPRDYLCDGQEDCEDGSDELDCGPPPPCEPNEFPCGNGHCALKLWRCDGDFDCEDRTDEANCPTKRPEEVCGPTQFRCVSTNMCIPASFHCDEESDCPDRSDEFGCMPPQVVTPPRESIQASRGQTVTFTCVAIGVPTPIINWRLNWGHIPSHPRVTVTSEGGRGTLIIRDVKESDQGAYTCEAMNARGMVFGIPDGVLELVPQRGPCPDGHFYLEHSAACLPCFCFGITSVCQSTRRFRDQIRLRFDQPDDFKGVNVTMPAQPGTPPLSSTQLQIDPSLHEFQLVDLSRRFLVHDSFWALPEQFLGNKVDSYGGSLRYNVRYELARGMLEPVQRPDVVLMGAGYRLLSRGHTPTQPGALNQRQVQFSEEHWVHESGRPVQRAELLQVLQSLEAVLIQTVYNTKMASVGLSDIAMDTTVTHATSHGRAHSVEECRCPIGYSGLSCESCDAHFTRVPGGPYLGTCSGCNCNGHASSCDPVYGHCLNCQHNTEGPQCNKCKAGFFGDAMKATATSCRPCPCPYIDASRRFSDTCFLDTDGQATCDACAPGYTGRRCESCAPGYEGNPIQPGGKCRPVNQEIVRCDERGSMGTSGEACRCKNNVVGRLCNECADGSFHLSTRNPDGCLKCFCMGVSRHCTSSSWSRAQLHGASEEPGHFSLTNAASTHTTNEGIFSPTPGELGFSSFHRLLSGPYFWSLPSRFLGDKVTSYGGELRFTVTQRSQPGSTPLHGQPLVVLQGNNIILEHHVAQEPSPGQPSTFIVPFREQAWQRPDGQPATREHLLMALAGIDTLLIRASYAQQPAESRVSGISMDVAVPEETGQDPALEVEQCSCPPGYRGPSCQDCDTGYTRTPSGLYLGTCERCSCHGHSEACEPETGACQGCQHHTEGPRCEQCQPGYYGDAQRGTPQDCQLCPCYGDPAAGQAAHTCFLDTDGHPTCDACSPGHSGRHCERCAPGYYGNPSQGQPCQRDSQVPGPIGCNCDPQGSVSSQCDAAGQCQCKAQVEGLTCSHCRPHHFHLSASNPDGCLPCFCMGITQQCASSAYTRHLISTHFAPGDFQGFALVNPQRNSRLTGEFTVEPVPEGAQLSFGNFAQLGHESFYWQLPETYQGDKVAAYGGKLRYTLSYTAGPQGSPLSDPDVQITGNNIMLVASQPALQGPERRSYEIMFREEFWRRPDGQPATREHLLMALADLDELLIRATFSSVPLAASISAVSLEVAQPGPSNRPRALEVEECRCPPGYIGLSCQDCAPGYTRTGSGLYLGHCELCECNGHSDLCHPETGACSQCQHNAAGEFCELCAPGYYGDATAGTPEDCQPCACPLTNPENMFSRTCESLGAGGYRCTACEPGYTGQYCEQCGPGYVGNPSVQGGQCLPETNQAPLVVEVHPARSIVPQGGSHSLRCQVSGSPPHYFYWSREDGRPVPSGTQQRHQGSELHFPSVQPSDAGVYICTCRNLHQSNTSRAELLVTEAPSKPITVTVEEQRSQSVRPGADVTFICTAKSKSPAYTLVWTRLHNGKLPTRAMDFNGILTIRNVQLSDAGTYVCTGSNMFAMDQGTATLHVQASGTLSAPVVSIHPPQLTVQPGQLAEFRCSATGSPTPTLEWTGGPGGQLPAKAQIHGGILRLPAVEPTDQAQYLCRAHSSAGQQVARAVLHVHGGGGPRVQVSPERTQVHAGRTVRLYCRAAGVPSATITWRKEGGSLPPQARSERTDIATLLIPAITTADAGFYLCVATSPAGTAQARIQVVVLSASDASPPPVKIESSSPSVTEGQTLDLNCVVAGSAHAQVTWYRRGGSLPPHTQVHGSRLRLPQVSPADSGEYVCRVENGSGPKEASITVSVLHGTHSGPSYTPVPGSTRPIRIEPSSSHVAEGQTLDLNCVVPGQAHAQVTWHKRGGSLPARHQTHGSLLRLHQVTPADSGEYVCHVVGTSGPLEASVLVTIEASVIPGPIPPVRIESSSSTVAEGQTLDLSCVVAGQAHAQVTWYKRGGSLPARHQVRGSRLYIFQASPADAGQYVCRASNGMEASITVTVTGTQGANLAYPAGSTQPIRIEPSSSQVAEGQTLDLNCVVPGQSHAQVTWHKRGGSLPVRHQTHGSLLRLYQASPADSGEYVCRVLGSSVPLEASVLVTIEPAGSVPALGVTPTVRIESSSSQVAEGQTLDLNCLVAGQAHAQVTWHKRGGSLPARHQVHGSRLRLLQVTPADSGEYVCRVVGSSGTQEASVLVTIQQRLSGSHSQGVAYPVRIESSSASLANGHTLDLNCLVASQAPHTITWYKRGGSLPSRHQIVGSRLRIPQVTPADSGEYVCHVSNGAGSRETSLIVTIQGSGSSHVPSVSPPIRIESSSPTVVEGQTLDLNCVVARQPQAIITWYKRGGSLPSRHQTHGSHLRLHQMSVADSGEYVCRANNNIDALEASIVISVSPSAGSPSAPGSSMPIRIESSSSHVAEGETLDLNCVVPGQAHAQVTWHKRGGSLPSHHQTRGSRLRLHHVSPADSGEYVCRVMGSSGPLEASVLVTIEASGSSAVHVPAPGGAPPIRIEPSSSRVAEGQTLDLKCVVPGQAHAQVTWHKRGGNLPARHQVHGPLLRLNQVSPADSGEYSCQVTGSSGTLEASVLVTIEPSSPGPIPAPGLAQPIYIEASSSHVTEGQTLDLNCVVPGQAHAQVTWYKRGGSLPARHQTHGSQLRLHLVSPADSGEYVCRAASGPGPEQEASFTVTVPPSEGSSYRLRSPVISIDPPSSTVQQGQDASFKCLIHDGAAPISLEWKTRNQELEDNVHISPNGSIITIVGTRPSNHGTYRCVASNAYGVAQSVVNLSVHGPPTVSVLPEGPVWVKVGKAVTLECVSAGEPRSSARWTRISSTPAKLEQRTYGLMDSHAVLQISSAKPSDAGTYVCLAQNALGTAQKQVEVIVDTGAMAPGAPQVQAEEAELTVEAGHTATLRCSATGSPAPTIHWSKLRSPLPWQHRLEGDTLIIPRVAQQDSGQYICNATSPAGHAEATIILHVESPPYATTVPEHASVQAGETVQLQCLAHGTPPLTFQWSRVGSSLPGRATARNELLHFERAAPEDSGRYRCRVTNKVGSAEAFAQLLVQGPPGSLPATSIPAGSTPTVQVTPQLETKSIGASVEFHCAVPSDRGTQLRWFKEGGQLPPGHSVQDGVLRIQNLDQSCQGTYICQAHGPWGKAQASAQLVIQALPSVLINIRTSVQTVVVGHAVEFECLALGDPKPQVTWSKVGGHLRPGIVQSGGVVRIAHVELADAGQYRCTATNAAGTTQSHVLLLVQALPQISMPQEVRVPAGSAAVFPCIASGYPTPDISWSKLDGSLPPDSRLENNMLMLPSVRPQDAGTYVCTATNRQGKVKAFAHLQVPERVVPYFTQTPYSFLPLPTIKDAYRKFEIKITFRPDSADGMLLYNGQKRVPGSPTNLANRQPDFISFGLVGGRPEFRFDAGSGMATIRHPTPLALGHFHTVTLLRSLTQGSLIVGDLAPVNGTSQGKFQGLDLNEELYLGGYPDYGAIPKAGLSSGFIGCVRELRIQGEEIVFHDLNLTAHGISHCPTCRDRPCQNGGQCHDSESSSYVCVCPAGFTGSRCEHSQALHCHPEACGPDATCVNRPDGRGYTCRCHLGRSGLRCEEGVTVTTPSLSGAGSYLALPALTNTHHELRLDVEFKPLAPDGVLLFSGGKSGPVEDFVSLAMVGGHLEFRYELGSGLAVLRSAEPLALGRWHRVSAERLNKDGSLRVNGGRPVLRSSPGKSQGLNLHTLLYLGGVEPSVPLSPATNMSAHFRGCVGEVSVNGKRLDLTYSFLGSQGIGQCYDSSPCERQPCQHGATCMPAGEYEFQCLCRDGFKGDLCEHEENPCQLREPCLHGGTCQGTRCLCLPGFSGPRCQQGSGHGIAESDWHLEGSGGNDAPGQYGAYFHDDGFLAFPGHVFSRSLPEVPETIELEVRTSTASGLLLWQGVEVGEAGQGKDFISLGLQDGHLVFRYQLGSGEARLVSEDPINDGEWHRVTALREGRRGSIQVDGEELVSGRSPGPNVAVNAKGSVYIGGAPDVATLTGGRFSSGITGCVKNLVLHSARPGAPPPQPLDLQHRAQAGANTRPCPS

SEQ ID NO: 9508 - protein, 1338 aa, Homo sapiens
MDRASELLFYVNGRKVIEKNVDPETMLLPYLRKKLRLTGTKYGCGGGGCGACTVMISRYNPITKRIRHHPANACLIPICSLYGAAVTTVEGIGSTHTRIHPVQERIAKCHGTQCGFCTPGMVMSIYTLLRNHPEPTLDQLTDALGGNLCRCTGYRPIIDACKTFCKTSGCCQSKENGVCCLDQGINGLPEFEEGSKTSPKLFAEEEFLPLDPTQELIFPPELMIMAEKQSQRTRVFGSERMMWFSPVTLKELLEFKFKYPQAPVIMGNTSVGPEVKFKGVFHPVIISPDRIEELSVVNHAYNGLTLGAGLSLAQVKDILADVVQKLPEEKTQMYHALLKHLGTLAGSQIRNMASLGGHIISRHPDSDLNPILAVGNCTLNLLSKEGKRQIPLNEQFLSKCPNADLKPQEILVSVNIPYSRKWEFVSAFRQAQRQENALAIVNSGMRVFFGEGDGIIRELCISYGGVGPATICAKNSCQKLIGRHWNEQMLDIACRLILNEVSLLGSAPGGKVEFKRTLIISFLFKFYLEVSQILKKMDPVHYPSLADKYESALEDLHSKHHCSTLKYQNIGPKQHPEDPIGHPIMHLSGVKHATGEAIYCDDMPLVDQELFLTFVTSSRAHAKIVSIDLSEALSMPGVVDIMTAEHLSDVNSFCFFTEAEKFLATDKVFCVGQLVCAVLADSEVQAKRAAKRVKIVYQDLEPLILTIEESIQHNSSFKPERKLEYGNVDEAFKVVDQILEGEIHMGGQEHFYMETQSMLVVPKGEDQEMDVYVSTQFPKYIQDIVASTLKLPANKVMCHVRRVGGAFGGKVLKTGIIAAVTAFAANKHGRAVRCVLERGEDMLITGGRHPYLGKYKAGFMNDGRILALDMEHYSNAGASLDESLFVIEMGLLKMDNAYKFPNLRCRGWACRTNLPSNTAFRGFGFPQAALITESCITEVAAKCGLSPEKVRIINMYKEIDQTPYKQEINAKNLIQCWRECMAMSSYSLRKVAVEKFNAENYWKKKGLAMVPLKFPVGLGSRAAGQAAALVHIYLDGSVLVTHGGIEMGQGVHTKMIQVVSRELRMPMSNVHLRGTSTETVPNANISGGSVVADLNGLAVKDACQTLLKRLEPIISKNPKGTWKDWAQTAFDESINLSAVGYFRGYESDMNWEKGEGQPFEYFVYGAACSEVEIDCLTGDHKNIRTDIVMDVGCSINPAIDIGQIEGAFIQGMGLYTIEELNYSPQGILHTRGPDQYKIPAICDMPTELHIALLPPSQNSNTLYSSKGLGESGVFLGCSVFFAIHDAVSAARQERGLHGPLTLNSPLTPEKIRMACEDKFTKMIPRDEPGSYVPWNVPI

SEQ ID NO: 9509 - protein, 341 aa, Homo sapiens
MGNTTSCCVSSSPKLRRNAHSRLESYRPDTDLSREDTGCNLQHISDRENIDDLNMEFNPSDHPRASTIFLSKSQTDVREKRKSLFINHHPPGQIARKYSSCSTIFLDDSTVSQPNLKYTIKCVALAIYYHIKNRDPDGRMLLDIFDENLHPLSKSEVPPDYDKHNPEQKQIYRFVRTLFSAAQLTAECAIVTLVYLERLLTYAEIDICPANWKRIVLGAILLASKVWDDQAVWNVDYCQILKDITVEDMNELERQFLELLQFNINVPSSVYAKYYFDLRSLAEANNLSFPLEPLSRERAHKLEAISRLCEDKYKDLRRSARKRSASADNLTLPRWSPAIIS

SEQ ID NO: 9510 - protein, 1650 aa, Homo sapiens
MERCSRCHRLLLLLPLVLGLSAAPGWAGAPPVDVLRALRFPSLPDGVRRAKGICPADVAYRVARPAQLSAPTRQLFPGGFPKDFSLLTVVRTRPGLQAPLLTLYSAQGVRQLGLELGRPVRFLYEDQTGRPQPPSQPVFRGLSLADGKWHRVAVAVKGQSVTLIVDCKKRVTRPLPRSARPVLDTHGVIIFGARILDEEVFEGDVQELAIVPGVQAAYESCEQKELECEGGQRERPQNQQPHRAQRSPQQQPSRLHRPQNQEPQSQDPTPGEEEEILESSLLPPLEEAAHGPRGLKGEKGEPAVLEPGMLVEGPPGPEGPAGLIGPPGIQGNPGPVGDPGERGPPGRAGLPGSDGAPGPPGTSLMLPFRFGSGGGDKGPVVAAQEAQAQAILQQARLALRGPPGPMGYTGRPGPLGQPGSPGLKGESGDLGPQGPRGPQGLTGPPGKAGRRGRAGADGARGMPGDPGVKGDRGFDGLPGLPGEKGHRGDTGAQGLPGPPGEDGERGDDGEIGPRGLPGESGPRGLLGPKGPPGIPGPPGVRGMDGPQGPKGSLGPQGEPGPPGQQGTPGTQGLPGPQGAIGPHGEKGPQGKPGLPGMPGSDGPPGHPGKEGPPGTKGNQGPSGPQGPLGYPGPRGVKGVDGIRGLKGHKGEKGEDGFPGFKGDIGVKGDRGEVGVPGSRGEDGPEGPKGRTGPTGDPGPPGLMGEKGKLGVPGLPGYPGRQGPKGSLGFPGFPGASGEKGARGLSGKSGPRGERGPTGPRGQRGPRGATGKSGAKGTSGGDGPHGPPGERGLPGPQGPNGFPGPKGPPGPPGKDGLPGHPGQRGEVGFQGKTGPPGPPGVVGPQGAAGETGPMGERGHPGPPGPPGEQGLPGTAGKEGTKGDPGPPGAPGKDGPAGLRGFPGERGLPGTAGGPGLKGNEGPSGPPGPAGSPGERGAAGSGGPIGPPGRPGPQGPPGAAGEKGVPGEKGPIGPTGRDGVQGPVGLPGPAGPPGVAGEDGDKGEVGDPGQKGTKGNKGEHGPPGPPGPIGPVGQPGAAGADGEPGARGPQGHFGAKGDEGTRGFNGPPGPIGLQGLPGPSGEKGETGDVGPMGPPGPPGPRGPAGPNGADGPQGPPGGVGNLGPPGEKGEPGESGSPGIQGEPGVKGPRGERGEKGESGQPGEPGPPGPKGPTGDDGPKGNPGPVGFPGDPGPPGEGGPRGQDGAKGDRGEDGEPGQPGSPGPTGENGPPGPLGKRGPAGSPGSEGRQGGKGAKGDPGAIGAPGKTGPVGPAGPAGKPGPDGLRGLPGSVGQQGRPGATGQAGPPGPVGPPGLPGLRGDAGAKGEKGHPGLIGLIGPPGEQGEKGDRGLPGPQGSPGQKGEMGIPGASGPIGPGGPPGLPGPAGPKGAKGATGPGGPKGEKGVQGPPGHPGPPGEVIQPLPIQMPKKTRRSVDGSRLMQEDEAIPTGGAPGSPGGLEEIFGSLDSLREEIEQMRRPTGTQDSPARTCQDLKLCHPELPDGEYWVDPNQGCARDAFRVFCNFTAGGETCVTPRDDVTQFSYVDSEGSPVGVVQLTFLRLLSVSAHQDVSYPCSGAARDGPLRLRGANEDELSPETSPYVKEFRDGCQTQQGRTVLEVRTPVLEQLPVLDASFSDLGAPPRRGGVLLGPVCFMG

SEQ ID NO: 9511 - protein, 297 aa, Homo sapiens
MDCQENEYWDQWGRCVTCQRCGPGQELSKDCGYGEGGDAYCTACPPRRYKSSWGHHRCQSCITCAVINRVQKVNCTATSNAVCGDCLPRFYRKTRIGGLQDQECIPCTKQTPTSEVQCAFQLSLVEADTPTVPPQEATLVALVSSLLVVFTLAFLGLFFLYCKQFFNRHCQRGGLLQFEADKTAKEESLFPVPPSKETSAESQVSENIFQTQPLNPILEDDCSSTSGFPTQESFTMASCTSESHSHWVHSPIECTELDLQKFSSSASYTGAETLGGNTVESTGDRLELNVPFEVPSP

SEQ ID NO: 9512 - protein, 657 aa, Homo sapiens
MGCCSSASSAAQSSKREWKPLEDRSCTDIPWLLLFILFCIGMGFICGFSIATGAAARLVSGYDSYGNICGQKNTKLEAIPNSGMDHTQRKYVFFLDPCNLDLINRKIKSVALCVAACPRQELKTLSDVQKFAEINGSALCSYNLKPSEYTTSPKSSVLCPKLPVPASAPIPFFHRCAPVNISCYAKFAEALITFVSDNSVLHRLISGVMTSKEIILGLCLLSLVLSMILMVIIRYISRVLVWILTILVILGSLGGTGVLWWLYAKQRRSPKETVTPEQLQIAEDNLRALLIYAISATVFTVILFLIMLVMRKRVALTIALFHVAGKVFIHLPLLVFQPFWTFFALVLFWVYWIMTLLFLGTTGSPVQNEQGFVEFKISGPLQYMWWYHVVGLIWISEFILACQQMTVAGAVVTYYFTRDKRNLPFTPILASVNRLIRYHLGTVAKGSFIITLVKIPRMILMYIHSQLKGKENACARCVLKSCICCLWCLEKCLNYLNQNAYTATAINSTNFCTSAKDAFVILVENALRVATINTVGDFMLFLGKVLIVCSTGLAGIMLLNYQQDYTVWVLPLIIVCLFAFLVAHCFLSIYEMVVDVLFLCFAIDTKYNDGSPGREFYMDKVLMEFVENSRKAMKEAGKGGVADSRELKPMASGASSA

SEQ ID NO: 9513 - protein, 654 aa, Homo sapiens
MGCCSSASSAAQSSKREWKPLEDRSCTDIPWLLLFILFCIGMGFICGFSIATGAAARLVSGYDSYGNICGQKNTKLEAIPNSGMDHTQRKYVFFLDPCNLDLINRKIKSVALCVAACPRQELKTLSDVQKFAEINGSALCSYNLKPSEYTTSPKSSVLCPKLPVPASAPIPFFHRCAPVNISCYAKFAEALITFVSDNSVLHRLISGVMTSKEIILGLCLLSLVLSMILMVIIRYISRVLVWILTILVILGSLGGTGVLWWLYAKQRRSPKETVTPEQLQIAEDNLRALLIYAISATVFTVILFLIMLVMRKRVALTIALFHVAGKVFIHLPLLVFQPFWTFFALVLFWVYWIMTLLFLGTTGSPVQNEQGFVEFKISGPLQYMWWYHVVGLIWISEFILACQQMTVAGAVVTYYFTRDKRNLPFTPILASVNRLIRYHLGTVAKGSFIITLVKIPRMILMYIHSQLKGKENACARCVLKSCICCLWCLEKCLNYLNQNAYTATAINSTNFCTSAKDAFVILVENALRVATINTVGDFMLFLGKVLIVCSTGLAGIMLLNYQQDYTVWVLPLIIVCLFAFLVAHCFLSIYEMVVDVLFLCFAIDTKYNDGSPGREFYMDKVLMEFVENSRKAMKEAGKGGVADSRELKPMLKKR

SEQ ID NO: 9514 - protein, 2261 aa, Homo sapiens
MACWPQLRLLLWKNLTFRRRQTCQLLLEVAWPLFIFLILISVRLSYPPYEQHECHFPNKAMPSAGTLPWVQGIICNANNPCFRYPTPGEAPGVVGNFNKSIVARLFSDARRLLLYSQKDTSMKDMRKVLRTLQQIKKSSSNLKLQDFLVDNETFSGFLYHNLSLPKSTVDKMLRADVILHKVFLQGYQLHLTSLCNGSKSEEMIQLGDQEVSELCGLPREKLAAAERVLRSNMDILKPILRTLNSTSPFPSKELAEATKTLLHSLGTLAQELFSMRSWSDMRQEVMFLTNVNSSSSSTQIYQAVSRIVCGHPEGGGLKIKSLNWYEDNNYKALFGGNGTEEDAETFYDNSTTPYCNDLMKNLESSPLSRIIWKALKPLLVGKILYTPDTPATRQVMAEVNKTFQELAVFHDLEGMWEELSPKIWTFMENSQEMDLVRMLLDSRDNDHFWEQQLDGLDWTAQDIVAFLAKHPEDVQSSNGSVYTWREAFNETNQAIRTISRFMECVNLNKLEPIATEVWLINKSMELLDERKFWAGIVFTGITPGSIELPHHVKYKIRMDIDNVERTNKIKDGYWDPGPRADPFEDMRYVWGGFAYLQDVVEQAIIRVLTGTEKKTGVYMQQMPYPCYVDDIFLRVMSRSMPLFMTLAWIYSVAVIIKGIVYEKEARLKETMRIMGLDNSILWFSWFISSLIPLLVSAGLLVVILKLGNLLPYSDPSVVFVFLSVFAVVTILQCFLISTLFSRANLAAACGGIIYFTLYLPYVLCVAWQDYVGFTLKIFASLLSPVAFGFGCEYFALFEEQGIGVQWDNLFESPVEEDGFNLTTSVSMMLFDTFLYGVMTWYIEAVFPGQYGIPRPWYFPCTKSYWFGEESDEKSHPGSNQKRISEICMEEEPTHLKLGVSIQNLVKVYRDGMKVAVDGLALNFYEGQITSFLGHNGAGKTTTMSILTGLFPPTSGTAYILGKDIRSEMSTIRQNLGVCPQHNVLFDMLTVEEHIWFYARLKGLSEKHVKAEMEQMALDVGLPSSKLKSKTSQLSGGMQRKLSVALAFVGGSKVVILDEPTAGVDPYSRRGIWELLLKYRQGRTIILSTHHMDEADVLGDRIAIISHGKLCCVGSSLFLKNQLGTGYYLTLVKKDVESSLSSCRNSSSTVSYLKKEDSVSQSSSDAGLGSDHESDTLTIDVSAISNLIRKHVSEARLVEDIGHELTYVLPYEAAKEGAFVELFHEIDDRLSDLGISSYGISETTLEEIFLKVAEESGVDAETSDGTLPARRNRRAFGDKQSCLRPFTEDDAADPNDSDIDPESRETDLLSGMDGKGSYQVKGWKLTQQQFVALLWKRLLIARRSRKGFFAQIVLPAVFVCIALVFSLIVPPFGKYPSLELQPWMYNEQYTFVSNDAPEDTGTLELLNALTKDPGFGTRCMEGNPIPDTPCQAGEEEWTTAPVPQTIMDLFQNGNWTMQNPSPACQCSSDKIKKMLPVCPPGAGGLPPPQRKQNTADILQDLTGRNISDYLVKTYVQIIAKSLKNKIWVNEFRYGGFSLGVSNTQALPPSQEVNDAIKQMKKHLKLAKDSSADRFLNSLGRFMTGLDTKNNVKVWFNNKGWHAISSFLNVINNAILRANLQKGENPSHYGITAFNHPLNLTKQQLSEVALMTTSVDVLVSICVIFAMSFVPASFVVFLIQERVSKAKHLQFISGVKPVIYWLSNFVWDMCNYVVPATLVIIIFICFQQKSYVSSTNLPVLALLLLLYGWSITPLMYPASFVFKIPSTAYVVLTSVNLFIGINGSVATFVLELFTDNKLNNINDILKSVFLIFPHFCLGRGLIDMVKNQAMADALERFGENRFVSPLSWDLVGRNLFAMAVEGVVFFLITVLIQYRFFIRPRPVNAKLSPLNDEDEDVRRERQRILDGGGQNDILEIKELTKIYRRKRKPAVDRICVGIPPGECFGLLGVNGAGKSSTFKMLTGDTTVTRGDAFLNKNSILSNIHEVHQNMGYCPQFDAITELLTGREHVEFFALLRGVPEKEVGKVGEWAIRKLGLVKYGEKYAGNYSGGNKRKLSTAMALIGGPPVVFLDEPTTGMDPKARRFLWNCALSVVKEGRSVVLTSHSMEECEALCTRMAIMVNGRFRCLGSVQHLKNRFGDGYTIVVRIAGSNPDLKPVQDFFGLAFPGSVLKEKHRNMLQYQLPSSLSSLARIFSILSQSKKRLHIEDYSVSQTTLDQVFVNFAKDQSDDDHLKDLSLHKNQTVVDVAVLTSFLQDEKVKESYV

SEQ ID NO: 9515 - protein, 399 aa, Homo sapiens
MGILLGLLLLGHLTVDTYGRPILEVPESVTGPWKGDVNLPCTYDPLQGYTQVLVKWLVQRGSDPVTIFLRDSSGDHIQQAKYQGRLHVSHKVPGDVSLQLSTLEMDDRSHYTCEVTWQTPDGNQVVRDKITELRVQKLSVSKPTVTTGSGYGFTVPQGMRISLQCQARGSPPISYIWYKQQTNNQEPIKVATLSTLLFKPAVIADSGSYFCTAKGQVGSEQHSDIVKFVVKDSSKLLKTKTEAPTTMTYPLKATSTVKQSWDWTTDMDGYLGETSAGPGKSLPVFAIILIISLCCMVVFTMAYIMLCRKTSQQEHVYEAARAHAREANDSGETMRVAIFASGCSSDEPTSQNLGNNYSDEPCIGQEYQIIAQINGNYARLLDTVPLDYEFLATEGKSVC

SEQ ID NO: 9516 - protein, 745 aa, Homo sapiens
MSLKPRVVDFDETWNKLLTTIKAVVMLEYVERATWNDRFSDIYALCVAYPEPLGERLYTETKIFLENHVRHLHKRVLESEEQVLVMYHRYWEEYSKGADYMDCLYRYLNTQFIKKNKLTEADLQYGYGGVDMNEPLMEIGELALDMWRKLMVEPLQAILIRMLLREIKNDRGGEDPNQKVIHGVINSFVHVEQYKKKFPLKFYQEIFESPFLTETGEYYKQEASNLLQESNCSQYMEKVLGRLKDEEIRCRKYLHPSSYTKVIHECQQRMVADHLQFLHAECHNIIRQEKKNDMANMYVLLRAVSTGLPHMIQELQNHIHDEGLRATSNLTQENMPTLFVESVLEVHGKFVQLINTVLNGDQHFMSALDKALTSVVNYREPKSVCKAPELLAKYCDNLLKKSAKGMTENEVEDRLTSFITVFKYIDDKDVFQKFYARMLAKRLIHGLSMSMDSEEAMINKLKQACGYEFTSKLHRMYTDMSVSADLNNKFNNFIKNQDTVIDLGISFQIYVLQAGAWPLTQAPSSTFAIPQELEKSVQMFELFYSQHFSGRKLTWLHYLCTGEVKMNYLGKPYVAMVTTYQMAVLLAFNNSETVSYKELQDSTQMNEKELTKTIKSLLDVKMINHDSEKEDIDAESSFSLNMNFSSKRTKFKITTSMQKDTPQEMEQTRSAVDEDRKMYLQAAIVRIMKARKVLRHNALIQEVISQSRARFNPSISMIKKCIEVLIDKQYIERSQASADEYSYVA

SEQ ID NO: 9517 - protein, 1119 aa, Homo sapiens
MTAAAASNWGLITNIVNSIVGVSVLTMPFCFKQCGIVLGALLLVFCSWMTHQSCMFLVKSASLSKRRTYAGLAFHAYGKAGKMLVETSMIGLMLGTCIAFYVVIGDLGSNFFARLFGFQVGGTFRMFLLFAVSLCIVLPLSLQRNMMASIQSFSAMALLFYTVFMFVIVLSSLKHGLFSGQWLRRVSYVRWEGVFRCIPIFGMSFACQSQVLPTYDSLDEPSVKTMSSIFASSLNVVTTFYVMVGFFGYVSFTEATAGNVLMHFPSNLVTEMLRVGFMMSVAVGFPMMILPCRQALSTLLCEQQQKDGTFAAGGYMPPLRFKALTLSVVFGTMVGGILIPNVETILGLTGATMGSLICFICPALIYKKIHKNALSSQVVLWVGLGVLVVSTVTTLSVSEEVPEDLAEEAPGGRLGEAEGLMKVEAARLSAQDPVVAVAEDGREKPKLPKEREELEQAQIKGPVDVPGREDGKEAPEEAQLDRPGQGIAVPVGEAHRHEPPVPHDKVVVDEGQDREVPEENKPPSRHAGGKAPGVQGQMAPPLPDSEREKQEPEQGEVGKRPGQAQALEEAGDLPEDPQKVPEADGQPAVQPAKEDLGPGDRGLHPRPQAVLSEQQNGLAVGGGEKAKGGPPPGNAAGDTGQPAEDSDHGGKPPLPAEKPAPGPGLPPEPREQRDVERAGGNQAASQLEEAGRAEMLDHAVLLQVIKEQQVQQKRLLDQQEKLLAVIEEQHKEIHQQRQEDEEDKPRQVEVHQEPGAAVPRGQEAPEGKARETVENLPPLPLDPVLRAPGGRPAPSQDLNQRSLEHSEGPVGRDPAGPPDGGPDTEPRAAQAKLRDGQKDAAPRAAGTVKELPKGPEQVPVPDPAREAGGPEERLAEEFPGQSQDVTGGSQDRKKPGKEVAATGTSILKEANWLVAGPGAETGDPRMKPKQVSRDLGLAADLPGGAEGAAAQPQAVLRQPELRVISDGEQGGQQGHRLDHGGHLEMRKARGGDHVPVSHEQPRGGEDAAVQEPRQRPEPELGLKRAVPGGQRPDNAKPNRDLKLQAGSDLRRRRRDLGPHAEGQLAPRDGVIIGLNPLPDVQVNDLRGALDAQLRQAAGGALQVVHSRQLRQAPGPPEES

SEQ ID NO: 9518 - protein, 247 aa, Homo sapiens
MLVLRSALTRALASRTLAPQMCSSFATGPRQYDGIFYEFRSYYLKPSKMNEFLENFEKNAHLRTAHSELVGYWSVEFGGRMNTVFHIWKYDNFAHRTEVRKALAKDKEWQEQFLIPNLALIDKQESEITYLVPWCKLEKPPKEGVYELATFQMKPGGPALWGDAFKRAVHAHVNLGYTKLVGVFHTEYGALNRVHVLWWNESADSRAAGRHKSHEDPRVVAAVRESVNYLVSQQNMLLIPTSFSPLK

SEQ ID NO: 9519 - protein, 179 aa, Homo sapiens
MQIPKETKAEDEDIVLTPDGTREFLTFEVPLNDSGSAGLGVSVKGNRSKENHADLGIFVKSIINGGAASKDGRLRVNDQLIAVNGESLLGKTNQDAMETLRRSMSTEGNKRGMIQLIVARRISKCNELKSPGSPPGPELPIETALDDRERRISHSLYSGIEGLDESPSRNAALSRIMGT

SEQ ID NO: 9520 - protein, 304 aa, Homo sapiens
MDNVTVRQGESATLRCTIDDRVTRVAWLNRSTILYAGNDKWSIDPRVIILVNTPTQYSIMIQNVDVYDEGPYTCSVQTDNHPKTSRVHLIVQVPPQIMNISSDITVNEGSSVTLLCLAIGRPEPTVTWRHLSVKEGQGFVSEDEYLEISDIKRDQSGEYECSALNDVAAPDVRKVKITVNYPPYISKAKNTGVSVGQKGILSCEASAVPMAEFQWFKEETRLATGLDGMRIENKGRMSTLTFFNVSEKDYGNYTCVATNKLGNTNASITLYGPGAVIDGVNSASRALACLWLSGTLLAHFFIKF

SEQ ID NO: 9521 - protein, 316 aa, Homo sapiens
MGVCGYLFLPWKCLVVVSLRLLFLVPTGVPVRSGDATFPKAMDNVTVRQGESATLRCTIDNRVTRVAWLNRSTILYAGNDKWCLDPRVVLLSNTQTQYSIEIQNVDVYDEGPYTCSVQTDNHPKTSRVHLIVQVSPKIVEISSDISINEGNNISLTCIATGRPEPTVTWRHISPKAVGFVSEDEYLEIQGITREQSGDYECSASNDVAAPVVRRVKVTVNYPPYISEAKGTGVPVGQKGTLQCEASAVPSAEFQWYKDDKRLIEGKKGVKVENRPFLSKLIFFNVSEHDYGNYTCVASNKLGHTNASIMLFGETVL

SEQ ID NO: 9522 - protein, 344 aa, Homo sapiens
MGVCGYLFLPWKCLVVVSLRLLFLVPTGVPVRSGDATFPKAMDNVTVRQGESATLRCTIDNRVTRVAWLNRSTILYAGNDKWCLDPRVVLLSNTQTQYSIEIQNVDVYDEGPYTCSVQTDNHPKTSRVHLIVQVSPKIVEISSDISINEGNNISLTCIATGRPEPTVTWRHISPKAVGFVSEDEYLEIQGITREQSGDYECSASNDVAAPVVRRVKVTVNYPPYISEAKGTGVPVGQKGTLQCEASAVPSAEFQWYKDDKRLIEGKKGVKVENRPFLSKLIFFNVSEHDYGNYTCVASNKLGHTNASIMLFGPGAVSEVSNGTSRRAGCVWLLPLLVLHLLLKF

SEQ ID NO: 9523 - protein, 344 aa, Homo sapiens
MKTIQPKMHNSISWAIFTGLAALCLFQGVPVRSGDATFPKAMDNVTVRQGESATLRCTIDNRVTRVAWLNRSTILYAGNDKWCLDPRVVLLSNTQTQYSIEIQNVDVYDEGPYTCSVQTDNHPKTSRVHLIVQVSPKIVEISSDISINEGNNISLTCIATGRPEPTVTWRHISPKAVGFVSEDEYLEIQGITREQSGDYECSASNDVAAPVVRRVKVTVNYPPYISEAKGTGVPVGQKGTLQCEASAVPSAEFQWYKDDKRLIEGKKGVKVENRPFLSKLIFFNVSEHDYGNYTCVASNKLGHTNASIMLFGPGAVSEVSNGTSRRAGCVWLLPLLVLHLLLKF

SEQ ID NO: 9524 - protein, 220 aa, Homo sapiens
MFQRLSSLFFSTPSPPEDPDCPRAFVSEEDEVDGWLIIDLPDSYAAPPSPGAAPAPAGRPPPAPSLMDESWFVTPPACFTAEGPGLGPARLQSSPLEDLLIEHPSMSVYVTGSTIVLEPGSPSPLPDAALPDGDLSEGELTPARREPRAARHAAPLPARAALLEKAGQVRRLQRARQRAERHALSAKAVQRQNRARESRPRRSKNQSSFIYQPCQRQFNY

SEQ ID NO: 9525 - protein, 86 aa, Homo sapiens
MALRAGLVLGFHTLMTLLSPQEAGATKGRAGRHRRNQSPSGHPGGALQPQQSHQRASTGDRAPQVSGGAGPAQHPHLHRGQHLPPC

SEQ ID NO: 9526 - protein, 641 aa, Homo sapiens
MERGLPLLCAVLALVLAPAGAFRNDKCGDTIKIESPGYLTSPGYPHSYHPSEKCEWLIQAPDPYQRIMINFNPHFDLEDRDCKYDYVEVFDGENENGHFRGKFCGKIAPPPVVSSGPFLFIKFVSDYETHGAGFSIRYEIFKRGPECSQNYTTPSGVIKSPGFPEKYPNSLECTYIVFVPKMSEIILEFESFDLEPDSNPPGGMFCRYDRLEIWDGFPDVGPHIGRYCGQKTPGRIRSSSGILSMVFYTDSAIAKEGFSANYSVLQSSVSEDFKCMEALGMESGEIHSDQITASSQYSTNWSAERSRLNYPENGWTPGEDSYREWIQVDLGLLRFVTAVGTQGAISKETKKKYYVKTYKIDVSSNGEDWITIKEGNKPVLFQGNTNPTDVVVAVFPKPLITRFVRIKPATWETGISMRFEVYGCKITDYPCSGMLGMVSGLISDSQITSSNQGDRNWMPENIRLVTSRSGWALPPAPHSYINEWLQIDLGEEKIVRGIIIQGGKHRENKVFMRKFKIGYSNNGSDWKMIMDDSKRKAKSFEGNNNYDTPELRTFPALSTRFIRIYPERATHGGLGLRMELLGCEVEGTINTDQECPCARALAKDAKKKKRWADSTHCRCVRSIHGEMWSSGKGVCSLDANL

SEQ ID NO: 9527 - protein, 609 aa, Homo sapiens
MERGLPLLCAVLALVLAPAGAFRNDKCGDTIKIESPGYLTSPGYPHSYHPSEKCEWLIQAPDPYQRIMINFNPHFDLEDRDCKYDYVEVFDGENENGHFRGKFCGKIAPPPVVSSGPFLFIKFVSDYETHGAGFSIRYEIFKRGPECSQNYTTPSGVIKSPGFPEKYPNSLECTYIVFVPKMSEIILEFESFDLEPDSNPPGGMFCRYDRLEIWDGFPDVGPHIGRYCGQKTPGRIRSSSGILSMVFYTDSAIAKEGFSANYSVLQSSVSEDFKCMEALGMESGEIHSDQITASSQYSTNWSAERSRLNYPENGWTPGEDSYREWIQVDLGLLRFVTAVGTQGAISKETKKKYYVKTYKIDVSSNGEDWITIKEGNKPVLFQGNTNPTDVVVAVFPKPLITRFVRIKPATWETGISMRFEVYGCKITDYPCSGMLGMVSGLISDSQITSSNQGDRNWMPENIRLVTSRSGWALPPAPHSYINEWLQIDLGEEKIVRGIIIQGGKHRENKVFMRKFKIGYSNNGSDWKMIMDDSKRKAKSFEGNNNYDTPELRTFPALSTRFIRIYPERATHGGLGLRMELLGCEVEGGTTVLATEKPTVIDSTIQSGIK

SEQ ID NO: 9528 - protein, 644 aa, Homo sapiens
MERGLPLLCAVLALVLAPAGAFRNDKCGDTIKIESPGYLTSPGYPHSYHPSEKCEWLIQAPDPYQRIMINFNPHFDLEDRDCKYDYVEVFDGENENGHFRGKFCGKIAPPPVVSSGPFLFIKFVSDYETHGAGFSIRYEIFKRGPECSQNYTTPSGVIKSPGFPEKYPNSLECTYIVFVPKMSEIILEFESFDLEPDSNPPGGMFCRYDRLEIWDGFPDVGPHIGRYCGQKTPGRIRSSSGILSMVFYTDSAIAKEGFSANYSVLQSSVSEDFKCMEALGMESGEIHSDQITASSQYSTNWSAERSRLNYPENGWTPGEDSYREWIQVDLGLLRFVTAVGTQGAISKETKKKYYVKTYKIDVSSNGEDWITIKEGNKPVLFQGNTNPTDVVVAVFPKPLITRFVRIKPATWETGISMRFEVYGCKITDYPCSGMLGMVSGLISDSQITSSNQGDRNWMPENIRLVTSRSGWALPPAPHSYINEWLQIDLGEEKIVRGIIIQGGKHRENKVFMRKFKIGYSNNGSDWKMIMDDSKRKAKSFEGNNNYDTPELRTFPALSTRFIRIYPERATHGGLGLRMELLGCEVEAPTAGPTTPNGNLVDECDDDQANCHSGTGDDFQLTGGTTVLATEKPTVIDSTIQSGIK

SEQ ID NO: 9529 - protein, 704 aa, Homo sapiens
MERGLPLLCAVLALVLAPAGAFRNDKCGDTIKIESPGYLTSPGYPHSYHPSEKCEWLIQAPDPYQRIMINFNPHFDLEDRDCKYDYVEVFDGENENGHFRGKFCGKIAPPPVVSSGPFLFIKFVSDYETHGAGFSIRYEIFKRGPECSQNYTTPSGVIKSPGFPEKYPNSLECTYIVFVPKMSEIILEFESFDLEPDSNPPGGMFCRYDRLEIWDGFPDVGPHIGRYCGQKTPGRIRSSSGILSMVFYTDSAIAKEGFSANYSVLQSSVSEDFKCMEALGMESGEIHSDQITASSQYSTNWSAERSRLNYPENGWTPGEDSYREWIQVDLGLLRFVTAVGTQGAISKETKKKYYVKTYKIDVSSNGEDWITIKEGNKPVLFQGNTNPTDVVVAVFPKPLITRFVRIKPATWETGISMRFEVYGCKITDYPCSGMLGMVSGLISDSQITSSNQGDRNWMPENIRLVTSRSGWALPPAPHSYINEWLQIDLGEEKIVRGIIIQGGKHRENKVFMRKFKIGYSNNGSDWKMIMDDSKRKAKSFEGNNNYDTPELRTFPALSTRFIRIYPERATHGGLGLRMELLGCEVEAPTAGPTTPNGNLVDECDDDQANCHSGTGDDFQLTGAETIFIPLLYHFSSCLSWDQLTPVCVLVTPHGRELPRNRSCLARTRASSFPHVIWIDELFLIATTICNNNLSHFESQRLGLS

SEQ ID NO: 9530 - protein, 801 aa, Homo sapiens
MLQNVTPHNKLPGEGNAGLLGLGPEAAAPGKRIRKPSLLYEGFESPTMASVPALQLTPANPPPPEVSNPKKPGRVTNQLQYLHKVVMKALWKHQFAWPFRQPVDAVKLGLPDYHKIIKQPMDMGTIKRRLENNYYWAASECMQDFNTMFTNCYIYNKPTDDIVLMAQTLEKIFLQKVASMPQEEQELVVTIPKNSHKKGAKLAALQGSVTSAHQVPAVSSVSHTALYTPPPEIPTTVLNIPHPSVISSPLLKSLHSAGPPLLAVTAAPPAQPLAKKKGVKRKADTTTPTPTAILAPGSPASPPGSLEPKAARLPPMRRESGRPIKPPRKDLPDSQQQHQSSKKGKLSEQLKHCNGILKELLSKKHAAYAWPFYKPVDASALGLHDYHDIIKHPMDLSTVKRKMENRDYRDAQEFAADVRLMFSNCYKYNPPDHDVVAMARKLQDVFEFRYAKMPDEPLEPGPLPVSTAMPPGLAKSSSESSSEESSSESSSEEEEEEDEEDEEEEESESSDSEEERAHRLAELQEQLRAVHEQLAALSQGPISKPKRKREKKEKKKKRKAEKHRGRAGADEDDKGPRAPRPPQPKKSKKASGSGGGSAALGPSGFGPSGGSGTKLPKKATKTAPPALPTGYDSEEEEESRPMSYDEKRQLSLDINKLPGEKLGRVVHIIQAREPSLRDSNPEEIEIDFETLKPSTLRELERYVLSCLRKKPRKPYTIKKPVGKTKEELALEKKRELEKRLQDVSGQLNSTKKPPKKANEKTESSSAQQVAVSRLSASSSSSDSSSSSSSSSSSDTSDSDSG

SEQ ID NO: 9531 - protein, 165 aa, Homo sapiens
MKQLPAATVRLLSSSQIITSVVSVVKELIENSLDAGATSVDVKLENYGFDKIEVRDNGEGIKAVDAPVMAMKYYTSKINSHEDLENLTTYGFRGEALGSICCIAEVLITTRTAADNFSTQYVLDGSGHILSQKPSHLGQGSHSVTQAGLQWHHLGSLQPLPPRLK

SEQ ID NO: 9532 - protein, 524 aa, Homo sapiens
MISPFLVLAIGTCLTNSLVPEKEKDPKYWRDQAQETLKYALELQKLNTNVAKNVIMFLGDGMGVSTVTAARILKGQLHHNPGEETRLEMDKFPFVALSKTYNTNAQVPDSAGTATAYLCGVKANEGTVGVSAATERSRCNTTQGNEVTSILRWAKDAGKSVGIVTTTRVNHATPSAAYAHSADRDWYSDNEMPPEALSQGCKDIAYQLMHNIRDIDVIMGGGRKYMYPKNKTDVEYESDEKARGTRLDGLDLVDTWKSFKPRYKHSHFIWNRTELLTLDPHNVDYLLGLFEPGDMQYELNRNNVTDPSLSEMVVVAIQILRKNPKGFFLLVEGGRIDHGHHEGKAKQALHEAVEMDRAIGQAGSLTSSEDTLTVVTADHSHVFTFGGYTPRGNSIFGLAPMLSDTDKKPFTAILYGNGPGYKVVGGERENVSMVDYAHNNYQAQSAVPLRHETHGGEDVAVFSKGPMAHLLHGVHEQNYVPHVMAYAACIGANLGHCAPASSAGSLAAGPLLLALALYPLSVLF

SEQ ID NO: 9533 - protein, 224 aa, Homo sapiens
MADEQEIMCKLESIKEIRNKTLQMEKIKARLKAEFEALESEERHLKEYKQEMDLLLQEKMAHVEELRLIHADINVMENTIKQSENDLNKLLESTRRLHDEYKPLKEHVDALRMTLGLQRLPDLCEEEEKLSLDYFEKQKAEWQTEPQEPPIPESLAAAAAAAQQLQVARKQDTRQTATFRQQPPPMKACLSCHQQIHRNAPICPLCKAKSRSRNPKKPKRKQDE

SEQ ID NO: 9534 - protein, 261 aa, Homo sapiens
MGHEQNQGAALLQMLPLLWLLPHSWAVPEAPTPMWPDDLQNHTFLHTVYCQDGSPSVGLSEAYDEDQLFFFDFSQNTRVPRLPEFADWAQEQGDAPAILFDKEFCEWMIQQIGPKLDGKIPVSRGFPIAEVFTLKPLEFGKPNTLVCFVSNLFPPMLTVNWQHHSVPVEGFGPTFVSAVDGLSFQAFSYLNFTPEPSDIFSCIVTHEIDRYTAIAYWVPRNALPSDLLENVLCGVAFGLGVLGIIVGIVLIIYFRKPCSGD

SEQ ID NO: 9535 - protein, 219 aa, Homo sapiens
MLRAGAPTGDLPRAGEVHTGTTIMAVEFDGGVVMGSDSRVSAGEAVVNRVFDKLSPLHERIYCALSGSAADAQAVADMAAYQLELHGIELEEPPLVLAAANVVRNISYKYREDLSAHLMVAGWDQREGGQVYGTLGGMLTRQPFAIGGSGSTFIYGYVDAAYKPGMSPEECRRFTTDAIALAMSRDGSSGGVIYLVTITAAGVDHRVILGNELPKFYDE

SEQ ID NO: 9536 - protein, 862 aa, Homo sapiens
MSDSGSQLGSMGSLTMKSQLQITVISAKLKENKKNWFGPSPYVEVTVDGQSKKTEKCNNTNSPKWKQPLTVIVTPVSKLHFRVWSHQTLKSDVLLGTAALDIYETLKSNNMKLEEVVVTLQLGGDKEPTETIGDLSICLDGLQLESEVVTNGETTCSESASQNDDGSRSKDETRVSTNGSDDPEDAGAGENRRVSGNNSPSLSNGGFKPSRPPRPSRPPPPTPRRPASVNGSPSATSESDGSSTGSLPPTNTNTNTSEGATSGLIIPLTISGGSGPRPLNPVTQAPLPPGWEQRVDQHGRVYYVDHVEKRTTWDRPEPLPPGWERRVDNMGRIYYVDHFTRTTTWQRPTLESVRNYEQWQLQRSQLQGAMQQFNQRFIYGNQDLFATSQSKEFDPLGPLPPGWEKRTDSNGRVYFVNHNTRITQWEDPRSQGQLNEKPLPEGWEMRFTVDGIPYFVDHNRRTTTYIDPRTGKSALDNGPQIAYVRDFKAKVQYFRFWCQQLAMPQHIKITVTRKTLFEDSFQQIMSFSPQDLRRRLWVIFPGEEGLDYGGVAREWFFLLSHEVLNPMYCLFEYAGKDNYCLQINPASYINPDHLKYFRFIGRFIAMALFHGKFIDTGFSLPFYKRILNKPVGLKDLESIDPEFYNSLIWVKENNIEECDLEMYFSVDKEILGEIKSHDLKPNGGNILVTEENKEEYIRMVAEWRLSRGVEEQTQAFFEGFNEILPQQYLQYFDAKELEVLLCGMQEIDLNDWQRHAIYRHYARTSKQIMWFWQFVKEIDNEKRMRLLQFVTGTCRLPVGGFADLMGSNGPQKFCIEKVGKENWLPRSHTCFNRLDLPPYKSYEQLKEKLLFAIEETEGFGQE

SEQ ID NO: 9537 - protein, 158 aa, Homo sapiens
MAARSVSGITRRVFMWTVSGTPCREFWSRFRKEKEPVVVETVEEKKEPILVCPPLRSRAYTPPEDLQSRLESYVKEVFGSSLPSNWQDISLEDSRLKFNLLAHLADDLGHVVPNSRLHQMCRVRDVLDFYNVPIQDRSKFDELSASNLPPNLKITWSY

SEQ ID NO: 9538 - protein, 1499 aa, Homo sapiens
MMANWAEARPLLILIVLLGQFVSIKAQEEDEDEGYGEEIACTQNGQMYLNRDIWKPAPCQICVCDNGAILCDKIECQDVLDCADPVTPPGECCPVCSQTPGGGNTNFGRGRKGQKGEPGLVPVVTGIRGRPGPAGPPGSQGPRGERGPKGRPGPRGPQGIDGEPGVPGQPGAPGPPGHPSHPGPDGLSRPFSAQMAGLDEKSGLGSQVGLMPGSVGPVGPRGPQGLQGQQGGAGPTGPPGEPGDPGPMGPIGSRGPEGPPGKPGEDGEPGRNGNPGEVGFAGSPGARGFPGAPGLPGLKGHRGHKGLEGPKGEVGAPGSKGEAGPTGPMGAMGPLGPRGMPGERGRLGPQGAPGQRGAHGMPGKPGPMGPLGIPGSSGFPGNPGMKGEAGPTGARGPEGPQGQRGETGPPGPVGSPGLPGAIGTDGTPGAKGPTGSPGTSGPPGSAGPPGSPGPQGSTGPQGIRGQPGDPGVPGFKGEAGPKGEPGPHGIQGPIGPPGEEGKRGPRGDPGTVGPPGPVGERGAPGNRGFPGSDGLPGPKGAQGERGPVGSSGPKGSQGDPGRPGEPGLPGARGLTGNPGVQGPEGKLGPLGAPGEDGRPGPPGSIGIRGQPGSMGLPGPKGSSGDPGKPGEAGNAGVPGQRGAPGKDGEVGPSGPVGPPGLAGERGEQGPPGPTGFQGLPGPPGPPGEGGKPGDQGVPGDPGAVGPLGPRGERGNPGERGEPGITGLPGEKGMAGGHGPDGPKGSPGPSGTPGDTGPPGLQGMPGERGIAGTPGPKGDRGGIGEKGAEGTAGNDGARGLPGPLGPPGPAGPTGEKGEPGPRGLVGPPGSRGNPGSRGENGPTGAVGFAGPQGPDGQPGVKGEPGEPGQKGDAGSPGPQGLAGSPGPHGPNGVPGLKGGRGTQGPPGATGFPGSAGRVGPPGPAGAPGPAGPLGEPGKEGPPGLRGDPGSHGRVGDRGPAGPPGGPGDKGDPGEDGQPGPDGPPGPAGTTGQRGIVGMPGQRGERGMPGLPGPAGTPGKVGPTGATGDKGPPGPVGPPGSNGPVGEPGPEGPAGNDGTPGRDGAVGERGDRGDPGPAGLPGSQGAPGTPGPVGAPGDAGQRGDPGSRGPIGPPGRAGKRGLPGPQGPRGDKGDHGDRGDRGQKGHRGFTGLQGLPGPPGPNGEQGSAGIPGPFGPRGPPGPVGPSGKEGNPGPLGPIGPPGVRGSVGEAGPEGPPGEPGPPGPPGPPGHLTAALGDIMGHYDESMPDPLPEFTEDQAAPDDKNKTDPGVHATLKSLSSQIETMRSPDGSKKHPARTCDDLKLCHSAKQSGEYWIDPNQGSVEDAIKVYCNMETGETCISANPSSVPRKTWWASKSPDNKPVWYGLDMNRGSQFAYGDHQSPNTAITQMTFLRLLSKEASQNITYICKNSVGYMDDQAKNLKKAVVLKGANDLDIKAEGNIRFRYIVLQDTCSKRNGNVGKTVFEYRTQNVARLPIIDLAPVDVGGTDQEFGVEIGPVCFV

SEQ ID NO: 9539 - protein, 1135 aa, Homo sapiens
METQKDEAAQAKGAAASGSTREQTAEKGAKNKAAEATEGPTSEPSSSGPGRLKKTAMKLFGGKKGICTLPSFFGGGRSKGSGKGSSKKGLSKSKTHDGLSEAAHGPEDVVSEGTGFSLPLPELPCQFPSSQSAHGALETGSRCKTSVAGATEKAVAEKFPSMPKPKKGLKGFFSSIRRHRKSKVTGAEQSEPGAKGPERVRARPHEHVSSAPQVPCFEETFQAPRKENANPQDAPGPKVSPTPEPSPPATEKMACKDPEKPMEACASAHVQPKPAPEASSLEEPHSPETGEKVVAGEVNPPNGPVGDPLSLLFGDVTSLKSFDSLTGCGDIIAEQDMDSMTDSMASGGQRANRDGTKRSSCLVTYQGGGEEMALPDDDDEEEEEEEEVELEEEEEEVKEEEEDDDLEYLWETAQMYPRPNMNLGYHPTTSPGHHGYMLLDPVRSYPGLAPGELLTPQSDQQESAPNSDEGYYDSTTPGFEDDSGEALGLVRRDCLPRDSYSGDALYEFYEPDDSLENSPPGDDCLYDLHGRSSEMFDPFLNFEPFLSSRPPGAMETEEERLVTIQKQLLYWELRREQLEAQEARAREAHAREAHAREAYTREAYGREAYAREAHTWEAHGREARTREAQAREVRCRETQVRETQARQEKPVLEYQMRPLGPSVMGLAAGVSGTSQISHRGITSAFPTTASSEPDWRDFRPLEKRYEGTCSKKDQSTCLMQLFQSDAMFEPDMQEANFGGSPRRAYPTYSPPEDPEEEEVEKEGNATVSFSQALVEFTSNGNLFSSMSCSSDSDSSFTQNLPELPPMVTFDIADVERDGEGKCEENPEFHNDEDLAASLEAFELGYYHKHAFNNYHSRFYQGLPWGVSSLPRYLGLPGLHPRPPPAAMALNRRSRSLDTAETLEMELSNSHLVQGYLESDELQAQQEDSDEEDEEEEEGEWSRDSPLSLYTEPPGAYDWPAWAPCPLPVGPGPAWISPNQLDRPSSQSPYRQATCCIPPMTMSISLSVPESRAPGESGPQLARPSHLHLPMGPCYNLQPQASQSMRARPRDVLLPVDEPSCSSSSGGFSPSPLPQAKPVGITHGIPQLPRVRPEHPQPQPTHYGPSSLDLSKERAEQGASLATSYSSTAMNGNLAK

SEQ ID NO: 9540 - protein, 735 aa, Homo sapiens
MSEIILEFESFDLEPDSNPPGGMFCRYDRLEIWDGFPDVGPHIGRYCGQKTPGRIRSSSGILSMVFYTDSAIAKEGFSANYSVLQSSVSEDFKCMEALGMESGEIHSDQITASSQYSTNWSAERSRLNYPENGWTPGEDSYREWIQVDLGLLRFVTAVGTQGAISKETKKKYYVKTYKIDVSSNGEDWITIKEGNKPVLFQGNTNPTDVVVAVFPKPLITRFVRIKPATWETGISMRFEVYGCKITDYPCSGMLGMVSGLISDSQITSSNQGDRNWMPENIRLVTSRSGWALPPAPHSYINEWLQIDLGEEKIVRGIIIQGGKHRENKVFMRKFKIGYSNNGSDWKMIMDDSKRKAKSFEGNNNYDTPELRTFPALSTRFIRIYPERATHGGLGLRMELLGCEVEAPTAGPTTPNGNLVDECDDDQANCHSGTGGTTVLATEKPTVIDSTIQSEFPTYGFNCEFGWGSHKTFCHWEHDNHVQLKWSVLTSKTGPIQDHTGDGNFIYSQADENQKGKVARLVSPVVYSQNSAHCMTFWYHMSGSHVGTLRVKLRYQKPEEYDQLVWMAIGHQGDHWKEGRVLLHKSLKLYQVIFEGEIGKGNLGGIAVDDISINNHISQEDCAKPADLDKKNPEIKIDETGSTPGYEGEGEGDKNISRKPGNVLKTLDPILITIIAMSALGVLLGAVCGVVLYCACWHNGMSERNLSALENYNFELVDGVKLKKDKLNTQSTYSEA

SEQ ID NO: 9541 - protein, 380 aa, Homo sapiens
MGAAAAEAPLRLPAAPPLAFCCYTSVLLLFAFSLPGSRASNQPPGGGGGSGGDCPGGKGKSINCSELNVRESDVRVCDESSCKYGGVCKEDGDGLKCACQFQCHTNYIPVCGSNGDTYQNECFLRRAACKHQKEITVIARGPCYSDNGSGSGEGEEEGSGAEVHRKHSKCGPCKYKAECDEDAENVGCVCNIDCSGYSFNPVCASDGSSYNNPCFVREASCIKQEQIDIRHLGHCTDTDDTSLLGKKDDGLQYRPDVKDASDQREDVYIGNHMPCPENLNGYCIHGKCEFIYSTQKASCRCESGYTGQHCEKTDFSILYVVPSRQKLTHVLIAAIIGAVQIAIIVAIVMCITRKCPKNNRGRRQKQNLGHFTSDTSSRMV

SEQ ID NO: 9542 - protein, 272 aa, Homo sapiens
MLIGTPTPRDTTPSSWLTSSLLVEAAPLDDTTLPTPVSSGCPGLEPTEFFQSLGGDGERNVQIEMAHGTTTLAFKFQHGVIAAVDSRASAGSYISALRVNKVIEINPYLLGTMSGCAADCQYWERLLAKECRLYYLRNGERISVSAASKLLSNMMCQYRGMGLSMGSMICGWDKKGPGLYYVDEHGTRLSGNMFSTGSGNTYAYGVMDSGYRPNLSPEEAYDLGRRAIAYATHRDSYSGGVVNMYHMKEDGWVKVESTDVSDLLHQYREANQ

SEQ ID NO: 9543 - protein, 276 aa, Homo sapiens
MALLDVCGAPRGQRPESALPVAGSGRRSDPGHYSFSMRSPELALPRGMQPTEFFQSLGGDGERNVQIEMAHGTTTLAFKFQHGVIAAVDSRASAGSYISALRVNKVIEINPYLLGTMSGCAADCQYWERLLAKECRLYYLRNGERISVSAASKLLSNMMCQYRGMGLSMGSMICGWDKKGPGLYYVDEHGTRLSGNMFSTGSGNTYAYGVMDSGYRPNLSPEEAYDLGRRAIAYATHRDSYSGGVVNMYHMKEDGWVKVESTDVSDLLHQYREANQ

SEQ ID NO: 9544 - protein, 249 aa, Homo sapiens
MSPPTVPPMGVDGVSAYLMKKRHTHRKQRRKPTFLTRRNIVGCRIQHGWKEGNEPVEQWKGTVLEQVSVKPTLYIIKYDGKDSVYGLELHRDKRVLALEILPERVPTPRIDSRLADSLIGKAVEHVFEGEHGTKDEWKGMVLARAPVMDTWFYITYEKDPVLYMYTLLDDYKDGDLRIIPDSNYYFPTAEQEPGEVVDSLVGKQVEHAKDDGSKRTGIFIHQVVAKPSVYFIKFDDDIHIYVYGLVKTP

SEQ ID NO: 9545 - protein, 803 aa, Homo sapiens
MEIPKLLPARGTLQGGGGGGIPAGGGRVHRGPDSPAGQVPTRRLLLLRGPQDGGPGRRREEASTASRGPGPSLLAPRTDQPSGGGGGGGDDFFLVLLDPVGGDVETAGSGQAAGPVLREEAEEGPGLQGGESGANPAGPTALGPRCLSAVPTPAPISAPGPAAAFAGTVTIHNQDLLLRFENGVLTLATPPPHAWEPGAAPAQQPGCLIAPQAGFPHAAHPGDCPELPPDLLLAEPAEPAPAPAPEEEAEGPAAALGPRGPLGSGPGVVLYLCPEAQCGQTFAKKHQLKVHLLTHSSSQGQRPFKCPLGGCGWTFTTSYKLKRHLQSHDKLRPFGCPAEGCGKSFTTVYNLKAHMKGHEQENSFKCEVCEESFPTQAKLSAHQRSHFEPERPYQCAFSGCKKTFITVSALFSHNRAHFREQELFSCSFPGCSKQYDKACRLKIHLRSHTGERPFLCDFDGCGWNFTSMSKLLRHKRKHDDDRRFMCPVEGCGKSFTRAEHLKGHSITHLGTKPFVCPVAGCCARFSARSSLYIHSKKHLQDVDTWKSRCPISSCNKLFTSKHSMKTHMVKRHKVGQDLLAQLEAANSLTPSSELTSQRQNDLSDAEIVSLFSDVPDSTSAALLDTALVNSGILTIDVASVSSTLAGHLPANNNNSVGQAVDPPSLMATSDPPQSLDTSLFFGTAATGFQQSSLNMDEVSSVSVGPLGSLDSLAMKNSSPEPQALTPSSKLTVDTDALTPSSTLCENSVSELLTPTKAEWNVHPDSDFFGQEGETQFGFPNAAGNHGSQKETDLITVTGSSFLV

SEQ ID NO: 9546 - protein, 770 aa, Homo sapiens
MRGVWPPPVSALLSALGMSTYKRATLDEEDLVDSLSEGDAYPNGLQVNFHSPRSGQRCWAARTQVEKRLVVLVVLLAAGLVACLAALGIQYQTRSPSVCLSEACVSVTSSILSSMDPTVDPCHDFFSYACGGWIKANPVPDGHSRWGTFSNLWEHNQAIIKHLLENSTASVSEAERKAQVYYRACMNETRIEELRAKPLMELIERLGGWNITGPWAKDNFQDTLQVVTAHYRTSPFFSVYVSADSKNSNSNVIQVDQSGLGLPSRDYYLNKTENEKVLTGYLNYMVQLGKLLGGGDEEAIRPQMQQILDFETALANITIPQEKRRDEELIYHKVTAAELQTLAPAINWLPFLNTIFYPVEINESEPIVVYDKEYLEQISTLINTTDRCLLNNYMIWNLVRKTSSFLDQRFQDADEKFMEVMYGTKKTCLPRWKFCVSDTENNLGFALGPMFVKATFAEDSKSIATEIILEIKKAFEESLSTLKWMDEETRKSAKEKADAIYNMIGYPNFIMDPKELDKVFNDYTAVPDLYFENAMRFFNFSWRVTADQLRKAPNRDQWSMTPPMVNAYYSPTKNEIVFPAGILQAPFYTRSSPKALNFGGIGVVVGHELTHAFDDQGREYDKDGNLRPWWKNSSVEAFKRQTECMVEQYSNYSVNGEPVNGRHTLGENIADNGGLKAAYRAYQNWVKKNGAEHSLPTLGLTNNQLFFLGFAQVWCSVRTPESSHEGLITDPHSPSRFRVIGSLSNSKEFSEHFRCPPGSPMNPPHKCEVW

SEQ ID NO: 9547 - protein, 929 aa, Homo sapiens
MTKKRKRQHDFQKVKLKVGKKKPKLQNATPTNFKTKTIHLPEQLKEDGTLPTNNRKLNIKDLLSQMHHYNAGVKQSALLGLKDLLSQYPFIIDAHLSNILSEVTAVFTDKDANVRLAAVQLLQFLAPKIRAEQISPFFPLVSAHLSSAMTHITEGIQEDSLKVLDILLEQYPALITGRSSILLKNFVELISHQQLSKGLINRDRSQSWILSVNPNRRLTSQQWRLKVLVRLSKFLQALADGSSRLRESEGLQEQKENPHATSNSIFINWKEHANDQQHIQVYENGGSQPNVSSQFRLRYLVGGLSGVDEGLSSTENLKGFIEIIIPLLIECWVEAVPPQLATPVGNGIEREPLQVMQQVLNIISLLWKLSKQQDETHKLESWLRKNYLIDFKHHFMSRFPYVLKEITKHKRKEPNKSIKHCTVLSNNIDHLLLNLTLSDIMVSLANASTLQKDCSWIEMIRKFVTETLEDGSRLNSKQLNRLLGVSWRLMQIQPNREDTETLIKAVYTLYQQRGLILPVRTLLLKFFSKIYQTEELRSCRFRYRSKVLSRWLAGLPLQLAHLGSRNPELSTQLIDIIHTAAARANKELLKSLQATALRIYDPQEGAVVVLPADSQQRLVQLVYFLPSLPADLLSRLSRCCIMGRLSSSLAAMLIGILHMRSSFSGWKYSAKDWLMSDVDYFSFLFSTLTGFSKEELTWLQSLRGVPHVIQTQLSPVLLYLTDLDQFLHHWDVTEAVFHSLLVIPARSQNFDILQSAISKHLVGLTVIPDSTAGCVFGVICKLLDHTCVVSETLLPFLASCCYSLLYFLLTIEKGEAEHLRKRDKLWGVCVSILALLPRVLRLMLQSLRVNRVGPEELPVVGQLLRLLLQHAPLRTHMLTNAILVQQIIKNITTLKSGSVQEQWLTDLHYCFNVYITGHPQGPSALATVY

SEQ ID NO: 9548 - protein, 1012 aa, Homo sapiens
MAFPPRRRLRLGPRGLPLLLSGLLLPLCRAFNLDVDSPAEYSGPEGSYFGFAVDFFVPSASSRMFLLVGAPKANTTQPGIVEGGQVLKCDWSSTRRCQPIEFDATGNRDYAKDDPLEFKSHQWFGASVRSKQDKILACAPLYHWRTEMKQEREPVGTCFLQDGTKTVEYAPCRSRQLISDQVAEIVSKYDPNVYSIKYNNQLATRTAQAIFDDSYLGYSVAVGDFNGDGIDDFVSGVPRAARTLGMVYIYDGKNMSSLYNFTGEQMAAYFGFSVAATDINGDDYADVFIGAPLFMDRGSDGKLQEVGQVSVSLQRASGDFQTTKLNGFEVFARFGSAIAPLGDLDQDGFNDIAIAAPYGGEDKKGIVYIFNGRSTGLNAVPSQILEGQWAARSMPPSFGYSMKGATDIDKNGYPDLIVGAFGVDRAILYRARPVITVNAGLEVYPSILNQDNKTCSLPGTALKVSCFNVRFCLKADGKGVLPRKLNFQVELLLDKLKQKGAIRRALFLYSRSPSHSKNMTISRGGLMQCEELIAYLRDESEFRDKLTPITIFMEYRLDYRTAADTTGLQPILNQFTPANISRQAHILLDCGEDNVCKPKLEVSVDSDQKKIYIGDDNPLTLIVKAQNQGEGAYEAELIVSIPLQADFIGVVRNNEALARLSCAFKTENQTRQVVCDLGNPMKAGTQLLAGLRFSVHQQSEMDTSVKFDLQIQSSNLFDKVSPVVSHKVDLAVLAAVEIRGVSSPDHVFLPIPNWEHKENPETEEDVGPVVQHIYELRNNGPSSFSKAMLHLQWPYKYNNNTLLYILHYDIDGPMNCTSDMEINPLRIKISSLQTTEKNDTVAGQGERDHLITKRDLALSEGDIHTLGCGVAQCLKIVCQVGRLDRGKSAILYVKSLLWTETFMNKENQNHSYSLKSSASFNVIEFPYKNLPIEDITNSTLVTTNVTWGIQPAPMPVPVWVIILAVLAGLLLLAVLVFVMYRMGFFKRVRPPQEEQEREQLQPHENGEGNSET

SEQ ID NO: 9549 - protein, 255 aa, Homo sapiens
MILNKALLLGALALTAVMSPCGGEDIVADHVASYGVNFYQSHGPSGQYTHEFDGDEEFYVDLETKETVWQLPMFSKFISFDPQSALRNMAVGKHTLEFMMRQSNSTAATNEVPEVTVFSKFPVTLGQPNTLICLVDNIFPPVVNITWLSNGHSVTEGVSETSFLSKSDHSFFKISYLTFLPSADEIYDCKVEHWGLDEPLLKHWEPEIPAPMSELTETLVCALGLSVGLMGIVVGTVFIIQGLRSVGASRHQGLL

SEQ ID NO: 9550 - protein, 346 aa, Homo sapiens
MEESDSEKTTEKENLGPRMDPPLGEPEGSLGWVLPNTAMKKKVLLMGKSGSGKTSMRSIIFANYIARDTRRLGATIDVEHSHVRFLGNLVLNLWDCGGQDTFMENYFTSQRDNIFRNVEVLIYVFDVESRELEKDMHYYQSCLEAILQNSPDAKIFCLVHKMDLVQEDQRDLIFKEREEDLRRLSRPLECSCFRTSIWDETLYKAWSSIVYQLIPNVQQLEMNLRNFAEIIEADEVLLFERATFLVISHYQCKEQRDAHRFEKISNIIKQFKLSCSKLAASFQSMEVRNSNFAAFIDIFTSNTYVMVVMSDPSIPSAATLINIRNARKHFEKLERVDGPKQCLLMR

SEQ ID NO: 9551 - protein, 269 aa, Homo sapiens
MSWKKALRIPGDLRVATVTLMLAMLSSLLAEGRDSPEDFVFQFKGMCYFTNGTERVRLVTRYIYNREEYARFDSDVGVYRAVTPQGRPDAEYWNSQKEVLEGTRAELDTVCRHNYEVAFRGILQRRVEPTVTISPSRTEALNHHNLLVCSVTDFYPGQIKVRWFRNDQEETAGVVSTPLIRNGDWTFQILVMLEMTPQRGDVYTCHVEHPSLQSPITVEWRAQSESAQSKMLSGVGGFVLGLIFLGLGLIIRQRSQKGPQGPPPAGLLH

SEQ ID NO: 9552 - protein, 132 aa, Homo sapiens
MDVTRLLLATLLVFLCFFTANSHLPPEEKLRDDRSLRSNSSVNLLDVPSVSIVALNKKSKQIGRKAAEKKRSSKKEASMKKVVRPRTPLSAPCVATRNSCKPPAPACCDPCASCQCRFFRSACSCRVLSLNC

SEQ ID NO: 9553 - protein, 333 aa, Homo sapiens
MSGDEMIFDPTMSKKKKKKKKPFMLDEEGDTQTEETQPSETKEVEPEPTEDKDLEADEEDTRKKDASDDLDDLNFFNQKKKKKKTKKIFDIDEAEEGVKDLKIESDVQEPTEPEDDLDIMLGNKKKKKKNVKFPDEDEILEKDEALEDEDNKKDDGISFSNQTGPAWAGSERDYTYEELLNRVFNIMREKNPDMVAGEKRKFVMKPPQVVRVGTKKTSFVNFTDICKLLHRQPKHLLAFLLAELGTSGSIDGNNQLVIKGRFQQKQIENVLRRYIKEYVTCHTCRSPDTILQKDTRLYFLQCETCHSRCSVASIKTGFQAVTGKRAQLRAKAN

SEQ ID NO: 9554 - protein, 229 aa, Homo sapiens
MAISGVPVLGFFIIAVLMSAQESWAIKEEHVIIQAEFYLNPDQSGEFMFDFDGDEIFHVDMAKKETVWRLEEFGRFASFEAQGALANIAVDKANLEIMTKRSNYTPITNDKFTPPVVNVTWLRNGKPVTTGVSETVFLPREDHLFRKFHYLPFLPSTEDVYDCRVEHWGLDEPLLKHWEFDAPSPLPETTENVVCALGLTVGLVGIIIGTIFIIKGLRKSNAAERRGPL

SEQ ID NO: 9555 - protein, 426 aa, Homo sapiens
MEAAVAAPRPRLLLLVLAAAAAAAAALLPGATALQCFCHLCTKDNFTCVTDGLCFVSVTETTDKVIHNSMCIAEIDLIPRDRPFVCAPSSKTGSVTTTYCCNQDHCNKIELPTTGLPLLVQRTIARTIVLQESIGKGRFGEVWRGKWRGEEVAVKIFSSREERSWFREAEIYQTVMLRHENILGFIAADNKDNGTWTQLWLVSDYHEHGSLFDYLNRYTVTVEGMIKLALSTASGLAHLHMEIVGTQGKPAIAHRDLKSKNILVKKNGTCCIADLGLAVRHDSATDTIDIAPNHRVGTKRYMAPEVLDDSINMKHFESFKRADIYAMGLVFWEIARRCSIGGIHEDYQLPYYDLVPSDPSVEEMRKVVCEQKLRPNIPNRWQSCEALRVMAKIMRECWYANGAARLTALRIKKTLSQLSQQEGIKM

SEQ ID NO: 9556 - protein, 455 aa, Homo sapiens
MVDFPGYNLSGAVASFLFILLTMKQSEDFRVIGPAHPILAGVGEDALLTCQLLPKRTTMHVEVRWYRSEPSTPVFVHRDGVEVTEMQMEEYRGWVEWIENGIAKGNVALKIHNIQPSDNGQYWCHFQDGNYCGETSLLLKVAGLGSAPSIHMEGPGESGVQLVCTARGWFPEPQVYWEDIRGEKLLAVSEHRIQDKDGLFYAEATLVVRNASAESVSCLVHNPVLTEEKGSVISLPEKLQTELASLKVNGPSQPILVRVGEDIQLTCYLSPKANAQSMEVRWDRSHRYPAVHVYMDGDHVAGEQMAEYRGRTVLVSDAIDEGRLTLQILSARPSDDGQYRCLFEKDDVYQEASLDLKVVSLGSSPLITVEGQEDGEMQPMCSSDGWFPQPHVPWRDMEGKTIPSSSQALTQGSHGLFHVQTLLRVTNISAVDVTCSISIPFLGEEKIATFSLSGW

SEQ ID NO: 9557 - protein, 503 aa, Homo sapiens
MEAAVAAPRPRLLLLVLAAAAAAAAALLPGATALQCFCHLCTKDNFTCVTDGLCFVSVTETTDKVIHNSMCIAEIDLIPRDRPFVCAPSSKTGSVTTTYCCNQDHCNKIELPTTVKSSPGLGPVELAAVIAGPVCFVCISLMLMVYICHNRTVIHHRVPNEEDPSLDRPFISEGTTLKDLIYDMTTSGSGSGLPLLVQRTIARTIVLQESIGKGRFGEVWRGKWRGEEVAVKIFSSREERSWFREAEIYQTVMLRHENILGFIAADNKDNGTWTQLWLVSDYHEHGSLFDYLNRYTVTVEGMIKLALSTASGLAHLHMEIVGTQGKPAIAHRDLKSKNILVKKNGTCCIADLGLAVRHDSATDTIDIAPNHRVGTKRYMAPEVLDDSINMKHFESFKRADIYAMGLVFWEIARRCSIGGIHEDYQLPYYDLVPSDPSVEEMRKVVCEQKLRPNIPNRWQSCEALRVMAKIMRECWYANGAARLTALRIKKTLSQLSQQEGIKM

SEQ ID NO: 9558 - protein, 133 aa, Homo sapiens
MATDTSQGELVHPKALPLIVGAQLIHADKLGEKVEDSTMPIRRTVNSTRETPPKSKLAEGEEEKPEPDISSEESVSTVEEQENETPPATSSEAEQPKGEPENEEKEENKSSEETKKERADSIHSTLFIIGQNS

SEQ ID NO: 9559 - protein, 1388 aa, Homo sapiens
MAPRRNNGQCWCLLMLLSVSTPLPAVTQTRGATETASQGHLDLTQLIGVPLPSSVSFVTGYGGFPAYSFGPGANVGRPARTLIPSTFFRDFAISVVVKPSSTRGGVLFAITDAFQKVIYLGLRLSGVEDGHQRIILYYTEPGSHVSQEAAAFSVPVMTHRWNRFAMIVQGEEVTLLVNCEEHSRIPFQRSSQALAFESSAGIFMGNAGATGLERFTGSLQQLTVHPDPRTPEELCDPEESSASGETSGLQEADGVAEILEAVTYTQASPKEAKVEPINTPPTPSSPFEDMELSGEPVPEGTLETTNMSIIQHSSPKQGSGEILNDTLEGVHSVDGDPITDSGSGAGAFLDIAEEKNLAATAAGLAEVPISTAGEAEASSVPTGGPTLSMSTENPEEGVTPGPDNEERLAATAAGEAEALASMPGEVEASGVAPGELDLSMSAQSLGEEATVGPSSEDSLTTAAAATEVSLSTFEDEEASGVPTDGLAPLTATMAPERAVTSGPGDEEDLAAATTEEPLITAGGEESGSPPPDGPPLPLPTVAPERWITPAQREHVGMKGQAGPKGEKGDAGEELPGPPEPSGPVGPTAGAEAEGSGLGWGSDVGSGSGDLVGSEQLLRGPPGPPGPPGLPGIPGKPGTDVFMGPPGSPGEDGPAGEPGPPGPEGQPGVDGATGLPGMKGEKGARGPNGSVGEKGDPGNRGLPGPPGKKGQAGPPGVMGPPGPPGPPGPPGPGCTMGLGFEDTEGSGSTQLLNEPKLSRPTAAIGLKGEKGDRGPKGERGMDGASIVGPPGPRGPPGHIKVLSNSLINITHGFMNFSDIPELVGPPGPDGLPGLPGFPGPRGPKGDTGLPGFPGLKGEQGEKGEPGAILTEDIPLERLMGKKGEPGMHGAPGPMGPKGPPGHKGEFGLPGRPGRPGLNGLKGTKGDPGVIMQGPPGLPGPPGPPGPPGAVINIKGAIFPIPVRPHCKMPVDTAHPGSPELITFHGVKGEKGSWGLPGSKGEKGDQGAQGPPGPPLDLAYLRHFLNNLKGENGDKGFKGEKGEKGDINGSFLMSGPPGLPGNPGPAGQKGETVVGPQGPPGAPGLPGPPGFGRPGDPGPPGPPGPPGPPAILGAAVALPGPPGPPGQPGLPGSRNLVTAFSNMDDMLQKAHLVIEGTFIYLRDSTEFFIRVRDGWKKLQLGELIPIPADSPPPPALSSNPHQLLPPPNPISSANYEKPALHLAALNMPFSGDIRADFQCFKQARAAGLLSTYRAFLSSHLQDLSTIVRKAERYSLPIVNLKGQVLFNNWDSIFSGHGGQFNMHIPIYSFDGRDIMTDPSWPQKVIWHGSSPHGVRLVDNYCEAWRTADTAVTGLASPLSTGKILDQKAYSCANRLIVLCIENSFMTDARK

SEQ ID NO: 9560 - protein, 581 aa, Homo sapiens [sequence omitted]

SEQ ID NO: 9561 - protein, 584 aa, Homo sapiens
MGNFQLVKEIADEDPSHVNLVNGDGATPLMLAAVTGQLALVQLLVERHADVDKQDSVHGWTALMQATYHGNKEIVKYLLNQGADVTLRAKNGYTAFDLVMLLNDPDTELVRLLASVCMQVNKDKGRPSHQPPLPHSKVRQPWSIPVLPDDKGGLKSWWNRMSNRFRKLKLMQTLPRGLSSNQPLPFSDEPEPALDSTMRAAPQDKTSRSALPDAAPVTKDNGPGSTRGEKEDTLLTTMLRNGAPLTRLPSDKLKAVIPPFLPPSSFELWSSDRSRTRHNGKADPMKTALPQRASRGHPVGGGGTDTTPVRPVKFPSLPRSPASSANSGNFNHSPHSSGGSSGVGVSRHGGELLNRSGGSIDNVLSQIAAQRKKAAGLLEQKPSHRSSPVGPAPGSSPSELPASPAGGSAPVGKKLETSKRPPSGTSTTSKSTSPTLTPSPSPKGHTAESSVSSSSSHRQSKSSGGSSSGTITDEDELTGILKKLSLEKYQPIFEEQEVDMEAFLTLTDGDLKELGIKTDGSRQQILAAISELNAGKGRERQILQETIHNFHSSFESSASNTRAPGNSPSMVGWVRPEETASGKR

SEQ ID NO: 9562 - protein, 2003 aa, Homo sapiens
MQPPSLLLLLLLLLLLCVSVVRPRGLLCGSFPEPCANGGTCLSLSLGQGTCQCAPGFLGETCQFPDPCQNAQLCQNGGSCQALLPAPLGLPSSPSPLTPSFLCTCLPGFTGERCQAKLEDPCPPSFCSKRGRCHIQASGRPQCSCMPGWTGEQCQLRDFCSANPCVNGGVCLATYPQIQCHCPPGFEGHACERDVNECFQDPGPCPKGTSCHNTLGSFQCLCPVGQEGPRCELRAGPCPPRGCSNGGTCQLMPEKDSTFHLCLCPPGFIGPDCEVNPDNCVSHQCQNGGTCQDGLDTYTCLCPETWTGWDCSEDVDECETQGPPHCRNGGTCQNSAGSFHCVCVSGWGGTSCEENLDDCIAATCAPGSTCIDRVGSFSCLCPPGRTGLLCHLEDMCLSQPCHGDAQCSTNPLTGSTLCLCQPGYSGPTCHQDLDECLMAQQGPSPCEHGGSCLNTPGSFNCLCPPGYTGSRCEADHNECLSQPCHPGSTCLDLLATFHCLCPPGLEGQLCEVETNECASAPCLNHADCHDLLNGFQCICLPGFSGTRCEEDIDECRSSPCANGGQCQDQPGAFHCKCLPGFEGPRCQTEVDECLSDPCPVGASCLDLPGAFFCLCPSGFTGQLCEVPLCAPNLCQPKQICKDQKDKANCLCPDGSPGCAPPEDNCTCHHGHCQRSSCVCDVGWTGPECEAELGGCISAPCAHGGTCYPQPSGYNCTCPTGYTGPTCSEEMTACHSGPCLNGGSCNPSPGGYYCTCPPSHTGPQCQTSTDYCVSAPCFNGGTCVNRPGTFSCLCAMGFQGPRCEGKLRPSCADSPCRNRATCQDSPQGPRCLCPTGYTGGSCQTLMDLCAQKPCPRNSHCLQTGPSFHCLCLQGWTGPLCNLPLSSCQKAALSQGIDVSSLCHNGGLCVDSGPSYFCHCPPGFQGSLCQDHVNPCESRPCQNGATCMAQPSGYLCQCAPGYDGQNCSKELDACQSQPCHNHGTCTPKPGGFHCACPPGFVGLRCEGDVDECLDQPCHPTGTAACHSLANAFYCQCLPGHTGQWCEVEIDPCHSQPCFHGGTCEATAGSPLGFICHCPKGFEGPTCSHRAPSCGFHHCHHGGLCLPSPKPGFPPRCACLSGYGGPDCLTPPAPKGCGPPSPCLYNGSCSETTGLGGPGFRCSCPHSSPGPRCQKPGAKGCEGRSGDGACDAGCSGPGGNWDGGDCSLGVPDPWKGCPSHSRCWLLFRDGQCHPQCDSEECLFDGYDCETPPACTPAYDQYCHDHFHNGHCEKGCNTAECGWDGGDCRPEDGDPEWGPSLALLVVLSPPALDQQLFALARVLSLTLRVGLWVRKDRDGRDMVYPYPGARAEEKLGGTRDPTYQERAAPQTQPLGKETDSLSAGFVVVMGVDLSRCGPDHPASRCPWDPGLLLRFLAAMAAVGALEPLLPGPLLAVHPHAGTAPPANQLPWPVLCSPVAGVILLALGALLVLQLIRRRRREHGALWLPPGFTRRPRTQSAPHRRRPPLGEDSIGLKALKPKAEVDEDGVVMCSGPEEGEEVGQAEETGPPSTCQLWSLSGGCGALPQAAMLTPPQESEMEAPDLDTRGPDGVTPLMSAVCCGEVQSGTFQGAWLGCPEPWEPLLDGGACPQAHTVGTGETPLHLAARFSRPTAARRLLEAGANPNQPDRAGRTPLHAAVAADAREVCQLLLRSRQTAVDARTEDGTTPLMLAARLAVEDLVEELIAAQADVGARDKWGKTALHWAAAVNNARAARSLLQAGADKDAQDNREQTPLFLAAREGAVEVAQLLLGLGAARELRDQAGLAPADVAHQRNHWDLLTLLEGAGPPEARHKATPGREAGPFPRARTVSVSVPPHGGGALPRCRTLSAGAGPRGGGACLQARTWSVDLAARGGGAYSHCRSLSGVGAGGGPTPRGRRFSAGMRGPRPNPAIMRGRYGVAAGRGGRVSTDDWPCDWVALGACGSASNIPIPPPCLTPSPERGSPQLDCGPPALQEMPINQGGEGKK

SEQ ID NO: 9563 - protein, 177 aa, Homo sapiens
MEAPAELLAALPALATALALLLAWLLVRRGAAASPEPARAPPEPAPPAEATGAPAPSRPCAPEPAASPAGPEEPGEPAGLGELGEPAGPGEPEGPGDPAAAPAEAEEQAVEARQEEEQDLDGEKGPSSEGPEEEDGEGFSFKYSPGKLRGNQYKKMMTKEELEEEQRIELTSDLTSL

SEQ ID NO: 9564 - protein, 456 aa, Homo sapiens
MGYFRCARAGSFGRRRKMEPSTAARAWALFWLLLPLLGAVCASGPRTLVLLDNLNVRETHSLFFRSLKDRGFELTFKTADDPSLSLIKYGEFLYDNLIIFSPSVEDFGGNINVETISAFIDGGGSVLVAASSDIGDPLRELGSECGIEFDEEKTAVIDHHNYDISDLGQHTLIVADTENLLKAPTIVGKSSLNPILFRGVGMVADPDNPLVLDILTGSSTSYSFFPDKPITQYPHAVGKNTLLIAGLQARNNARVIFSGSLDFFSDSFFNSAVQKAAPGSQRYSQTGNYELAVALSRWVFKEEGVLRVGPVSHHRVGETAPPNAYTVTDLVEYSIVIQQLSNGKWVPFDGDDIQLEFVRIDPFVRTFLKKKGGKYSVQFKLPDVYGVFQFKVDYNRLGYTHLYSSTQVSVRPLQHTQYERFIPSAYPYYASAFSMMLGLFIFSIVFLHMKEKEKSD

SEQ ID NO: 9565 - protein, 347 aa, Homo sapiens
MAAGTAVGAWVLVLSLWGAVVGAQNITARIGEPLVLKCKGAPKKPPQRLEWKLNTGRTEAWKVLSPQGGGPWDSVARVLPNGSLFLPAVGIQDEGIFRCQAMNRNGKETKSNYRVRVYQIPGKPEIVDSASELTAGVPNKVGTCVSEGSYPAGTLSWHLDGKPLVPNEKGVSVKEQTRRHPETGLFTLQSELMVTPARGGDPRPTFSCSFSPGLPRHRALRTAPIQPRVWEPVPLEEVQLVVEPEGGAVAPGGTVTLTCEVPAQPSPQIHWMKDGVPLPLPPSPVLILPEIGPQDQGTYSCVATHSSHGPQESRAVSISIIEPGEEGPTAGEGFDKVREAEDSPQHM

SEQ ID NO: 9566 - protein, 233 aa, Homo sapiens
MAAGTAVGAWVLVLSLWGAVVGAQNITARIGEPLVLKCKGAPKKPPQRLEWKLNTGRTEAWKVLSPQGGGPWDSVARVLPNGSLFLPAVGIQDEGIFRCQAMNRNGKETKSNYRVRVYQIPGKPEIVDSASELTAGVPNKVVEESRRSRKRPCEQEVGTCVSEGSYPAGTLSWHLDGKPLVPNEKGVSVKEQTRRHPETGLFTLQSELMVTPARGGDPRPTFSCSFSPGLPRH

SEQ ID NO: 9567 - protein, 521 aa, Homo sapiens
MSDTSESGAGLTRFQAEASEKDSSSMMQTLLTVTQNVEVPETPKASSTTQLTDTQVLAAENKSLAADTKKQNADPQAVTMPATETKKVSHVADTKVNTKAQETEAAPSQAPADEPEPESAAAQSQENQDTRPKVKAKKARKVKHLDGEEDGSSDQSQASGTTGGRRVSKARRRAAKLQSSQEPEAPPPRDVALLQGRANDLVKYLLAKDQTKIPIKRSDMLKDIIKEYTDVYPEIIERAGYSLEKVFGIQLKEIDKNDHLYILLSTLEPTDAGILGTTKDSPKLGLLMVLLSIIFMNGNRSSEAVIWEVLRKLGLRPGIHHSLFGDVKKLITDEFVKQKYLDYARVPNSNPPEYEFFWGLRSYYETSKMKVLKFACKVQKKDPKEWAAQYREAMEADLKAAAEAAAEAKARAEIRARMGIGLGSENAAGPCNWDEADIGPWAKARIQAGAEAKAKAQESGSASTGASTSTNNSASASASTSGGFSAGASLTATLTFGLFAGLGGAGASTSGSSGACGFSYK

SEQ ID NO: 9568 - protein, 581 aa, Homo sapiens
MAVRQALGRGLQLGRALLLRFTGKPGRAYGLGRPGPAAGCVRGERPGWAAGPGAEPRRVGLGLPNRLRFFRQSVAGLAARLQRQFVVRAWGCAGPCGRAVFLAFGLGLGLIEEKQAESRRAVSACQEIQAIFTQKSKPGPDPLDTRRLQGFRLEEYLIGQSIGKGCSAAVYEATMPTLPQNLEVTKSTGLLPGRGPGTSAPGEGQERAPGAPAFPLAIKMMWNISAGSSSEAILNTMSQELVPASRVALAGEYGAVTYRKSKRGPKQLAPHPNIIRVLRAFTSSVPLLPGALVDYPDVLPSRLHPEGLGHGRTLFLVMKNYPCTLRQYLCVNTPSPRLAAMMLLQLLEGVDHLVQQGIAHRDLKSDNILVELDPDGCPWLVIADFGCCLADESIGLQLPFSSWYVDRGGNGCLMAPEVSTARPGPRAVIDYSKADAWAVGAIAYEIFGLVNPFYGQGKAHLESRSYQEAQLPALPESVPPDVRQLVRALLQREASKRPSARVAANVLHLSLWGEHILALKNLKLDKMVGWLLQQSAATLLANRLTEKCCVETKMKMLFLANLECETLCQAALLLCSWRAAL

SEQ ID NO: 9569 - protein, 420 aa, Homo sapiens
MAAGTAVGAWVLVLSLWGAVVGAQNITARIGEPLVLKCKGAPKKPPQRLEWKLNTGRTEAWKVLSPQGGGPWDSVARVLPNGSLFLPAVGIQDEGIFRCQAMNRNGKETKSNYRVRVYQIPGKPEIVDSASELTAGVPNKVVEESRRSRKRPCEQEVGTCVSEGSYPAGTLSWHLDGKPLVPNEKGVSVKEQTRRHPETGLFTLQSELMVTPARGGDPRPTFSCSFSPGLPRHRALRTAPIQPRVWEPVPLEEVQLVVEPEGGAVAPGGTVTLTCEVPAQPSPQIHWMKDGVPLPLPPSPVLILPEIGPQDQGTYSCVATHSSHGPQESRAVSISIIEPGEEGPTAGSVGGSGLGTLALALGILGGLGTAALLIGVILWQRRQRRGEERKAPENQEEEEERAELNQSEEPEAGESSTGGP

SEQ ID NO: 9570 - protein, 146 aa, Homo sapiens [sequence omitted]

SEQ ID NO: 9571 - protein, 404 aa, Homo sapiens
MAAGTAVGAWVLVLSLWGAVVGAQNITARIGEPLVLKCKGAPKKPPQRLEWKLNTGRTEAWKVLSPQGGGPWDSVARVLPNGSLFLPAVGIQDEGIFRCQAMNRNGKETKSNYRVRVYQIPGKPEIVDSASELTAGVPNKVGTCVSEGSYPAGTLSWHLDGKPLVPNEKGVSVKEQTRRHPETGLFTLQSELMVTPARGGDPRPTFSCSFSPGLPRHRALRTAPIQPRVWEPVPLEEVQLVVEPEGGAVAPGGTVTLTCEVPAQPSPQIHWMKDGVPLPLPPSPVLILPEIGPQDQGTYSCVATHSSHGPQESRAVSISIIEPGEEGPTAGSVGGSGLGTLALALGILGGLGTAALLIGVILWQRRQRRGEERKAPENQEEEEERAELNQSEEPEAGESSTGGP

SEQ ID NO: 9572 - protein, 78 aa, Homo sapiens
MSEVLPYGDEKLSPYGDGGDVGQIFSCRLQDTNNFFGAGQNKRPPKLGQIGRSKRVVIEDDRIDDVLKNMTDKAPPGV

SEQ ID NO: 9573 - protein, 1220 aa, Homo sapiens
MPGLLNWITGAALPLTASDVTSCVSGYALGLTASLTYGNLEAQPFQGLFVYPLDECTTVIGFEAVIADRVVTVQIKDKAKLESGHFDASHVRSPTVTGNILQDGVSIAPHSCTPGKVTLDEDLERILFVANLGTIAPMENVTIFISTSSELPTLPSGAVRVLLPAVCAPTVPQFCTKSTGTSNQQAQGKDRHCFGAWAPGSWNKLCLATLLNTEVSNPMEYEFNFQLEIRGPCLLAGVESPTHEIRADAAPSARSAKSIIITLANKHTFDRPVEILIHPSEPHMPHVLIEKGDMTLGEFDQHLKGRTDFIKGMKKKSRAERKTEIIRKRLHKDIPHHSVIMLNFCPDLQSVQPCLRKAHGEFIFLIDRSSSMSGISMHRVKDAMLVALKSLMPACLFNIIGFGSTFKSLFPSSQTYSEDSLAMACDDIQRMKADMGGTNILSPLKWVIRQPVHRGHPRLLFVITDGAVNNTGKVLELVRNHAFSTRCYSFGIGPNVCHRLVKGLASVSEGSAELLMEGERLQPKMVKSLKKAMAPVLSDVTVEWIFPETTEVLVSPVSASSLFPGERLVGYGIVCDASLHISNPRSDKRRRYSMLHSQESGSSVFYHSQDDGPGLEGGDCAKNSGAPFILGQAKNARLASGDSTTKHDLNLSQRRRAYSTNQITNHKPLPRATMASDPMPAAKRYPLRKARLQDLTNQTSLDVQRWQIDLQPLLNSGQDLNQGPKLRGPGARRPSLLPQGCQPFLPWGQETQAWSPVRERTSDSRSPGDLEPSHHPSAFETETSSDWDPPAESQERASPSRPATPAPVLGKALVKGLHDSQRLQWEVSFELGTPGPERGGAQDADLWSETFHHLAARAIIRDFEQLAEREGEIEQGSNRRYQVSALHTSKACNIISKYTAFVPVDVSKSRYLPTVVEYPNSAALRMLGSRALAQQWRGTSSGFGRPQTMLGEDSAPGNGKFQALNMEASPTALFSEARSPGREKHGASEGPQRSLATNTLSSMKASENLFGSWLNLNKSRLLTRAAKGFLSKPLIKAVESTSGNQSFDYIPLVSLQLASGAFLLNEAFCEATHIPMEKLKWTSPFTCHRVSLTTRPSESKTPSPQLCTSSPPRHPSCDSFSLEPLAKGKLGLEPRAVVEHTGKLWATVVGLAWLEHSSASYFTEWELVAAKANSWLEQQEVPEGRTQGTLKAAARQLFVLLRHWDENLEFNMLCYNPNYV

SEQ ID NO: 9574 - protein, 180 aa, Homo sapiens
MAAAEEEDGGPEGPNRERGGAGATFECNICLETAREAVVSVCGHLYCWPCLHQWLETRPERQECPVCKAGISREKVVPLYGRGSQKPQDPRLKTPPRPQGQRPAPESRGGFQPFGDTGGFHFSFGVGAFPFGFFTTVFNAHEPFRRGTGVDLGQGHPASSWQDSLFLFLAIFFFFWLLSI

SEQ ID NO: 9575 - protein, 145 aa, Homo sapiens
MELALLCGLVVMAGVIPIQGGILNLNKMVKQVTGKMPILSYWPYGCHCGLGGRGQPKDATDWCCQTHDCCYDHLKTQGCSIYKDYYRYNFSQGNIHCSDKGSWCEQQLCACDKEVAFCLKRNLDTYQKRLRFYWRPHCRGQTPGC

SEQ ID NO: 9576 - protein, 138 aa, Homo sapiens
MKGLLPLAWFLACSVPAVQGGLLDLKSMIEKVTGKNALTNYGFYGCYCGWGGRGTPKDGTDWCCWAHDHCYGRLEEKGCNIRTQSYKYRFAWGVVTCEPGPFCHVNLCACDRKLVYCLKRNLRSYNPQYQYFPNILCS

SEQ ID NO: 9577 - protein, 144 aa, Homo sapiens
MKTLLLLAVIMIFGLLQAHGNLVNFHRMIKLTTGKEAALSYGFYGCHCGVGGRGSPKDATDRCCVTHDCCYKRLEKRGCGTKFLSYKFSNSGSRITCAKQDSCRSQLCECDKAAATCFARNKTTYNKKYQYYSNKHCRGSTPRC

SEQ ID NO: 9578 - protein, 290 aa, Homo sapiens
MSLKLQASNVTNKNDPKSINSRVFIGNLNTALVKKSDVETIFSKYGRVAGCSVHKGYAFVQYSNERHARAAVLGENGRVLAGQTLDINMAGEPKPDRPKGLKRAASAIYRLFDYRGRLSPVPVPRAVPVKRPRVTVPLVRRVKTNVPVKLFARSTAVTTSSAKIKLKSSELQAIKTELTQIKSNIDALLSRLEQIAAEQKANPDGKKKGDGGGAGGGGGGGGSGGGGSGGGGGGGSSRPPAPQENTTSEAGLPQGEARTRDDGDEEGLLTHSEEELEHSQDTDADDGALQ

SEQ ID NO: 9579 - protein, 142 aa, Homo sapiens
MKSPHVLVFLCLLVALVTGNLVQFGVMIEKMTGKSALQYNDYGCYCGIGGSHWPVDQTDWCCHAHDCCYGRLEKLGCEPKLEKYLFSVSERGIFCAGRTTCQRLTCECDKRAALCFRRNLGTYNRKYAHYPNKLCTGPTPPC

SEQ ID NO: 9580 - protein, 398 aa, Homo sapiens
MSRKQAAKSRPGSGSRKAEAERKRDERAARRALAKERRNRPESGGGGGCEEEFVSFANQLQALGLKLREVPGDGNCLFRALGDQLEGHSRNHLKHRQETVDYMIKQREDFEPFVEDDIPFEKHVASLAKPGTFAGNDAIVAFARNHQLNVVIHQLNAPLWQIRGTEKSSVRELHIAYRYGEHYDSVRRINDNSEAPAHLQTDFQMLHQDESNKREKIKTKGMDSEDDLRDEVEDAVQKVCNATGCSDFNLIVQNLEAENYNIESAIIAVLRMNQGKRNNAEENLEPSGRVLKQCGPLWEEGGSGARIFGNQGLNEGRTENNKAQASPSEENKANKNQLAKVTNKQRREQQWMEKKKRQEERHRHKALESRGSHRDNNRSEAEANTQVTLVKTFAALNI

SEQ ID NO: 9581 - protein, 273 aa, Homo sapiens
MAAADGALPEAAALEQPAELPASVRASIERKRQRALMLRQARLAARPYSATAAAATGGMANVKAAPKIIDTGGGFILEEEEEEEQKIGKVVHQPGPVMEFDYVICEECGKEFMDSYLMNHFDLPTCDNCRDADDKHKLITKTEAKQEYLLKDCDLEKREPPLKFIVKKNPHHSQWGDMKLYLKLQIVKRSLEVWGSQEALEEAKEVRQENREKMKQKKFDKKVKELRRAVRSSVWKRETIVHQHEYGPEENLEDDMYRKTCTMCGHELTYEKM

SEQ ID NO: 9582 - protein, 961 aa, Homo sapiens
MHGHRAPGGAGPSEPEHPATNPPGAAPPACADSDPGASEPGLLARRGSGSALGGPLDPQFVGPSDTSLGAAPGHRVLPCGPSPQHHRALRFSYHLEGSQPRPGLHQGNRILVKSLSLDPGQSLEPHPEGPQRLRSDPGPPTETPSQRPSPLKRAPGPKPQVPPKPSYLQMPRMPPPLEPIPPPPSRPLPADPRVAKGLAPRAEASPSSAAVSSLIEKFEREPVIVASDRPVPGPSPGPPEPVMLPQPTSQPPVPQLPEGEASRCLFLLAPGPRDGEKVPNRDSGIDSISSPSNSEETCFVSDDGPPSHSLCPGPPALASVPVALADPHRPGSQEVDSDLEEEDDEEEEEEKDREIPVPLMERQESVELTVQQKVFHIANELLQTEKAYVSRLHLLDQVFCARLLEEARNRSSFPADVVHGIFSNICSIYCFHQQFLLPELEKRMEEWDRYPRIGDILQKLAPFLKMYGEYVKNFDRAVELVNTWTERSTQFKVIIHEVQKEEACGNLTLQHHMLEPVQRIPRYELLLKDYLLKLPHGSPDSKDAQKSLELIATAAEHSNAAIRKMERMHKLLKVYELLGGEEDIVSPTKELIKEGHILKLSAKNGTTQDRYLILFNDRLLYCVPRLRLLGQKFSVRARIDVDGMELKESSNLNLPRTFLVSGKQRSLELQARTEEEKKDWVQAINSTLLKHEQTLETFKLLNSTNREDEDTPPNSPNVDLGKRAPTPIREKEVTMCMRCQEPFNSITKRRHHCKACGHVVCGKCSEFRARLVYDNNRSNRVCTDCYVALHGVPGSSPACSQHTPQRRRSILEKQASVAAENSVICSFLHYMEKGGKGWHKAWFVVPENEPLVLYIYGAPQDVKAQRSLPLIGFEVGPPEAGERPDRRHVFKITQSHLSWYFSPETEELQRRWMAVLGRAGRGDTFCPGPTLSEDREMEEAPVAALGATAEPPESPQTRDKT

SEQ ID NO: 9583 - protein, 181 aa, Homo sapiens
MMLRVLVGAVLPAMLLAAPPPINKLALFPDKSAWCEAKNITQIVGHSGCEAKSIQNRACLGQCFSYSVPNTFPQSTESLVHCDSCMPAQSMWEIVTLECPGHEEVPRVDKLVEKILHCSCQACGKEPSHEGLSVYVQGEDGPGSQPGTHPHPHPHPHPGGQTPEPEDPPGAPHTEEEGAED

SEQ ID NO: 9584 - protein, 277 aa, Homo sapiens
MSDQQLDCALDLMRRLPPQQIEKNLSDLIDLVPSLCEDLLSSVDQPLKIARDKVVGKDYLLCDYNRDGDSYRSPWSNKYDPPLEDGAMPSARLRKLEVEANNAFDQYRDLYFEGGVSSVYLWDLDHGFAGVILIKKAGDGSKKIKGCWDSIHVVEVQEKSSGRTAHYKLTSTVMLWLQTNKSGSGTMNLGGSLTRQMEKDETVSDCSPHIANIGRLVEDMENKIRSTLNEIYFGKTKDIVNGLRSIDAIPDNQKFKQLQRELSQVLTQRQIYIQPDN

SEQ ID NO: 9585 - protein, 244 aa, Homo sapiens
MSDQQLDCALDLMRRLPPQQIEKNLSDLIDLVPSLCEDLLSSVDQPLKIARDKVVGKDYLLCDYNRDGDSYRSPWSNKYDPPLEDGAMPSARLRKLEVEANNAFDQYRDLYFEGGVSSVYLWDLDHGFAGVILIKKAGDGSKKIKGCWDSIHVVEVQEKSSGRTAHYKLTSTVMLWLQTNKSGSGTMNLGGSLTRQMEKDETVSDCSPHIANIGRLVEDMENKIRSTLNEIYFGKTKDIVNGLR

SEQ ID NO: 9586 - protein, 790 aa, Homo sapiens
MSRRRHSDENDGGQPHKRRKTSDANETEDHLESLICKVGEKSACSLESNLEGLAGVLEADLPNYKSKILRLLCTVARLLPEKLTIYTTLVGLLNARNYNFGGEFVEAMIRQLKESLKANNYNEAVYLVRFLSDLVNCHVIAAPSMVAMFENFVSVTQEEDVPQVRRDWYVYAFLSSLPWVGKELYEKKDAEMDRIFANTESYLKRRQKTHVPMLQVWTADKPHPQEEYLDCLWAQIQKLKKDRWQERHILRPYLAFDSILCEALQHNLPPFTPPPHTEDSVYPMPRVIFRMFDYTDDPEGPVMPGSHSVERFVIEENLHCIIKSHWKERKTCAAQLVSYPGKNKIPLNYHIVEVIFAELFQLPAPPHIDVMYTTLLIELCKLQPGSLPQVLAQATEMLYMRLDTMNTTCVDRFINWFSHHLSNFQFRWSWEDWSDCLSQDPESPKPKFVREVLEKCMRLSYHQRILDIVPPTFSALCPANPTCIYKYGDESSNSLPGHSVALCLAVAFKSKATNDEIFSILKDVPNPNQDDDDDEGFSFNPLKIEVFVQTLLHLAAKSFSHSFSALAKFHEVFKTLAESDEGKLHVLRVMFEVWRNHPQMIAVLVDKMIRTQIVDCAAVANWIFSSELSRDFTRLFVWEILHSTIRKMNKHVLKIQKELEEAKEKLARQHKRRSDDDDRSSDRKDGVLEEQIERLQEKVESAQSEQKNLFLVIFQRFIMILTEHLVRCETDGTSVLTPWYKNCIERLQQIFLQHHQIIQQYMVTLENLLFTAELDPHILAVFQQFCALQA

SEQ ID NO: 9587 - protein, 191 aa, Homo sapiens
MAGAAEDARALFRAGVCAALEAWPALQIAVENGFGGVHSQEKAKWLGGAVEDYFMRNADLELDEVEDFLGELLTNEFDTVVEDGSLPQVSQQLQTMFHHFQRGDGAALREMASCITQRKCKVTATALKTARETDEDEDDVDSVEEMEVTATNDGAATDGVCPQPEPSDPDAQTIKEEDIVEDGWTIVRRKK

SEQ ID NO: 9588 - protein, 291 aa, Homo sapiens
MVWKKLGSRNFSSCPSGSIQWIWDVLGECAQDGWDEASVGLGLISILCFAASTFPQFIKAYKTGNMDQALSLWFLLGWIGGDSCNLIGSFLADQLPLQTYTAVYYVLADLVMLTLYFYYKFRTRPSLLSAPINSVLLFLMGMACATPLLSAAGPVAAPREAFRGRALLSVESGSKPFTRQEVIGFVIGSISSVLYLLSRLPQIRTNFLRKSTQGISYSLFALVMLGNTLYGLSVLLKNPEEGQSEGSYLLHHLPWLVGSLGVLLLDTIISIQFLVYRRSTAASELEPLLPS

SEQ ID NO: 9589 - protein, 143 aa, Homo sapiens
MSGRGKTGGKARAKAKSRSSRAGLQFPVGRVHRLLRKGHYAERVGAGAPVYLAAVLEYLTAEILELAGNAARDNKKTRIIPRHLQLAIRNDEELNKLLGGVTIAQGGVLPNIQAVLLPKKTSATVGPKAPSGGKKATQASQEY

SEQ ID NO: 9590 - protein, 239 aa, Homo sapiens
MPKSKRDKKVSLTKTAKKGLELKQNLIEELRKCVDTYKYLFIFSVANMRNSKLKDIRNAWKHSRMFFGKNKVMMVALGRSPSDEYKDNLHQVSKRLRGEVGLLFTNRTKEEVNEWFTKYTEMDYARAGNKAAFTVSLDPGPLEQFPHSMEPQLRQLGLPTALKRGVVTLLSDYEVCKEGDVLTPEQARVLKLFGYEMAEFKVTIKYMWDSQSGRFQQMGDDLPESASESTEESDSEDDD

SEQ ID NO: 9591 - protein, 1096 aa, Homo sapiens
MGVQGFQEFLEKRCPGAVVPVDLLKLARTVSRQQQQQHLHRQLPPTAALAPGAPRAARGSVPLQPPLPPAALGAYSGGAGPTRHHHPAHHFHHHGQAQPGLHPPLPPPPPPQLPGARVLVDAGSALPRLYGGYQTDWVCGGQWNAMLGYLSALCQACAYPGGDGLELVVMFPGGLGKDRLAEWGRRCQAERQTAQLIVGHVGNKGTPPPRAWFLPPACLSHCVRLALIRFRVKVFQSLEDHHLEVVAFFRENGFHGLLAHDSEYALYNIPSYYSSHALKLSWNGKNLTTNQFLMQEVAKQLGLKRMNFPIFAALLGNHILPDEDLAAFHWSLLGPEHPLASLKVRAHQLVLPPCDVVIKAVSEYVSSIKDPSNLDVVGKDVFKQSQSRTEDKIERFKKAVEYYSVTTKLSSLPVGPSFLGFRNNRLGNPPLPRNQVGTISAGKPMFSHQVPQKVKYPPPFPVGPNSSLLFSSHALGESHAFSEDPMLQNSPFANWAVSYDSSASQFPNYLPSKASPPLGPDSSHSSSSDGDEPNGASSDHITEAFHHQPEWGNPNRDRGSWAQPVDTGVSEASLGDGEPHIPSLLSMSTRNHMDITIPPLPPVAPEVLRVAEHRHRRGLMYPYIYHVLTKGEIKIPVCIEDECNMELPPAALLFRSARQYVYGVLFSLAETQRKMERLAMRRRLPVEVPSVILKEWSAYKGKSPQTPELVSALTFREWTCPNLKKLWLGKAVEDKNRRMRAFLACMKSDTPSMLNPANVPTHLLLMCCVLRYMVQWPGGRILHRHELDTFLAQAVSTQLYEPDRLQELKIEKLDARGIQLAALFMSGVDTALFANDACGQPVPWEHCCPWIYFDGKLFQSKLIKAGRERVSLVELCDGQADLATKVEKMRQSILEGVNMNHPPPSALLPSPTFVPPMVPSLYPVSLYSRAMGSMPLPPQGRSRGFAGLHPIPPQGGKLEIAGMVVGQWAGSRSSRGRGSFGMQVVSVGGPGKGHGKEQTGRGSKGHKKGNKQGSSDGVSKSLELHQGRSRSQVNGNSGALIKEEKSDHRLPAPSQCALSRDSNECNNGNRYLPMNNREKNHLQEQKLETVAQRKED

SEQ ID NO: 9592 - protein, 992 aa, Homo sapiens
MAAEWASRFWLWATLLIPAAAVYEDQVGKFDWRQQYVGKVKFASLEFSPGSKKLVVATEKNVIAALNSRTGEILWRHVDKGTAEGAVDAMLLHGQDVITVSNGGRIMRSWETNIGGLNWEITLDSGSFQALGLVGLQESVRYIAVLKKTTLALHHLSSGHLKWVEHLPESDSIHYQMVYSYGSGVVWALGVVPFSHVNIVKFNVEDGEIVQQVRVSTPWLQHLSGACGVVDEAVLVCPDPSSRSLQTLALETEWELRQIPLQSLDLEFGSGFQPRVLPTQPNPVDASRAQFFLHLSPSHYALLQYHYGTLSLLKNFPQTALVSFATTGEKTVAAVMACRNEVKSSSSEDGSMGSFSEKSSSKDSLACFNQTYTINLYLVETGRRLLDTTITFSLEQSGTRPERLYIQVFLKKDDSVGYRALVQTEDHLLLFLQQLAGKVVLWSREESLAEVVCLEMVDLPLTGAQAELEGEFGKKADGLLGMFLKRLSSQLILLQAWTSHLWKMFYDARKPRSQIKNEINIDTLARDEFNLQKMMVMVTASGKLFGIESSSGTILWKQYLPNVKPDSSFKLMVQRTTAHFPHPPQCTLLVKDKESGMSSLYVFNPIFGKWSQVAPPVLKRPILQSLLLPVMDQDYAKVLLLIDDEYKVTAFPATRNVLRQLHELAPSIFFYLVDAEQGRLCGYRLRKDLTTELSWELTIPPEVQRIVKVKGKRSSEHVHSQGRVMGDRSVLYKSLNPNLLAVVTESTDAHHERTFIGIFLIDGVTGRIIHSSVQKKAKGPVHIVHSENWVVYQYWNTKARRNEFTVLELYEGTEQYNATAFSSLDRPQLPQVLQQSYIFPSSISAMEATITERGITSRHLLIGLPSGAILSLPKALLDPRRPEIPTEQSREENLIPYSPDVQIHAERFINYNQTVSRMRGIYTAPSGLESTCLVVAYGLDIYQTRVYPSKQFDVLKDDYDYVLISSVLFGLVFATMITKRLAQVKLLNRAWR

SEQ ID NO: 9593 - protein, 971 aa, Homo sapiens
MAAEWASRFWLWATLLIPAAAVYEDQVGKFDWRQQYVGKVKFASLEFSPGSKKLVVATEKNVIAALNSRTGEIYVITVSNGGRIMRSWETNIGGLNWEITLDSGSFQALGLVGLQESVRYIAVLKKTTLALHHLSSGHLKWVEHLPESDSIHYQMVYSYGSGVVWALGVVPFSHVNIVKFNVEDGEIVQQVRVSTPWLQHLSGACGVVDEAVLVCPDPSSRSLQTLALETEWELRQIPLQSLDLEFGSGFQPRVLPTQPNPVDASRAQFFLHLSPSHYALLQYHYGTLSLLKNFPQTALVSFATTGEKTVAAVMACRNEVQKSSSSEDGSMGSFSEKSSSKDSLACFNQTYTINLYLVETGRRLLDTTITFSLEQSGTRPERLYIQVFLKKDDSVGYRALVQTEDHLLLFLQQLAGKVVLWSREESLAEVVCLEMVDLPLTGAQAELEGEFGKKADGLLGMFLKRLSSQLILLQAWTSHLWKMFYDARKPRSQIKNEINIDTLARDEFNLQKMMVMVTASGKLFGIESSSGTILWKQYLPNVKPDSSFKLMVQRTTAHFPHPPQCTLLVKDKESGMSSLYVFNPIFGKWSQVAPPVLKRPILQSLLLPVMDQDYAKVLLLIDDEYKVTAFPATRNVLRQLHELAPSIFFYLVDAEQGRLCGYRLRKDLTTELSWELTIPPEVQRIVKVKGKRSSEHVHSQGRVMGDRSVLYKSLNPNLLAVVTESTDAHHERTFIGIFLIDGVTGRIIHSSVQKKAKGPVHIVHSENWVVYQYWNTKARRNEFTVLELYEGTEQYNATAFSSLDRPQLPQVLQQSYIFPSSISAMEATITERGITSRHLLIGLPSGAILSLPKALLDPRRPEIPTEQSREENLIPYSPDVQIHAERFINYNQTVSRMRGIYTAPSGLESTCLVVAYGLDIYQTRVYPSKQFDVLKDDYDYVLISSVLFGLVFATMITKRLAQVKLLNRAWR

SEQ ID NO: 9594 - protein, 800 aa, Homo sapiens
MSSLGASFVQIKFDDLQFFENCGGGSFGSVYRAKWISQDKEVAVKKLLKIEKEAEILSVLSHRNIIQFYGVILEPPNYGIVTEYASLGSLYDYINSNRSEEMDMDHIMTWATDVAKGMHYLHMEAPVKVIHRDLKSRNVVIAADGVLKICDFGASRFHNHTTHMSLVGTFPWMAPEVIQSLPVSETCDTYSYGVVLWEMLTREVPFKGLEGLQVAWLVVEKNERLTIPSSCPRSFAELLHQCWEADAKKRPSFKQIISILESMSNDTSLPDKCNSFLHNKAEWRCEIEATLERLKKLERDLSFKEQELKERERRLKMWEQKLTEQSNTPLLPSFEIGAWTEDDVYCWVQQLVRKGDSSAEMSVYASLFKENNITGKRLLLLEEEDLKDMGIVSKGHIIHFKSAIEKLTHDYINLFHFPPLIKDSGGEPEENEEKIVNLELVFGFHLKPGTGPQDCKWKMYMEMDGDEIAITYIKDVTFNTNLPDAEILKMTKPPFVMEKWIVGIAKSQTVECTVTYESDVRTPKSTKHVHSIQWSRTKPQDEVKAVQLAIQTLFTNSDGNPGSRSDSSADCQWLDTLRMRQIASNTSLQRSQSNPILGSPFFSHFDGQDSYAAAVRRPQVPIKYQQITPVNQSRSSSPTQYGLTKNFSSLHLNSRDSGFSSGNTDTSSERGRYSDRSRNKYGRGSISLNSSPRGRYSGKSQHSTPSRGRYPGKFYRVSQSALNPHQSPDFKRSPRDLHQPNTIPGMPLHPETDSRASEEDSKVSEGGWTKVEYRKKPHRPSPAKTNKERARGDHRGWRNF

SEQ ID NO: 9595 - protein, 226 aa, Homo sapiens
MAAPAPVTRQVSGAAALVPAPSGPDSGQPLAAAVAELPVLDARGQRVPFGALFRERRAVVVFVRHFLCYICKEYVEDLAKIPRSFLQEANVTLIVIGQSSYHHIEPFCKLTGYSHEIYVDPEREIYKRLGMKRGEEIASSGQSPHIKSNLLSGSLQSLWRAVTGPLFDFQGDPAQQGGTLILGPGNNIHFIHRDRNRLDHKPINSVLQLVGVQHVNFTNRPSVIHV

SEQ ID NO: 9596 - protein, 362 aa, Homo sapiens
MACAGLLTVCLLRPPAPQPQPQTPRHPQLAPDPGPAGHTLFQDVFRRADKNDDGKLSFEEFQNYFADGVLSLGELQELFSGIDGHLTDNLETEKLCDYFSEHLGVYRPVLAALESLNRAVLAAMDATKLEYERASKVDQFVTRFLLRETVSQLQALQSSLEGASDTLEAQAHGWRSDAESVEAQSRLCGSRRAGRRALRSVSRSSTWSPGSSDTGRSSEAEMQWRLQVNRLQELIDQLECKAPRLEPLREEDLAKGPDLHILMAQRQVQVAEEGLQDFHRALRCYVDFTGAQSHCLHVSAQKMLDGASFTLYEFWQDEASWRRHQQSPGSKAFQRILIDHLRAPDTLTTVFFPASWWIMNNN

SEQ ID NO: 9597 - protein, 4244 aa, Homo sapiens
MMPAQYALTSSLVLLVLLSTARAGPFSSRSNVTLPAPRPPPQPGGHTVGAGVGSPSSQLYEHTVEGGEKQVVFTHRINLPPSTGCGCPPGTEPPVLASEVQALRVRLEILEELVKGLKEQCTGGCCPASAQAGTGQTDVRTLCSLHGVFDLSRCTCSCEPGWGGPTCSDPTDAEIPPSSPPSASGSCPDDCNDQGRCVRGRCVCFPGYTGPSCGWPSCPGDCQGRGRCVQGVCVCRAGFSGPDCSQRSCPRGCSQRGRCEGGRCVCDPGYTGDDCGMRSCPRGCSQRGRCENGRCVCNPGYTGEDCGVRSCPRGCSQRGRCKDGRCVCDPGYTGEDCGTRSCPWDCGEGGRCVDGRCVCWPGYTGEDCSTRTCPRDCRGRGRCEDGECICDTGYSGDDCGVRSCPGDCNQRGRCEDGRCVCWPGYTGTDCGSRACPRDCRGRGRCENGVCVCNAGYSGEDCGVRSCPGDCRGRGRCESGRCMCWPGYTGRDCGTRACPGDCRGRGRCVDGRCVCNPGFTGEDCGSRRCPGDCRGHGLCEDGVCVCDAGYSGEDCSTRSCPGGCRGRGQCLDGRCVCEDGYSGEDCGVRQCPNDCSQHGVCQDGVCICWEGYVSEDCSIRTCPSNCHGRGRCEEGRCLCDPGYTGPTCATRMCPADCRGRGRCVQGVCLCHVGYGGEDCGQEEPPASACPGGCGPRELCRAGQCVCVEGFRGPDCAIQTCPGDCRGRGECHDGSCVCKDGYAGEDCGEEVPTIEGMRMHLLEETTVRTEWTPAPGPVDAYEIQFIPTTEGASPPFTARVPSSASAYDQRGLAPGQEYQVTVRALRGTSWGLPASKTITTMIDGPQDLRVVAVTPTTLELGWLRPQAEVDRFVVSYVSAGNQRVRLEVPPEADGTLLTDLMPGVEYVVTVTAERGRAVSYPASVRANTGSSPLGLLGTTDEPPPSGPSTTQGAQAPLLQQRPQELGELRVLGRDETGRLRVVWTAQPDTFAYFQLRMRVPEGPGAHEEVLPGDVRQALVPPPPPGTPYELSLHGVPPGGKPSDPIIYQGIMDKDEEKPGKSSGPPRLGELTVTDRTSDSLLLRWTVPEGEFDSFVIQYKDRDGQPQVVPVEGPQRSAVITSLDPGRKYKFVLYGFVGKKRHGPLVAEAKILPQSDPSPGTPPHLGNLWVTDPTPDSLHLSWTVPEGQFDTFMVQYRDRDGRPQVVPVEGPERSFVVSSLDPDHKYRFTLFGIANKKRYGPLTADGTTAPERKEEPPRPEFLEQPLLGELTVTGVTPDSLRLSWTVAQGPFDSFMVQYKDAQGQPQAVPVAGDENEVTVPGLDPDRKYKMNLYGLRGRQRVGPESVVAKTAPQEDVDETPSPTELGTEAPESPEEPLLGELTVTGSSPDSLSLFWTVPQGSFDSFTVQYKDRDGRPRAVRVGGKESEVTVGGLEPGHKYKMHLYGLHEGQRVGPVSAVGVTAPQQEETPPATESPLEPRLGELTVTDVTPNSVGLSWTVPEGQFDSFIVQYKDKDGQPQVVPVAADQREVTVYNLEPERKYKMNMYGLHDGQRMGPLSVVIVTAPLPPAPATEASKPPLEPRLGELTVTDITPDSVGLSWTVPEGEFDSFVVQYKDRDGQPQVVPVAADQREVTIPDLEPSRKYKFLLFGIQDGKRRSPVSVEAKTVARGDASPGAPPRLGELWVTDPTPDSLRLSWTVPEGQFDSFVVQFKDKDGPQVVPVEGHERSVTVTPLDAGRKYRFLLYGLLGKKRHGPLTADGTTEARSAMDDTGTKRPPKPRLGEELQVTTVTQNSVGLSWTVPEGQFDSFVVQYKDRDGQPQVVPVEGSLREVSVPGLDPAHRYKLLLYGLHHGKRVGPISAVAITAGREETETETTAPTPPAPEPHLGELTVEEATSHTLHLSWMVTEGEFDSFEIQYTDRDGQLQMVRIGGDRNDITLSGLESDHRYLVTLYGFSDGKHVGPVHVEALTVPEEEKPSEPPTATPEPPIKPRLGELTVTDATPDSLSLSWTVPEGQFDHFLVQYRNGDGQPKAVRVPGHEEGVTISGLEPDHKYKMNLYGFHGGQRMGPVSVVGVTAAEEETPSPTEPSMEAPEPAEEPLLGELTVTGSSPDSLSLSWTVPQGRFDSFTVQYKDRDGRPQVVRVGGEESEVTVGGLEPGRKYKMHLYGLHEGRRVGPVSAVGVTAPEEESPDAPLAKLRLGQMTVRDITSDSLSLSWTVPEGQFDHFLVQFKNGDGQPKAVRVPGHEDGVTISGLEPDHKYKMNLYGFHGGQRVGPVSAVGLTAPGKDEEMAPASTEPPTPEPPIKPRLEELTVTDATPDSLSLSWTVPEGQFDHFLVQYKNGDGQPKATRVPGHEDRVTISGLEPDNKYKMNLYGFHGGQRVGPVSAIGVTAAEEETPSPTEPSMEAPEPPEEPLLGELTVTGSSPDSLSLSWTVPQGRFDSFTVQYKDRDGRPQVVRVGGEESEVTVGGLEPGRKYKMHLYGLHEGRRVGPVSTVGVTAPQEDVDETPSPTEPGTEAPGPPEEPLLGELTVTGSSPDSLSLSWTVPQGRFDSFTVQYKDRDGRPQAVRVGGQESKVTVRGLEPGRKYKMHLYGLHEGRRLGPVSAVGVTEDEAETTQAVPTMTPEPPIKPRLGELTMTDATPDSLSLSWTVPEGQFDHFLVQYRNGDGQPKAVRVPGHEDGVTISGLEPDHKYKMNLYGFHGGQRVGPISVIGVTAAEEETPSPTELSTEAPEPPEEPLLGELTVTGSSPDSLSLSWTIPQGHFDSFTVQYKDRDGRPQVMRVRGEESEVTVGGLEPGRKYKMHLYGLHEGRRVGPVSTVGVTAPEDEAETTQAVPTTTPEPPNKPRLGELTVTDATPDSLSLSWMVPEGQFDHFLVQYRNGDGQPKVVRVPGHEDGVTISGLEPDHKYKMNLYGFHGGQRVGPISVIGVTAAEEETPAPTEPSTEAPEPPEEPLLGELTVTGSSPDSLSLSWTIPQGRFDSFTVQYKDRDGRPQVVRVRGEESEVTVGGLEPGCKYKMHLYGLHEGQRVGPVSAVGVTAPKDEAETTQAVPTMTPEPPIKPRLGELTVTDATPDSLSLSWMVPEGQFDHFLVQYRNGDGQPKAVRVPGHEDGVTISGLEPDHKYKMNLYGFHGGQRVGPVSAIGVTEEETPSPTEPSTEAPEAPEEPLLGELTVTGSSPDSLSLSWTVPQGRFDSFTVQYKDRDGQPQVVRVRGEESEVTVGGLEPGRKYKMHLYGLHEGQRVGPVSTVGITAPLPTPLPVEPRLGELAVAAVTSDSVGLSWTVAQGPFDSFLVQYRDAQGQPQAVPVSGDLRAVAVSGLDPARKYKFLLFGLQNGKRHGPVPVEARTAPDTKPSPRLGELTVTDATPDSVGLSWTVPEGEFDSFVVQYKDKDGRLQVVPVAANQREVTVQGLEPSRKYRFLLYGLSGRKRLGPISADSTTAPLEKELPPHLGELTVAEETSSSLRLSWTVAQGPFDSFVVQYRDTDGQPRAVPVAADQRTVTVEDLEPGKKYKFLLYGLLGGKRLGPVSALGMTAPEEDTPAPELAPEAPEPPEEPRLGVLTVTDTTPDSMRLSWSVAQGPFDSFVVQYEDTNGQPQALLVDGDQSKILISGLEPSTPYRFLLYGLHEGKRLGPLSAEGTTGLAPAGQTSEESRPRLSQLSVTDVTTSSLRLNWEAPPGAFDSFLLRFGVPSPSTLEPHPRPLLQRELMVPGTRHSAVLRDLRSGTLYSLTLYGLRGPHKADSIQGTARTLSPVLESPRDLQFSEIRETSAKVNWMPPPSRADSFKVSYQLADGGEPQSVQVDGQARTQKLQGLIPGARYEVTVVSVRGFEESEPLTGFLTTVPDGPTQLRALNLTEGFAVLHWKPPQNPVDTYDVQVTAPGAPPLQAETPGSAVDYPLHDLVLHTNYTATVRGLRGPNLTSPASITFTTGLEAPRDLEAKEVTPRTALLTWTEPPVRPAGYLLSFHTPGGQNQEILLPGGITSHQLLGLFPSTSYNARLQAMWGQSLLPPVSTSFTTGGLRIPFPRDCGEEMQNGAGASRTSTIFLNGNRERPLNVFCDMETDGGGWLVFQRRMDGQTDFWRDWEDYAHGFGNISGEFWLGNEALHSLTQAGDYSMRVDLRAGDEAVFAQYDSFHVDSAAEYYRLHLEGYHGTAGDSMSYHSGSVFSARDRDPNSLLISCAVSYRGAWWYRNCHYANLNGLYGSTVDHQGVSWYHWKGFEFSVPFTEMKLRPRNFRSPAGGG

SEQ ID NO: 9598 - protein, 413 aa, Homo sapiens
MKGALGSPVAAAGAAMQESFGCVVANRFHQLLDDESDPFDILREAERRRQQQLQRKRRDEAAAAAGAGPRGGRSPAGASGHRAGAGGRRESQKERKSLPAPVAQRPDSPGGGLQAPGQKRTPRRGEQQGWNDSRGPEGMLERAERRSYREYRPYETERQADFTAEKFPDEKPGDRFDRDRPLRGRGGPRGGMRGRGRGGPGNRVFDAFDQRGKREFERYGGNDKIAVRTEDNMGGCGVRTWGSGKDTSDVEPTAPMEEPTVVEESQGTPEEESPAKVPELEVEEETQVQEMTLDEWKNLQEQTRPKPEFNIRKPESTVPSKAVVIHKSKYRDDMVKDDYEDDSHVFRKPANDITSQLEINFGNLPRPGRGARGGTRGGRGRIRRAENYGPRAEVVMQDVAPNPDDPEDFPALS

SEQ ID NO: 9599 - protein, 5183 aa, Homo sapiens
MATSGGEEAAAAAPAPGTPATGADTTPGWEVAVRPLLSASYSAFEMKELPQLVASVIESESEILHHEKQYEPFYSSFVALSTHYITTVCSLIPRNQLQSVAAACKVLIEFSLLRLENPDEACAVSQKHLILLIKGLCTGCSRLDRTEIITFTAMMKSAKLPQTVKTLSDVEDQKELASPVSPELRQKEVQMNFLNQLTSVFNPRTVASQPISTQTLVEGENDEQSSTDQASAIKTKNVFIAQNVASLQELGGSEKLLRVCLNLPYFLRYINRFQDAVLANSFFIMPATVADATAVRNGFHSLVIDVTMALDTLSLPVLEPLNPSRLQDVTVLSLSCLYAGVSVATCMAILHVGSAQQVRTGSTSSKEDDYESDAATIVQKCLEIYDMIGQAISSSRRAGGEHYQNFQLLGAWCLLNSLFLILNLSPTALADKGKEKDPLAALRVRDILSRTKEGVGSPKLGPGKGHQGFGVLSVILANHAIKLLTSLFQDLQVEALHKGWETDGPPAALSIMAQSTSIQRIQRLIDSVPLMNLLLTLLSTSYRKACVLQRQRKGSMSSDASASTDSNTYYEDDFSSTEEDSSQDDDSEPILGQWFEETISPSKEKAAPPPPPPPPPLESSPRVKSPSKQAPGEKGNILASRKDPELFLGLASNILNFITSSMLNSRNNFIRNYLSVSLSEHHMATLASIIKEVDKDGLKGSSDEEFAAALYHFNHSLVTSDLQSPNLQNTLLQQLGVAPFSEGPWPLYIHPQSLSVLSRLLLIWQHKASAQGDPDVPECLKVWDRFLSTMKQNALQGVVPSETEDLNVEHLQMLLLIFHNFTETGRRAILSLFVQIIQELSVNMDAQMRFVPLILARLLLIFDYLLHQYSKAPVYLFEQVQHNLLSPPFGWASGSQDSNSRRATTPLYHGFKEVEENWSKHFSSDAVPHPRFYCVLSPEASEDDLNRLDSVACDVLFSKLVKYDELYAALTALLAAGSQLDTVRRKENKNVTALEACALQYYFLILWRILGILPPSKTYINQLSMNSPEMSECDILHTLRWSSRLRISSYVNWIKDHLIKQGMKAEHASSLLELASTTKCSSVKYDVEIVEEYFARQISSFCSIDCTTILQLHEIPSLQSIYTLDAAISKVQVSLDEHFSKMAAETDPHKSSEITKNLLPATLQLIDTYASFTRAYLLQNFNEEGTTEKPSKEKLQGFAAVLAIGSSRCKANTLGPTLVQNLPSSVQTVCESWNNINTNEFPNIGSWRNAFANDTIPSESYISAVQAAHLGTLCSQSLPLAASLKHTLLSLVRLTGDLIVWSDEMNPPQVIRTLLPLLLESSTESVAEISSNSLERILGPAESDEFLARVYEKLITGCYNILANHADPNSGLDESILEECLQYLEKQLESSQARKAMEEFFSDSGELVQIMMATANENLSAKFCNRVLKFFTKLFQLTEKSPNPSLLHLCGSLAQLACVEPVRLQAWLTRMTTSPPKDSDQLDVIQENRQLLQLLTTYIVRENSQVGEGVCAVLLGTLTPMATEMLANGDGTGFPELMVVMATLASAGQGAGHLQLHNAAVDWLSRCKKYLSQKNVVEKLNANVMHGKHVMILECTCHIMSYLADVTNALSQSNGQGPSHLSVDGEERAIEVDSDWVEELAVEEEDSQAEDSDEDSLCNKLCTFTITQKEFMNQHWYHCHTCKMVDGVGVCTVCAKVCHKDHEISYAKYGSFFCDCGAKEDGSCLALVKRTPSSGMSSTMKESAFQSEPRISESLVRHASTSSPADKAKVTISDGKVADEEKPKKSSLCRTVEGCREELQNQANFSFAPLVLDMLNFLMDAIQTNFQQASAVGSSSRAQQALSELHTVEKAVEMTDQLMVPTLGSQEGAFENVRMNYSGDQGQTIRQLISAHVLRRVAMCVLSSPHGRRQHLAVSHEKGKITVLQLSALLKQADSSKRKLTLTRLASAPVPFTVLSLTGNPCKEDYLAVCGLKDCHVLTFSSSGSVSDHLVLHPQLATGNFIIKAVWLPGSQTELAIVTADFVKIYDLCVDALSPTFYFLLPSSKIRDVTFLFNEEGKNIIVIMSSAGYIYTQLMEEASSAQQGPFYVTNVLEINHEDLKDSNSQVAGGGVSVYYSHVLQMLFFSYCQGKSFAATISRTTLEVLQLFPINIKSSNGGSKTSPALCQWSEVMNHPGLVCCVQQTTGVPLVVMVKPDTFLIQEIKTLPAKAKIQDMVAIRHTACNEQQRTTMILLCEDGSLRIYMANVENTSYWLQPSLQPSSVISIMKPVRKRKTATITTRTSSQVTFPIDFFEHNQQLTDVEFGGNDLLQVYNAQQIKHRLNSTGMYVANTKPGGFTIEISNNNSTMVMTGMRIQIGTQAIERAPSYIEIFGRTMQLNLSRSRWFDFPFTREEALQADKKLNLFIGASVDPAGVTMIDAVKIYGKTKEQFGWPDEPPEEFPSASVSNICPSNLNQSNGTGDSDSAAPTTTSGTVLERLVVSSLEALESCFAVGPIIEKERNKNAAQELATLLLSLPAPASVQQQSKSLLASLHTSRSAYHSHKDQALLSKAVQCLNTSSKEGKDLDPEVFQRLVITARSIAIMRPNNLVHFTESKLPQMETEGMDEGKEPQKQLEGDCCSFITQLVNHFWKLHASKPKNAFLAPACLPGLTHIEATVNALVDIIHGYCTCELDCINTASKIYMQMLLCPDPAVSFSCKQALIRVLRPRNKRRHVTLPSSPRSNTPMGDKDDDDDDDADEKMQSSGIPNGGHIRQESQEQSEVDHGDFEMVSESMVLETAENVNNGNPSPLEALLAGAEGFPPMLDIPPDADDETMVELAIALSLQQDQQGSSSSALGLQSLGLSGQAPSSSSLDAGTLSDTTASAPASDDEGSTAATDGSTLRTSPADHGGSVGSESGGSAVDSVAGEHSVSGRSSAYGDATAEGHPAGPGSVSSSTGAISTTTGHQEGDGSEGEGEGETEGDVHTSNRLHMVRLMLLERLLQTLPQLRNVGGVRAIPYMQVILMLTTDLDGEDEKDKGALDNLLSQLIAELGMDKKDVSKKNERSALNEVHLVVMRLLSVFMSRTKSGSKSSICESSSLISSATAAALLSSGAVDYCLHVLKSLLEYWKSQQNDEEPVATSQLLKPHTTSSPPDMSPFFLRQYVKGHAADVFEAYTQLLTEMVLRLPYQIKKITDTNSRIPPPVFDHSWFYFLSEYLMIQQTPFVRRQVRKLLLFICGSKEKYRQLRDLHTLDSHVRGIKKLLEEQGIFLRASVVTASSGSALQYDTLISLMEHLKACAEIAAQRTINWQKFCIKDDSVLYFLLQVSFLVDEGVSPVLLQLLSCALCGSKVLAALAASSGSSSASSSSAPVAASSGQATTQSKSSTKKSKKEEKEKEKDGETSGSQEDQLCTALVNQLNKFADKETLIQFLRCFLLESNSSSVRWQAHCLTLHIYRNSSKSQQELLLDLMWSIWPELPAYGRKAAQFVDLLGYFSLKTPQTEKKLKEYSQKAVEILRTQNHILTNHPNSNIYNTLSGLVEFDGYYLESDPCLVCNNPEVPFCYIKLSSIKVDTRYTTTQQVVKLIGSHTISKVTVKIGDLKRTKMVRTINLYYNNRTVQAIVELKNKPARWHKAKKVQLTPGQTEVKIDLPLPIVASNLMIEFADFYENYQASTETLQCPRCSASVPANPGVCGNCGENVYQCHKCRSINYDEKDPFLCNACGFCKYARFDFMLYAKPCCAVDPIENEEDRKKAVSNINTLLDKADRVYHQLMGHRPQLENLLCKVNEAAPEKPQDDSGTAGGISSTSASVNRYILQLAQEYCGDCKNSFDELSKIIQKVFASRKELLEYDLQQREAATKSSRTSVQPTFTASQYRALSVLGCGHTSSTKCYGCASAVTEHCITLLRALATNPALRHILVSQGLIRELFDYNLRRGAAAMREEVRQLMCLLTRDNPEATQQMNDLIIGKVSTALKGHWANPDLASSLQYEMLLLTDSISKEDSCWELRLRCALSLFLMAVNIKTPVVVENITLMCLRILQKLIKPPAPTSKKNKDVPVEALTTVKPYCNEIHAQAQLWLKRDPKASYDAWKKCLPIRGIDGNGKAPSKSELRHLYLTEKYVWRWKQFLSRRGKRTSPLDLKLGHNNWLRQVLFTPATQAARQAACTIVEALATIPSRKQQVLDLLTSYLDELSIAGECAAEYLALYQKLITSAHWKVYLAARGVLPYVGNLITKEIARLLALEEATLSTDLQQGYALKSLTGLLSSFVEVESIKRHFKSRLVGTVLNGYLCLRKLVVQRTKLIDETQDMLLEMLEDMTTGTESETKAFMAVCIETAKRYNLDDYRTPVFIFERLCSIIYPEENEVTEFFVTLEKDPQQEDFLQGRMPGNPYSSNEPGIGPLMRDIKNKICQDCDLVALLEDDSGMELLVNNKIISLDLPVAEVYKKVWCTTNEGEPMRIVYRMRGLLGDATEEFIESLDSTTDEEEDEEEVYKMAGVMAQCGGLECMLNRLAGIRDFKQGRHLLTVLLKLFSYCVKVKVNRQQLVKLEMNTLNVMLGTLNLALVAEQESKDSGGAAVAEQVLSIMEIILDESNAEPLSEDKGNLLLTGDKDQLVMLLDQINSTFVRSNPSVLQGLLRIIPYLSFGEVEKMQILVERFKPYCNFDKYDEDHSGDDKVFLDCFCKIAAGIKNNSNGHQLKDLILQKGITQNALDYMKKHIPSAKNLDADIWKKFLSRPALPFILRLLRGLAIQHPGTQVLIGTDSIPNLHKLEQVSSDEGIGTLAENLLEALREHPDVNKKIDAARRETRAEKKRMAMAMRQKALGTLGMTTNEKGQVVTKTALLKQMEELIEEPGLTCCICREGYKFQPTKVLGIYTFTKRVALEEMENKPRKQQGYSTVSHFNIVHYDCHLAAVRLARGREEWESAALQNANTKCNGLLPVWGPHVPESAFATCLARHNTYLQECTGQREPTYQLNIHDIKLLFLRFAMEQSFSADTGGGGRESNIHLIPYIIHTVLYVLNTTRATSREEKNLQGFLEQPKEKWVESAFEVDGPYYFTVLALHILPPEQWRATRVEILRRLLVTSQARAVAPGGATRLTDKAVKDYSAYRSSLLFWALVDLIYNMFKKVPTSNTEGGWSCSLAEYIRHNDMPIYEAADKALKTFQEEFMPVETFSEFLDVAGLLSEITDPESFLKDLLNSVP

SEQ ID NO: 9600 - protein, 169 aa, Homo sapiens
MAAACRSVKGLVAVITGGASGLGLATAERLVGQGASAVLLDLPNSGGEAQAKKLGNNCVFAPADVTSEKDVQTALALAKGKFGRVDVAVNCAGIAVASKTYNLKKGQTHTLEDFQRVLDVNLMGTFNVIRLVAGEMGQNEPDQGGQRGVIINTASVAAFEGQVCLAPHC

SEQ ID NO: 9601 - protein, 476 aa, Homo sapiens
MRSEKEGAGGLRAAVAARGPSGREKLSALEVQFHRDSQQQEAETPPTSSSGCGGGAGKPREEKRTALSKVVIRRLPPGLTKEQLEEQLRPLPAHDYFEFFAADLSLYPHLYSRAYINFRNPDDILLFRDRFDGYIFLDSKGLEYPAVVEFAPFQKIAKKKLRKKDAKTGSIEDDPEYKKFLETYCVEEEKTSANPETLLGEMEAKTRELIARRTTPLLEYIKNRKLEKQRIREEKREERRRRELEKKRLREEEKRRRREEERCKKKETDKQKKIAEKEVRIKLLKKPEKGEEPTTEKPKERGEEIDTGGGKQESCAPGAVVKARPMEGSLEEPQETSHSGSDKEHRDVERSQEQESEAQRYHVDDGRRHRAHHEPERLSRRSEDEQRWGKGPGQDRGKKGSQDSGAPGEAMERLGRAQRCDDSPAPRKERLANKDRPALQLYDPGARFRARECGGNRRICKAEGSGTGPEKREEAE

SEQ ID NO: 9602 - protein, 252 aa, Homo sapiens
MAAACRSVKGLVAVITGGASGLGLATAERLVGQGASAVLLDLPNSGGEAQAKKLGNNCVFAPADVTSEKDVQTALALAKGKFGRVDVAVNCAGIAVASKTYNLKKGQTHTLEDFQRVLDVNLMGTFNVIRLVAGEMGQNEPDQGGQRGVIINTASVAAFEGQVGQAAYSASKGGIVGMTLPIARDLAPIGLFGTPLLTSLPEKVCNFLASQVPFPSRLGDPAEYAHLVQAIIENPFLNGEVIRLDGAIRMQP

SEQ ID NO: 9603 - protein, 526 aa, Homo sapiens
MEEPINKRLFEKYLKDESGFKDPSSDWEMSQSSIKSSICLLRGKIYDALDNRTLATYSYKEALKLDVYCFEAFDLLTSHHMLTAQEEKELLESLPLSKLCNEEQELLRFLFENKLKKYNKPSETVIPESVDGLQENLDVVVSLAERHYYNCDFKMCYKLTSVVMEKDPFHASCLPVHIGTLVELNKANELFYLSHKLVDLYPSNPVSWFAVGCYYLMVGHKNEHARRYLSKATTLEKTYGPAWIAYGHSFAVESEHDQAMAAYFTAAQLMKGCHLPMLYIGLEYGLTNNSKLAERFFSQALSIAPEDPFVMHEVGVVAFQNGEWKTAEKWFLDALEKIKAIGNEVTVDKWEPLLNNLGHVCRKLKKYAEALDYHRQALVLIPQNASTYSAIGYIHSLMGNFENAVDYFHTALGLRRDDTFSVTMLGHCIEMYIGDSEAYIGADIKDKLKCYDFDVHTMKTLKNIISPPWDFREFEVEKQTAEETGLTPLETSRKTPDSRPSLEETFEIEMNESDMMLETSMSDHST

SEQ ID NO: 9604 - protein, 819 aa, Homo sapiens
MDIQLDPARDDLPLMANTSHILVKHYVLDLDVDFESQVIEGTIVLFLEDGNRFKKQNSSIEEACQSESNKACKFGMPEPCHIPVTNARTFSSEMEYNDFAICSKGEKDTSDKDGNHDNQEHASGISSSKYCCDTGNHGSEDFLLVLDCCDLSVLKVEEVDVAAVPGLEKFTRSPELTVVSEEFRNQIVRELVTLPANRWREQLDYYARCSQAPGCGELLFDTDTWSLQIRKTGAQTATDFPHAIRIWYKTKPEGRSVTWTSDQSGRPCVYTVGSPINNRALFPCQEPPVAMSTWQATVRAAASFVVLMSGENSAKPTQLWEECSSWYYYVTMPMPASTFTIAVGCWTEMKMETWSSNDLATERPFSPSEANFRHVGVCSHMEYPCRFQNASATTQEIIPHRVFAPVCLTGACQETLLRLIPPCLSAAHSVLGAHPFSRLDVLIVPANFPSLGMASPHIMFLSQSILTGGNHLCGTRLCHEIAHAWFGLAIGARDWTEEWLSEGFATHLEDVFWATAQQLAPYEAREQQELRACLRWRRLQDEMQCSPEEMQVLRPSKDKTGHTSDSGASVIKHGLNPEKIFMQVHYLKGYFLLRFLAKRLGDETYFSFLRKFVHTFHGQLILSQDFLQMLLENIPEEKRLELSVENIYQDWLESSGIPKPLQRERRAGAECGLARQVRAEVTKWIGVNRRPRKRKRREKEEVFEKLLPDQLVLLLEHLLEQKTLSPRTLQSLQRTYHLQDQDAEVRHRWCELIVKHKFTKAYKSVERFLQEDQAMGVYLYGELMVSEDARQQQLARRCFERTKEQMDRSSAQVVAEMLF

SEQ ID NO: 9605 - protein, 132 aa, Homo sapiens
MEYMSTGSDNKEEIDLLIKHLNVSDVIDIMENLYASEEPAVYEPSLMTMCQDSNQNDERSKSLLLSGQEVPWLSSVRYGTVEDLLAFANHISNTAKHFYGQRPQESGILLNMVRFFPISWVLCAQLSYCSFI

SEQ ID NO: 9606 - protein, 338 aa, Homo sapiens [sequence omitted]

SEQ ID NO: 9607 - protein, 364 aa, Homo sapiens
MQKWFSAFDDAIIQRQWRANPSRGGGGVSFTKEVDTNVATGAPPRRQRVPGRACPWREPIRGRRGARPGGGDAGGTPGETVRHCSAPEDPIFRFSSLHSYPFPGTIKSRDMSWKRHHLIPETFGVKRRRKRGPVESDPLRGEPGSARAAVSELMQLFPRGLFEDALPPIVLRSQVYSLVPDRTVADRQLKELQEQGEIRIVQLGFDLDAHGIIFTEDYRTRVLKACDGRPYAGAVQKFLASVLPACGDLSFQQDQMTQTFGFRDSEITHLVNAGVLTVRDAGSWWLAVPGAGRFIKYFVKGRQAVLSMVRKAKYRELLLSELLGRRAPVVVRLGLTYHVHDLIGAQLVDCISTTSGTLLRLPET

SEQ ID NO: 9608 - protein, 194 aa, Homo sapiens
MWLSPSLLLLILPGYSIAAKITGPTTVNGSEQGSLTVQCAYGSGWETYLKWRCQGADWNYCNILVKTNGSEQEVKKNRVSIRDNQKNHVFTVTMENLKRDDADSYWCGTERPGIDLGVKVQVTINPGTQTAVSEWTTTTASLAFTAAATQKTSSPLTRSPLKSTHFLFLFLLELPLLLSMLGTVLWVNRPQRRS

SEQ ID NO: 9609 - protein, 326 aa, Homo sapiens
MQPPVPGPLGLLDPAEGLSRRKKTSLWFVGSLLLVSVLIVTVGLAATTRTENVTVGGYYPGIILGFGSFLGIIGINLVENRRQMLVAAIVFISFGVVAAFCCAIVDGVFAAQHIEPRPLTTGRCQFYSSGVGYLYDVYQTEVTCHSLDGKCQLKVRSNTCYCCDLYACGSAEPSPAYYEFIGVSGCQDVLHLYRLLWASAVLNVLGLFLGIITAAVLGAFKDMVPLSQLAYGPAVPPQTLYNPAQQILAYAGFRLTPEPVPTCSSYPLPLQPCSRFPVAPSSALASSEDLQPPSPSSSGSGLPGQAPPCYAPTYFPPGEKPPPYAP

SEQ ID NO: 9610 - protein, 478 aa, Homo sapiens
MPRRGYSKPGSWGSFWAMLTLVGLVTHAAQRADVGGEAAGTSINHSQAVLQRLQELLRQGNASDVVLRVQAAGTDEVRVFHAHRLLLGLHSELFLELLSNQSEAVLQEPQDCAAVFDKFIRYLYCGELTVLLTQAIPLHRLATKYGVSSLQRGVADYMRAHLAGGAGPAVGWYHYAVGTGDEALRESCLQFLAWNLSAVAASTEWGAVSPELLWQLLQRSDLVLQDELELFHALEAWLGRARPPPAVAERALRAIRYPMIPPAQLFQLQARSAALARHGPAVADLLLQAYQFHAASPLHYAKFFDVNGSAFLPRNYLAPAWGAPWVINNPARDDRSTSFQTQLGPSGHDAGRRVTWNVLFSPRWLPVSLRPVYADAAGTALPAARPEDGRPRLVVTPASSGGDAAGVSFQKTVLVGARQQGRLLVRHAYSFHQSSEEAGDFLAHADLQRRNSEYLVENALHLHLIVKPVYHTLIRTPK

SEQ ID NO: 9611 - protein, 410 aa, Homo sapiens
MAKDAGLIEANGELKVFIDQNLSPGKGVVSLVAVHPSTVNPLGKQLLPKTFGQSNVNIAQQVVIGTPQRPAASNTLVVGSPHTPSTHFASQNQPSDSSPWSAGKRNRKGEKNGKGLRHFSMKVCEKVQRKGTTSYNEVADELVAEFSAADNHILPNESAYDQKNIRRRVYDALNVLMAMNIISKEKKEIKWIGLPTNSAQECQNLEVERQRRLERIKQKQSQLQELILQQIAFKNLVQRNRHAEQQASRPPPPNSVIHLPFIIVNTSKKTVIDCSISNDKFEYLFNFDNTFEIHDDIEVLKRMGMACGLESGSCSAEDLKMARSLVPKALEPYVTEMAQGTVGGVFITTAGSTSNGTRFSASDLTNGADGMLATSSNGSQYSGSRVETPVSYVGEDDEEDDDFNENDEDD

SEQ ID NO: 9612 - protein, 839 aa, Homo sapiens
MGPRAKTISSLFFLLWVLAEPAENSDFYLPGDYLLGGLFSLHANMKGIVHLNFLQVPMCKEYEVKVIGYNLMQAMRFAVEEINNDSSLLPGVLLGYEIVDVCYISNNVQPVLYFLAHEDNLLPIQEDYSNYISRVVAVIGPDNSESVMTVANFLSLFLLPQITYSAISDELRDKVRFPALLRTTPSADHHIEAMVQLMLHFRWNWIIVLVSSDTYGRDNGQLLGERVARRDICIAFQETLPTLQPNQNMTSEERQRLVTIVDKLQQSTARVVVVFSPDLTLYHFFNEVLRQNFTGAVWIASESWAIDPVLHNLTELRHLGTFLGITIQSVPIPGFSEFREWGPQAGPPPLSRTSQSYTCNQECDNCLNATLSFNTILRLSGERVVYSVYSAVYAVAHALHSLLGCDKSTCTKRVVYPWQLLEEIWKVNFTLLDHQIFFDPQGDVALHLEIVQWQWDRSQNPFQSVASYYPLQRQLKNIQDISWHTINNTIPMSMCSKRCQSGQKKKPVGIHVCCFECIDCLPGTFLNHTEDEYECQACPNNEWSYQSETSCFKRQLVFLEWHEAPTIAVALLAALGFLSTLAILVIFWRHFQTPIVRSAGGPMCFLMLTLLLVAYMVVPVYVGPPKVSTCLCRQALFPLCFTICISCIAVRSFQIVCAFKMASRFPRAYSYWVRYQGPYVSMAFITVLKMVIVVIGMLATGLSPTTRTDPDDPKITIVSCNPNYRNSLLFNTSLDLLLSVVGFSFAYMGKELPTNYNEAKFITLSMTFYFTSSVSLCTFMSAYSGVLVTIVDLLVTVLNLLAISLGYFGPKCYMILFYPERNTPAYFNSMIQGYTMRRD

SEQ ID NO: 9613 - protein, 1557 aa, Homo sapiens
MEPGSDDFLPPPECPVFEPSWAEFRDPLGYIAKIRPIAEKSGICKIRPPADWQPPFAVEVDNFRFTPRIQRLNELEAQTRVKLNYLDQIAKFWEIQGSSLKIPNVERRILDLYSLSKIVVEEGGYEAICKDRRWARVAQRLNYPPGKNIGSLLRSHYERIVYPYEMYQSGANLVQCNTRPFDNEEKDKEYKPHSIPLRQSVQPSKFNSYGRRAKRLQPDPEPTEEDIEKNPELKKLQIYGAGPKMMGLGLMAKDKTLRKKDKEGPECPPTVVVKEELGGDVKVESTSPKTFLESKEELSHSPEPCTKMTMRLRRNHSNAQFIESYVCRMCSRGDEDDKLLLCDGCDDNYHIFCLLPPLPEIPKGVWRCPKCVMAECKRPPEAFGFEQATREYTLQSFGEMADSFKADYFNMPVHMVPTELVEKEFWRLVNSIEEDVTVEYGADIHSKEFGSGFPVSDSKRHLTPEEEEYATSGWNLNVMPVLEQSVLCHINADISGMKVPWLYVGMVFSAFCWHIEDHWSYSINYLHWGEPKTWYGVPSLAAEHLEEVMKKLTPELFDSQPDLLHQLVTLMNPNTLMSHGVPVVRTNQCAGEFVITFPRAYHSGFNQGYNFAEAVNFCTADWLPAGRQCIEHYRRLRRYCVFSHEELICKMAACPEKLDLNLAAAVHKEMFIMVQEERRLRKALLEKGITEAEREAFELLPDDERQCIKCKTTCFLSALACYDCPDGLVCLSHINDLCKCSSSRQYLRYRYTLDELPAMLHKLKVRAESFDTWANKVRVALEVEDGRKRSLEELRALESEARERRFPNSELLQQLKNCLSEAEACVSRALGLVSGQEAGPHRVAGLQMTLTELRAFLDQMNNLPCAMHQIGDVKGVLEQVEAYQAEAREALASLPSSPGLLQSLLERGRQLGVEVPEAQQLQRQVEQARWLDEVKRTLAPSARRGTLAVMRGLLVAGASVAPSPAVDKAQAELQELLTIAERWEEKAHLCLEARQKHPPATLEAIIREAENIPVHLPNIQALKEALAKARAWIADVDEIQNGDHYPCLDDLEGLVAVGRDLPVGLEELRQLELQVLTAHSWREKASKTFLKKNSCYTLLEVLCPCADAGSDSTKRSRWMEKELGLYKSDTELLGLSAQDLRDPGSVIVAFKEGEQKEKEGILQLRRTNSAKPSPLASSSTASSTTSICVCGQVLAGAGALQCDLCQDWFHGRCVSVPRLLSSPRPNPTSSPLLAWWEWDTKFLCPLCMRSRRPRLETILALLVALQRLPVRLPEGEALQCLTERAISWQGRARQALASEDVTALLGRLAELRQRLQAEPRPEEPPNYPAAPASDPLREGSGKDMPKVQGLLENGDSVTSPEKVAPEEGSDLELLSSLLPQLTGPVLELPEATRAPLEELMMEGDLLEVTLDENHSIWQLLQAGQPPDLERIRTLLELEKAERHGSRARGRALERRRRRKVDRGGEGDDPAREELEPKRVRSSGPEAEEVQEEEELEEETGGEGPPAPIPTTGSPSTQENQNGLEPAEGTTSGPSAPFSTLTPRLHLPCPQQPPQQQL

SEQ ID NO: 9614 - protein, 414 aa, Homo sapiens
MKVLGRSFFWVLFPVLPWAVQAVEHEEVAQRVIKLHRGRGVAAMQSRQWVRDSCRKLSGLLRQKNAVLNKLKTAIGAVEKDVGLSDEEKLFQVHTFEIFQKELNESENSVFQAVYGLQRALQGDYKDVVNMKESSRQRLEALREAAIKEETEYMELLAAEKHQVEALKNMQHQNQSLSMLDEILEDVRKAADRLEEEIEEHAFDDNKSVKGVNFEAVLRVEEEEANSKQNITKREVEDDLGLSMLIDSQNNQYILTKPRDSTIPRADHHFIKDIVTIGMLSLPCGWLCTAIGLPTMFGYIICGVLLGPSGLNSIKSIVQVETLGEFGVFFTLFLVGLEFSPEKLRKVWKISLQGPCYMTLLMIAFGLLWGHLLRIKPTQSVFISTCLSLSSTPLVSRFLMGSARGDKEGNRTAL

SEQ ID NO: 9615 - protein, 1246 aa, Homo sapiens
MMETERLVLPPPDPLDLPLRAVELGCTGHWELLNLPGAPESSLPHGLPPCAPDLQQEAEQLFLSSPAWLPLHGVEHSARKWQRKTDPWSLLAVLGAPVPSDLQAQRHPTTGQILGYKEVLLENTNLSATTSLSLRRPPGPASQSLWGNPTQYPFWPGGMDEPTITDLNTREEAEEEIDFEKDLLTIPPGFKKGMDFAPKDCPTPAPGLLSLSCMLEPLDLGGGDEDENEAVGQPGGPRGDTVSASPCSAPLARASSLEDLVLKEASTAVSTPEAPEPPSQEQWAIPVDATSPVGDFYRLIPQPAFQWAFEPDVFQKQAILHLERHDSVFVAAHTSAGKTVVAEYAIALAQKHMTRTIYTSPIKALSNQKFRDFRNTFGDVGLLTGDVQLHPEASCLIMTTEILRSMLYSGSDVIRDLEWVIFDEVHYINDVERGVVWEEVLIMLPDHVSIILLSATVPNALEFADWIGRLKRRQIYVISTVTRPVPLEHYLFTGNSSKTQGELFLLLDSRGAFHTKGYYAAVEAKKERMSKHAQTFGAKQPTHQGGPAQDRGVYLSLLASLRTRAQLPVVVFTFSRGRCDEQASGLTSLDLTTSSEKSEIHLFLQRCLARLRGSDRQLPQVLHMSELLNRGLGVHHSGILPILKEIVEMLFSRGLVKVLFATETFAMGVNMPARTVVFDSMRKHDGSTFRDLLPGEYVQMAGRAGRRGLDPTGTVILLCKGRVPEMADLHRMMMGKPSQLQSQFRLTYTMILNLLRVDALRVEDMMKRSFSEFPSRKDSKAHEQALAELTKRLGALEEPDMTGQLVDLPEYYSWGEELTETQHMIQRRIMESVNGLKSLSAGRVVVVKNQEHHNALGVILQVSSNSTSRVFTTLVLCDKPLSQDPQDRGPATAEVPYPDDLVGFKLFLPEGPCDHTVVKLQPGDMAAITTKVLRVNGEKILEDFSKRQQPKFKKDPPLAAVTTAVQELLRLAQAHPAGPPTLDPVNDLQLKDMSVVEGGLRARKLEELIQGAQCVHSPRFPAQYLKLRERMQIQKEMERLRFLLSDQSLLLLPEYHQRVEVLRTLGYVDEAGTVKLAGRVACAMSSHELLLTELMFDNALSTLRPEEIAALLSGLVCQSPGDAGDQLPNTLKQGIERVRAVAKRIGEVQVACGLNQTVEEFVGELNFGLVEVVYEWARGMPFSELAGLSGTPEGLVVRCIQRLAEMCRSLRGAARLVGEPVLGAKMETAATLLRRDIVFAASLYTQ

SEQ ID NO: 9616 - protein, 2182 aa, Homo sapiens
MKRKERIARRLEGIENDTQPILLQSCTGLVTHRLLEEDTPRYMRASDPASPHIGRSNEEEETSDSSLEKQTRSKYCTETSGVHGDSPYGSGTMDTHSLESKAERIARYKAERRRQLAEKYGLTLDPEADSEYLSRYTKSRKEPDAVEKRGGKSDKQEESSRDASSLYPGTETMGLRTCAGESKDYALHVGDGSSDPEVLLNIENQRRGQELSATRQAHDLSPAAESSSTFSFSGRDSSFTEVPRSPKHAHSSSLQQAASRSPSFGDPQLSPEARPSTGKPKHEWFLQKDSEGDTPSLINWPSRVKVREKLVKEESARNSPELASESVTQRRHQPAPVHYVSFQSEHSAFDRVPSKAAGSTRQPIRGYVQPADTGHTAKLVTPETPENASECSWVASATQNVPKPPSLTVLEGDGRDSPVLHVCESKAEEEEGEGEGEEKEEDVCFTEALEQSKKTLLALEGDGLVRSPEDPSRNEDFGKPAVSTVTLEHQKELENVAQPPQAPHQPTERTGRSEMVLYIQSEPVSQDAKPTGHNREASKKRKVRTRSLSDFTGPPQLQALKYKDPASRRELELPSSKTEGPYGEISMLDTKVSVAQLRSAFLASANACRRPELKSRVERSAEGPGLPTGVERERGSRKPRRYFSPGESRKTSERFRTQPITSAERKESDRCTSHSETPTVDDEEKVDERAKLSVAAKRLLFREMEKSFDEQNVPKRRSRNTAVEQRLRRLQDRSLTQPITTEEVVIAATLQASAHQKALAKDQTNEGKELAEQGEPDSSTLSLAEKLALFNKLSQPVSKAISTRNRIDTRQRRMNARYQTQPVTLGEVEQVQSGKLIPFSPAVNTSVSTVASTVAPMYAGDLRTKPPLDHNASATDYKFSSSIENSDSPVRSILKSQAWQPLVEGSENKGMLREYGETESKRALTGRDSGMEKYGSFEEAEASYPILNRAREGDSHKESKYAVPRRGSLERANPPITHLGDEPKEFSMAKMNAQGNLDLRDRLPFEEKVEVENVMKRKFSLRAAEFGEPTSEQTGTAAGKTIAQTTAPVSWKPQDSSEQPQEKLCKNPCAMFAAGEIKTPTGEGLLDSPSKTMSIKERLALLKKSGEEDWRNRLSRRQEGGKAPASSLHTQEAGRSLIKKRVTESRESQMTIEERKQLITVREEAWKTRGRGAANDSTQFTVAGRMVKKGLASPTAITPVASPICGKTRGTTPVSKPLEDIEARPDMQLESDLKLDRLETFLRRLNNKVGGMHETVLTVTGKSVKEVMKPDDDETFAKFYRSVDYNMPRSPVEMDEDFDVIFDPYAPKLTSSVAEHKRAVRPKRRVQASKNPLKMLAAREDLLQEYTEQRLNVAFMESKRMKVEKMSSNSNFSEVTLAGLASKENFSNVSLRSVNLTEQNSNNSAVPYKRLMLLQIKGRRHVQTRLVEPRASALNSGDCFLLLSPHCCFLWVGEFANVIEKAKASELATLIQTKRELGCRATYIQTIEEGINTHTHAAKDFWKLLGGQTSYQSAGDPKEDELYEAAIIETNCIYRLMDDKLVPDDDYWGKIPKCSLLQPKEVLVFDFGSEVYVWHGKEVTLAQRKIAFQLAKHLWNGTFDYENCDINPLDPGECNPLIPRKGQGRPDWAIFGRLTEHNETILFKEKFLDWTELKRSNEKNPGELAQHKEDPRTDVKAYDVTRMVSMPQTTAGTILDGVNVGRGYGLVEGHDRRQFEITSVSVDVWHILEFDYSRLPKQSIGQFHEGDAYVVKWKFMVSTAVGSRQKGEHSVRAAGKEKCVYFFWQGRHSTVSEKGTSALMTVELDEERGAQVQVLQGKEPPCFLQCFQGGMVVHSGRREEEEENVQSEWRLYCVRGEVPVEGNLLEVACHCSSLRSRTSMVVLNVNKALIYLWHGCKAQAHTKEVGRTAANKIKEQCPLEAGLHSSSKVTIHECDEGSEPLGFWDALGRRDRKAYDCMLQDPGSFNFAPRLFILSSSSGDFAATEFVYPARAPSVVSSMPFLQEDLYSAPQPALFLVDNHHEVYLWQGWWPIENKITGSARIRWASDRKSAMETVLQYCKGKNLKKPAPKSYLIHAGLEPLTFTNMFPSWEHREDIAEITEMDTEVSNQITLVEDVLAKLCKTIYPLADLLARPLPEGVDPLKLEIYLTDEDFEFALDMTRDEYNALPAWKQVNLKKAKGLF

SEQ ID NO: 9617 - protein, 1560 aa, Homo sapiens
MEPGSDDFLPPPECPVFEPSWAEFRDPLGYIAKIRPIAEKSGICKIRPPADWQPPFAVEVDNFRFTPRIQRLNELEAQTRVKLNYLDQIAKFWEIQGSSLKIPNVERRILDLYSLSKIVVEEGGYEAICKDRRWARVAQRLNYPPGKNIGSLLRSHYERIVYPYEMYQSGANLVQCNTRPFDNEEKDKEYKPHSIPLRQSVQPSKFNSYGRRAKRLQPDPEPTEEDIEKNPELKKLQIYGAGPKMMGLGLMAKDKTLRKKDKEGPECPPTVVVKEELGGDVKVESTSPKTFLESKEELSHSPEPCTKMTMRLRRNHSNAQFIESYVCRMCSRGDEDDKLLLCDGCDDNYHIFCLLPPLPEIPKGVWRCPKCVMAECKRPPEAFGFEQATREYTLQSFGEMADSFKADYFNMPVHMVPTELVEKEFWRLVNSIEEDVTVEYGADIHSKEFGSGFPVSDSKRHLTPEEEEYATSGWNLNVMPVLEQSVLCHINADISGMKVPWLYVGMVFSAFCWHIEDHWSYSINYLHWGEPKTWYGVPSLAAEHLEEVMKKLTPELFDSQPDLLHQLVTLMNPNTLMSHGVPVVRTNQCAGEFVITFPRAYHSGFNQGYNFAEAVNFCTADWLPAGRQCIEHYRRLRRYCVFSHEELICKMAACPEKLDLNLAAAVHKEMFIMVQEERRLRKALLEKGITEAEREAFELLPDDERQCIKCKTTCFLSALACYDCPDGLVCLSHINDLCKCSSSRQYLRYRYTLDELPAMLHKLKVRAESFDTWANKVRVALEVEDGRKRSLEELRALESEARERRFPNSELLQQLKNCLSEAEACVSRALGLVSGQEAGPHRVAGLQMTLTELRAFLDQMNNLPCAMHQIGDVKGVLEQVEAYQAEAREALASLPSSPGLLQSLLERGRQLGVEVPEAQQLQRQVEQARWLDEVKRTLAPSARRGTLAVMRGLLVAGASVAPSPAVDKAQAELQELLTIAERWEEKAHLCLEARQKHPPATLEAIIREAENIPVHLPNIQALKEALAKARAWIADVDEIQNGDHYPCLDDLEGLVAVGRDLPVGLEELRQLELQVLTAHSWREKASKTFLKKNSCYTLLEVLCPCADAGSDSTKRSRWMEKELGLYKSDTELLGLSAQDLRDPGSVIVAFKEGEQKEKEGILQLRRTNSAKPSPLASSSTASSTTSICVCGQVLAGAGALQCDLCQDWFHGRCVSVPRLLSSPRPNPTSSPLLAWWEWDTKFLCPLCMRSRRPRLETILALLVALQRLPVRLPEGEALQCLTERAISWQGRARQALASEDVTALLGRLAELRQRLQAEPRPEEPPNYPAAPASDPLREGSGKDMPKVQGLLENGDSVTSPEKVAPEEGSGKRDLELLSSLLPQLTGPVLELPEATRAPLEELMMEGDLLEVTLDENHSIWQLLQAGQPPDLERIRTLLELEKAERHGSRARGRALERRRRRKVDRGGEGDDPAREELEPKRVRSSGPEAEEVQEEEELEEETGGEGPPAPIPTTGSPSTQENQNGLEPAEGTTSGPSAPFSTLTPRLHLPCPQQPPQQQL

SEQ ID NO: 9618 - protein, 1240 aa, Homo sapiens
MASSNPPPQPAIGDQLVPGVPGPSSEAEDDPGEAFEFDDSDDEEDTSAALGVPSLAPERDTDPPLIHLDSIPVTDPDPAAAPPGTGVPAWVSNGDAADAAFSGARHSSWKRKSSRRIDRFTFPALEEDVIYDDVPCESPDAHQPGAERNLLYEDAHRAGAPRQAEDLGWSSSEFESYSEDSGEEAKPEVEVEPAKHRVSFQPKMTQLMKAAKSGTKDGLEKTRMAVMRKVSFLHRKDVLGDSEEEDMGLLEVSVSDIKPPAPELGPMPEGLSPQQVVRRHILGSIVQSEGSYVESLKRILQDYRNPLMEMEPKALSARKCQVVFFRVKEILHCHSMFQIALSSRVAEWDSTEKIGDLFVASFSKSMVLDVYSDYVNNFTSAMSIIKKACLTKPAFLEFLKRRQVCSPDRVTLYGLMVKPIQRFPQFILLLQDMLKNTPRGHPDRLSLQLALTELETLAEKLNEQKRLADQVAEIQQLTKSVSDRSSLNKLLTSGQRQLLLCETLTETVYGDRGQLIKSKERRVFLLNDMLVCANINFKPANHRGQLEISSLVPLGPKYVVKWNTALPQVQVVEVGQDGGTYDKDNVLIQHSGAKKASASGQAQNKVYLGPPRLFQELQDLQKDLAVVEQITLLISTLHGTYQNLNMTVAQDWCLALQRLMRVKEEEIHSANKCRLRLLLPGKPDKSGRPISFMVVFITPNPLSKISWVNRLHLAKIGLREENQPGWLCPDEDKKSKAPFWCPILACCIPAFSSRALSLQLGALVHSPVNCPLLGFSAVSTSLPQGYLWVGGGQEGAGGQVEIFSLNRPSPRTVKSFPLAAPVLCMEYIPELEEEAESRDESPTVADPSATVHPTICLGLQDGSILLYSSVDTGTQCLVSCRSPGLQPVLCLRHSPFHLLAGLQDGTLAAYPRTSGGVLWDLESPPVCLTVGPGPVRTLLSLEDAVWASCGPRVTVLEATTLQPQQSFEAHQDEAVSVTHMVKAGSGVWMAFSSGTSIRLFHTETLEHLQEINIATRTTFLLPGQKHLCVTSLLICQGLLWVGTDQGVIVLLPVPRLEGIPKITGKGMVSLNGHCGPVAFLAVATSILAPDILRSDQEEAEGPRAEEDKPDGQAHEPMPDSHVGRELTRKKGILLQYRLRSTAHLPGPLLSMREPAPADGAALEHSEEDGSIYEMADDPDIWVRSRPCARDAHRKEICSVAIISGGQGYRNFGSALGSSGRQAPCGETDSTLLIWQVPLML

SEQ ID NO: 9619 - protein, 387 aa, Homo sapiens
MVPKGATMLVIPPGLSEEEEALQKKFNKLKKKKKALLALKKQSSSSTTSQGGVKRSLSEQPVMDTATATEQAKQLVKSGAISAIKAETKNSGFKRSRTLEGKLKDPEKGPVPTFQPFQRSISADDDLQESSRRPQRKSLYESFVSSSDRLRELGPDGEEAEGPGAGDGPPRSFDWGYEERSGAHSSASPPRSRSRDRSHERNRDRDRDRERDRDRDRDRDRERDRDRDRDRDRDRERDRDRERDRDRDREGPFRRSDSFPERRAPRKGNTLYVYGEDMTPTLLRGAFSPFGNIIDLSMDPPRNCAFVTYEKMESADQAVAELNGTQVESVQLKVNIARKQPMLDAATGKSVWGSLAVQNSPKGCHRDKRTQIVYSDDVYKENLVDGF

SEQ ID NO: 9620 - protein, 380 aa, Homo sapiens
MLVIPPGLSEEEEALQKKFNKLKKKKKALLALKKQSSSSTTSQGGVKRSLSEQPVMDTATATEQAKQLVKSGAISAIKAETKNSGFKRSRTLEGKLKDPEKGPVPTFQPFQRSISADDDLQESSRRPQRKSLYESFVSSSDRLRELGPDGEEAEGPGAGDGPPRSFDWGYEERSGAHSSASPPRSRSRDRSHERNRDRDRDRERDRDRDRDRDRERDRDRDRDRDRDRERDRDRERDRDRDREGPFRRSDSFPERRAPRKGNTLYVYGEDMTPTLLRGAFSPFGNIIDLSMDPPRNCAFVTYEKMESADQAVAELNGTQVESVQLKVNIARKQPMLDAATGKSVWGSLAVQNSPKGCHRDKRTQIVYSDDVYKENLVDGF

SEQ ID NO: 9621 - protein, 344 aa, Homo sapiens
MQPAERSRVPRIDPYGFERPEDFDDAAYEKFFSSYLVTLTRRAIKWSRLLQGGGVPRSRTVKRYVRKGVPLEHRARVWMVLSGAQAQMDQNPGYYHQLLQGERNPRLEDAIRTDLNRTFPDNVKFRKTTDPCLQRTLYNVLLAYGHHNQGVGYCQGMNFIAGYLILITNNEEESFWLLDALVGRILPDYYSPAMLGLKTDQEVLGELVRAKLPAVGALMERLGVLWTLLVSRWFICLFVDILPVETVLRIWDCLFNEGSKIIFRVALTLIKQHQELILEATSVPDICDKFKQITKGSFVMECHTFMQVCGAARGSVPSQGAPPHLQPGGCSDHPEGAQDGHQWA

SEQ ID NO: 9622 - protein, 336 aa, Homo sapiens
MQPAERSRVPRIDPYGFERPEDFDDAAYEKFFSSYLVTLTRRAIKWSRLLQGGGVPRSRTVKRYVRKGVPLEHRARVWMVLSGAQAQMDQNPGYYHQLLQGERNPRLEDAIRTDLNRTFPDNVKFRKTTDPCLQRTLYNVLLAYGHHNQGVGYCQGMNFIAGYLILITNNEEESFWLLDALVGRILPDYYSPAMLGLKTDQEVLGELVRAKLPAVGALMERLGVLWTLLVSRWFICLFVDILPVETVLRIWDCLFNEGSKIIFRVALTLIKQHQELILEATSVPDICDKFKQITKGSFVMECHTFMQKIFSEPGSLSMATVAKLRESCRARLLAQG

SEQ ID NO: 9623 - protein, 522 aa, Homo sapiens
MPRKKAAAAAWEEPSSGNGTARAGPRKRGGPAGRKRERPERCSSSSGGGSSGDEDGLELDGAPGGGKRAARPATAGKAGGAAVVITEPEHTKERVKLEGSKCKGQLLIFGATNWDLIGRKEVPKQQAAYRNLGQNLWGPHRYGCLAGVRVRTVVSGSCAAHSLLITTEGKLWSWGRNEKGQLGHGDTKRVEAPRLIEGLSHEVIVSAACGRNHTLALTETGSVFAFGENKMGQLGLGNQTDAVPSPAQIMYNGQPITKMACGAEFSMIMDCKGNLYSFGCPEYGQLGHNSDGKFIARAQRIEYDCELVPRRVAIFIEKTKDGQILPVPNVVVRDVACGANHTLVLDSQKRVFSWGFGGYGRLGHAEQKDEMVPRLVKLFDFPGRGASQIYAGYTCSFAVSEVGGLFFWGATNTSRESTMYPKAVQDLCGWRIRSLACGKSSIIVAADESTISWGPSPTFGELGYGDHKPKSSTAAQEVKTLDGIFSEQVAMGYSHSLVIARDESETEKEKIKKLPEYNPRTL

SEQ ID NO: 9624 - protein, 759 aa, Homo sapiens
MADEAPRKGSFSALVGRTNGLTKPAALAAAPAKPGGAGGSKKLVIKNFRDRPRLPDNYTQDTWRKLHEAVRAVQSSTSIRYNLEELYQAVENLCSHKVSPMLYKQLRQACEDHVQAQILPFREDSLDSVLFLKKINTCWQDHCRQMIMIRSIFLFLDRTYVLQNSTLPSIWDMGLELFRTHIISDKMVQSKTIDGILLLIERERSGEAVDRSLLRSLLGMLSDLQVYKDSFELKFLEETNCLYAAEGQRLMQEREVPEYLNHVSKRLEEEGDRVITYLDHSTQKPLIACVEKQLLGEHLTAILQKGLDHLLDENRVPDLAQMYQLFSRVRGGQQALLQHWSEYIKTFGTAIVINPEKDKDMVQDLLDFKDKVDHVIEVCFQKNERFVNLMKESFETFINKRPNKPAELIAKHVDSKLRAGNKEATDEELERTLDKIMILFRFIHGKDVFEAFYKKDLAKRLLVGKSASVDAEKSMLSKLKHECGAAFTSKLEGMFKDMELSKDIMVHFKQHMQNQSDSGPIDLTVNILTMGYWPTYTPMEVHLTPEMIKLQEVFKAFYLGKHSGRKLQWQTTLGHAVLKAEFKEGKKEFQVSLFQTLVLLMFNEGDGFSFEEIKMATGIEDSELRRTLQSLACGKARVLIKSPKGKEVEDGDKFIFNGEFKHKLFRIKINQIQMKETVEEQVSTTERVFQDRQYQIDAAIVRIMKMRKTLGHNLLVSELYNQLKFPVKPGDLKKRIESLIDRDYMERDKDNPNQYHYVA

SEQ ID NO: 9625 - protein, 693 aa, Homo sapiens
MDRPDEGPPAKTRRLSSSESPQRDPPPPPPPPPLLRLPLPPPQQRPRLQEETEAAQVLADMRGVGLGPALPPPPPYVILEEGGIRAYFTLGAECPGWDSTIESGYGEAPPPTESLEALPTPEASGGSLEIDFQVVQSSSFGGEGALETCSAVGWAPQRLVDPKSKEEAIIIVEDEDEDERESMRSSRRRRRRRRRKQRKVKRESRERNAERMESILQALEDIQLDLEAVNIKAGKAFLRLKRKFIQMRRPFLERRDLIIQHIPGFWVKAFLNHPRISILINRRDEDIFRYLTNLQVQDLRHISMGYKMKLYFQTNPYFTNMVIVKEFQRNRSGRLVSHSTPIRWHRGQEPQARRHGNQDASHSFFSWFSNHSLPEADRIAEIIKNDLWVNPLRYYLRERGSRIKRKKQEMKKRKTRGRCEVVIMEDAPDYYAVEDIFSEISDIDETIHDIKISDFMETTDYFETTDNEITDINENICDSENPDHNEVPNNETTDNNESADDHETTDNNESADDNNENPEDNNKNTDDNEENPNNNENTYGNNFFKGGFWGSHGNNQDSSDSDNEADEASDDEDNDGNEGDNEGSDDDGNEGDNEGSDDDDRDIEYYEKVIEDFDKDQADYEDVIEIISDESVEEEGIEEGIQQDEDIYEEGNYEEEGSEDVWEEGEDSDDSDLEDVLQVPNGWANPGKRGKTG

SEQ ID NO: 9626 - protein, 152 aa, Homo sapiens
MDSGTEEYELNGGLPPGTPGSPDASPARWGWRHGPINVNHYASKKSAAESMLDIALLMANASQLKAVVEQGPSFAFYVPLVVLISISLVLQIGVGVLLIFLVKYDLNNPAKHAKLDFLNNLATGLVFIIVVVNIFITAFGVQKPLMDMAPQQ

SEQ ID NO: 9627 - protein, 218 aa, Homo sapiens
MMCPLWRLLIFLGLLALPLAPHKQPWPGLAQAHRDNKSTLARIIAQGLIKHNAESRIQNIHFGDRLNASAQVAPGLVGWLISGRKHQQQQESRSFDNNIVKMCAHMSIVVEFWLEKDEFGRRDLVIGKCDAEPSSVHVAILTEAIPPKMNQFLYNLKENLQKVLPHMVESQVCPLIGEILGQLDVKLLKSLIEQEAAHEPTHHETSQPSACQAGESPS

SEQ ID NO: 9628 - protein, 254 aa, Homo sapiens
MMCPLWRLLIFLGLLALPLAPHKQPWPGLAQAHRDNKSTLARIIAQGLIKHNAESRIQNIHFGDRLNASAQVAPGLVGWLISGRKHQQQQESSINITNIQLDCGGIQISFHKEWFSANISLEFDLELRPSFDNNIVKMCAHMSIVVEFWLEKDEFGRRDLVIGKCDAEPSSVHVAILTEAIPPKMNQFLYNLKENLQKVLPHMVESQVCPLIGEILGQLDVKLLKSLIEQEAAHEPTHHETSQPSACQAGESPS

SEQ ID NO: 9629 - protein, 397 aa, Homo sapiens
MRLTDVVQQLVYEAIDSRDGASCAELVSFKHPHVANPRLQMASPEEKCQQVLEPPYDEMFAAHLRCTYAVGNHDFIEAYKCQTVIVQSFLRAFQAHKEENWALPVMYAVALDLRVFANNADQQLVKKGKSKVGDMLEKAAELLMSCFRVCASDTRAGIEDSKKWGMLFLVNQLFKIYFKINKLHLCKPLIRAIDSSNLKDDYSTAQRVTYKYYVGRKAMFDSDFKQAEEYLSFAFEHCHRSSQKNKRMILIYLLPVKMLLGHMPTVELLKKYHLMQFAEVTRAVSEGNLLLLHEALAKHEAFFIRCGIFLILEKLKIITYRNLFKKVYLLLKTHQLSLDAFLVALKFMQVEDVDIDEVQCILANLIYMGHVKGYISHQHQKLVVSKQNPFPPLSTVC

SEQ ID NO: 9630 - protein, 1128 aa, Homo sapiens
MDGRTPRPQDAPARRKPKAKAPLPPAETKYTDVSSAADSVESTAFIMEQKENMIDKDVELSVVLPGDIIKSTTVHGSKPMMDLLIFLCAQYHLNPSSYTIDLLSAEQNHIKFKPNTPIGMLEVEKVILKPKMLDKKKPTPIIPEKTVRVVINFKKTQKTIVRVSPHASLQELAPIICSKCEFDPLHTLLLKDYQSQEPLDLTKSLNDLGLRELYAMDVNRESCQISQNLDIMKEKENKGFFSFFQRSKKKRDQTASAPATPLVNKHRPTFTRSNTISKPYISNTLPSDAPKKRRAPLPPMPASQSVPQDLAHIQERPASCIVKSMSVDETDKSPCEAGRVRAGSLQLSSMSAGNSSLRRTKRKAPSPPSKIPPHQSDENSRVTALQPVDGVPPDSASEANSPEELSSPAGISSDYSLEEIDEKEELSEVPKVEAENISPKSQDIPFVSTDIINTLKNDPDSALGNGSGEFSQNSMEEKQETKSTDGQEPHSVVYDTSNGKKVVDSIRNLKSLGPNQENVVQNEIIVYPENTEDNMKNGVKKTEINVEGVAKNNNIDMEVERPSNSEAHETDTAISYKENHLAASSVPDQKLNQPSAEKTKDAAIQTTPSCNSFDGKHQDHNLSDSKVEECVQTSNNNISTQHSCLSSQDSVNTSREFRSQGTLIIHSEDPLTVKDPICAHGNDDLLPPVDRIDKNSTASYLKNYPLYRQDYNPKPKPSNEITREYIPKIGMTTYKIVPPKSLEISKDWQSETIEYKDDQDMHALGKKHTHENVKETAIQTEDSAISESPEEPLPNLKPKPNLRTEHQVPSSVSSPDDAMVSPLKPAPKMTRDTGTAPFAPNLEEINNILESKFKSRASNAQAKPSSFFLQMQKRVSGHYVTSAAAKSVHAAPNPAPKELTNKEAERDMLPSPEQTLSPLSKMPHSVPQPLVEKTDDDVIGQAPAEASPPPIAPKPVTIPASQVSTQNLKTLKTFGAPRPYSSSGPSPFALAVVKRSQSFSKERTESPSASALVQPPANTEEGKTHSVNKFVDIPQLGVSDKENNSAHNEQNSQIPTPTDGPSFTVMRQSSLTFQSSDPEQMRQSLLTAIRSGEAAAKLKRVTIPSNTISVNGRSRLSHSMSPDAQDGH

SEQ ID NO: 9631 - protein, 183 aa, Homo sapiens
MTDQTYCDRLVQDTPFLTGHGRLSEQQVDRIILQLNRYYPQILTNKEAEKFRNPKASLRVRLCDLLSHLQRSGERDCQEFYRALYIHAQPLHSRLPSRHALQNSDCTELDSGSQSGELSNRGPMSFLAGLGLAVGLALLLYCYPPDPKGLPGTRRVLGFSPVIIDRHVSRYLLAFLADDLGGL

SEQ ID NO: 9632 - protein, 614 aa, Homo sapiens
MWMAWCVAALSVVAVCGTSHETNTVLRVTKDVLSNAISGMLQQSDALHSALREVPLGVGDIPYNDFHVRGPPPVYTNGKKLDGIYQYGHIETNDNTAQLGGKYRYGEILESEGSIRDLRNSGYRSAENAYGGHRGLGRYRAAPVGRLHRRELQPGEIPPGVATGAVGPGGLLGTGGMLAADGILAGQGGLLGGGGLLGDGGLLGGGGVLGVLGEGGILSTVQGITGLRIVELTLPRVSVRLLPGVGVYLSLYTRVAINGKSLIGFLDIAVEVNITAKVRLTMDRTGYPRLVIERCDTLLGGIKVKLLRGLLPNLVDNLVNRVLADVLPDLLCPIVDVVLGLVNDQLGLVDSLIPLGILGSVQYTFSSLPLVTGEFLELDLNTLVGEAGGGLIDYPLGWPAVSPKPMPELPPMGDNTKSQLAMSANFLGSVLTLLQKQHALDLDITNGMFEELPPLTTATLGALIPKVFQQYPESCPLIIRIQVLNPPSVMLQKDKALVKVLATAEVMVSQPKDLETTICLIDVDTEFLASFSTEGDKLMIDAKLEKTSLNLRTSNVGNFDIGLMEVLVEKIFDLAFMPAMNAVLGSGVPLPKILNIDFSNADIDVLEDLLVLSA

SEQ ID NO: 9633 - protein, 476 aa, Homo sapiens
MQPVMLALWSLLLLWGLATPCQELLETVGTLARIDKDELGKAIQNSLVGEPILQNVLGSVTAVNRGLLGSGGLLGGGGLLGHGGVFGVVEELSGLKIEELTLPKVLLKLLPGFGVQLSLHTKVGMHCSGPLGGLLQLAAEVNVTSRVALAVSSRGTPILILKRCSTLLGHISLFSGLLPTPLFGVVEQMLFKVLPGLLCPVVDSVLGVVNELLGAVLGLVSLGALGSVEFSLATLPLISNQYIELDINPIVKSVAGDIIDFPKSRAPAKVPPKKDHTSQVMVPLYLFNTTFGLLQTNGALDMDITPELVPSDVPLTTTDLAALLPEALGKLPLHQQLLLFLRVREAPTVTLHNKKALVSLPANIHVLFYVPKGTPESLFELNSVMTVRAQLAPSATKLHISLSLERLSVKVASSFTHAFDGSRLEEWLSHVVGAVYAPKLNVALDVGIPLPKVLNINFSNSVLEIVENAVVLTVAS

SEQ ID NO: 9634 - protein, 852 aa, Homo sapiens
MTKSLESVSFKDVTVDFSRDEWQQLDLAQKSLYREVMLENYFNLISVGCQVPKPEVIFSLEQEEPCMLDGEIPSQSRPDGDIGFGPLQQRMSEEVSFQSEININLFTRDDPYSILEELWKDDEHTRKCGENQNKPLSRVVFINKKTLANDSIFEYKDIGEIVHVNTHLVSSRKRPHNCNSCGKNLEPIITLYNRNNATENSDKTIGDGDIFTHLNSHTEVTACECNQCGKPLHHKQALIQQQKIHTRESLYLFSDYVNVFSPKSHAFAHESICAEEKQHECHECEAVFTQKSQLDGSQRVYAGICTEYEKDFSLKSNRQKTPYEGNYYKCSDYGRAFIQKSDLFRCQRIHSGEKPYEYSECEKNLPQNSNLNIHKKIHTGGKHFECTECGKAFTRKSTLSMHQKIHTGEKPYVCTECGKAFIRKSHFITHERIHTGEKPYECSDCGKSFIKKSQLHVHQRIHTGENPFICSECGKVFTHKTNLIIHQKIHTGERPYICTVCGKAFTDRSNLIKHQKIHTGEKPYKCSDCGKSFTWKSRLRIHQKCHTGERHYECSECGKAFIQKSTLSMHQRIHRGEKPYVCTECGKAFFHKSHFITHERIHTGEKPYECSICGKSFTKKSQLHVHQQIHTGEKPYRCAECGKAFTDRSNLFTHQKIHTGEKPYKCSDCGKAFTRKSGLHIHQQSHTGERHYECSECGKAFARKSTLIMHQRIHTGEKPYICNECGKSFIQKSHLNRHRRIHTGEKPYECSDCGKSFIKKSQLHEHHRIHTGEKPYICAECGKAFTIRSNLIKHQKIHTKQKPYKCSDLGKALNWKPQLSMPQKSDNGEVECSMPQLWCGDSEGDQGQLSSI

SEQ ID NO: 9635 - protein, 816 aa, Homo sapiens
MLENYFNLISVGCQVPKPEVIFSLEQEEPCMLDGEIPSQSRPDGDIGFGPLQQRMSEEVSFQSEININLFTRDDPYSILEELWKDDEHTRKCGENQNKPLSRVVFINKKTLANDSIFEYKDIGEIVHVNTHLVSSRKRPHNCNSCGKNLEPIITLYNRNNATENSDKTIGDGDIFTHLNSHTEVTACECNQCGKPLHHKQALIQQQKIHTRESLYLFSDYVNVFSPKSHAFAHESICAEEKQHECHECEAVFTQKSQLDGSQRVYAGICTEYEKDFSLKSNRQKTPYEGNYYKCSDYGRAFIQKSDLFRCQRIHSGEKPYEYSECEKNLPQNSNLNIHKKIHTGGKHFECTECGKAFTRKSTLSMHQKIHTGEKPYVCTECGKAFIRKSHFITHERIHTGEKPYECSDCGKSFIKKSQLHVHQRIHTGENPFICSECGKVFTHKTNLIIHQKIHTGERPYICTVCGKAFTDRSNLIKHQKIHTGEKPYKCSDCGKSFTWKSRLRIHQKCHTGERHYECSECGKAFIQKSTLSMHQRIHRGEKPYVCTECGKAFFHKSHFITHERIHTGEKPYECSICGKSFTKKSQLHVHQQIHTGEKPYRCAECGKAFTDRSNLFTHQKIHTGEKPYKCSDCGKAFTRKSGLHIHQQSHTGERHYECSECGKAFARKSTLIMHQRIHTGEKPYICNECGKSFIQKSHLNRHRRIHTGEKPYECSDCGKSFIKKSQLHEHHRIHTGEKPYICAECGKAFTIRSNLIKHQKIHTKQKPYKCSDLGKALNWKPQLSMPQKSDNGEVECSMPQLWCGDSEGDQGQLSSI

SEQ ID NO: 9636 - protein, 180 aa, Homo sapiens
MKSIYFVAGLFVMLVQGSWQRSLQDTEEKSRSFSASQADPLSDPDQMNEDKRHSQGTFTSDYSKYLDSRRAQDFVQWLMNTKRNRNNIAKRHDEFERHAEGTFTSDVSSYLEGQAAKEFIAWLVKGRGRRDFPEEVAIVEELGRRHADGSFSDEMNTILDNLAARDFINWLIQTKITDRK

SEQ ID NO: 9637 - protein, 484 aa, Homo sapiens
MLGKLAMLLWVQQALLALLLPTLLAQGEARRSRNTTRPALLRLSDYLLTNYRKGVRPVRDWRKPTTVSIDVIVYAILNVDEKNQVLTTYIWYRQYWTDEFLQWNPEDFDNITKLSIPTDSIWVPDILINEFVDVGKSPNIPYVYIRHQGEVQNYKPLQVVTACSLDIYNFPFDVQNCSLTFTSWLHTIQDINISLWRLPEKVKSDRSVFMNQGEWELLGVLPYFREFSMESSNYYAEMKFYVVIRRRPLFYVVSLLLPSIFLMVMDIVGFYLPPNSGERVSFKITLLLGYSVFLIIVSDTLPATAIGTPLIGVYFVVCMALLVISLAETIFIVRLVHKQDLQQPVPAWLRHLVLERIAWLLCLREQSTSQRPPATSQATKTDDCSAMGNHCSHMGGPQDFEKSPRDRCSPPPPPREASLAVCGLLQELSSIRQFLEKRDEIREVARDWLRVGSVLDKLLFHIYLLAVLAYSITLVMLWSIWQYA

SEQ ID NO: 9638 - protein, 280 aa, Homo sapiens
MAAVVALSLRRRLPATTLGGACLQASRGAQTAAATAPRIKKFAIYRWDPDKAGDKPHMQTYEVDLNKCGPMVLDALIKIKNEVDSTLTFRRSCREGICGSCAMNINGGNTLACTRRIDTNLNKVSKIYPLPHMYVIKDLVPDLSNFYAQYKSIEPYLKKKDESQEGKQQYLQSIEEREKLDGLYECILCACCSTSCPSYWWNGDKYLGPAVLMQAYRWMIDSRDDFTEERLAKLQDPFSLYRCHTIMNCTRTCPKGLNPGKAIAEIKKMMATYKEKKASV

SEQ ID NO: 9639 - protein, 824 aa, Homo sapiens
MSAPSEEEEYARLVMEAQPEWLRAEVKRLSHELAETTREKIQAAEYGLAVLEEKHQLKLQFEELEVDYEAIRSEMEQLKEAFGQAHTNHKKVAADGESREESLIQESASKEQYYVRKVLELQTELKQLRNVLTNTQSENERLASVAQELKEINQNVEIQRGRLRDDIKEYKFREARLLQDYSELEEENISLQKQVSVLRQNQVEFEGLKHEIKRLEEETEYLNSQLEDAIRLKEISERQLEEALETLKTEREQKNSLRKELSHYMSINDSFYTSHLHVSLDGLKFSDDAAEPNNDAEALVNGFEHGGLAKLPLDNKTSTPKKEGLAPPSPSLVSDLLSELNISEIQKLKQQLMQMEREKAGLLATLQDTQKQLEHTRGSLSEQQEKVTRLTENLSALRRLQASKERQTALDNEKDRDSHEDGDYYEVDINGPEILACKYHVAVAEAGELREQLKALRSTHEAREAQHAEEKGRYEAEGQALTEKVSLLEKASRQDRELLARLEKELKKVSDVAGETQGSLSVAQDELVTFSEELANLYHHVCMCNNETPNRVMLDYYREGQGGAGRTSPGGRTSPEARGRRSPILLPKGLLAPEAGRADGGTGDSSPSPGSSLPSPLSDPRREPMNIYNLIAIIRDQIKHLQAAVDRTTELSRQRIASQELGPAVDKDKEALMEEILKLKSLLSTKREQITTLRTVLKANKQTAEVALANLKSKYENEKAMVTETMMKLRNELKALKEDAATFSSLRAMFATRCDEYITQLDEMQRQLAAAEDEKKTLNSLLRMAIQQKLALTQRLELLELDHEQTRRGRAKAAPKTKPATPSL

SEQ ID NO: 9640 - protein, 459 aa, Homo sapiens
MASGVEVLRFQLPGHEAATLRNMNQLRAEERFCDVTIVADSLKFRGHKVILAACSPFLRDQFLLNPSSELQVSLMHSARIVADLLLSCYTGALEFAVRDIVNYLTAASYLQMEHVVEKCRNALSQFIEPKIGLKEDGVSEASLVSSISATKSLLPPARTPKPAPKPPPPPPLPPPLLRPVKLEFPLDEDLELKAEEEDEDEDEDVSDICIVKVESALEVAHRLKPPGGLGGGLGIGGSVGGHLGELAQSSVPPSTVAPPQGVVKACYSLSEDAEGEGLLLIPGGRASVGATSGLVEAAAVAMAARGAGGSLGAGGSRGPLPGGFSGGNPLKNIKCTKCPEVFQGVEKLVFHMRAQHFIFMCPRCGKQFNHSSNLNRHMNVHRGVKSHSCGICGKCFTQKSTLHDHLNLHSGARPYRCSYCDVRFAHKPAIRRHLKEQHGKTTAENVLEASVAEINVLIR

SEQ ID NO: 9641 - protein, 260 aa, Homo sapiens
MDRHSSYIFIWLQLELCAMAVLLTKGEIRCYCDAAHCVATGYMCKSELSACFSRLLDPQNSNSPLTHGCLDSLASTTDICQAKQARNHSGTTIPTLECCHEDMCNYRGLHDVLSPPRGEASGQGNRYQHDGSRNLITKVQELTSSKELWFRAAVIAVPIAGGLILVLLIMLALRMLRSENKRLQDQRQQMLSRLHYSFHGHHSKKGQVAKLDLECMVPVSGHENCCLTCDKMRQADLSNDKILSLVHWGMYSGHGKLEFV

SEQ ID NO: 9642 - protein, 182 aa, Homo sapiens
MRAAYLFLLFLPGLLAQGQYDLDPLPPFPDHVQYTHYSDQIDNPDYYDYQEVTPRPSEEQFQFQSQQQVQQEVIPAPTPEPGNAELEPTEPGPLDCREEQYPCTRLYSIHRPCKQCLNEVCFYSLRRVYVINKEICVRTVCAHEELLRADLCRDKFSKCGVMASSGLCQSVAASCARSCGSC

SEQ ID NO: 9643 - protein, 183 aa, Homo sapiens
MRAAYLFLLFLPAGLLAQGQYDLDPLPPFPDHVQYTHYSDQIDNPDYYDYQEVTPRPSEEQFQFQSQQQVQQEVIPAPTPEPGNAELEPTEPGPLDCREEQYPCTRLYSIHRPCKQCLNEVCFYSLRRVYVINKEICVRTVCAHEELLRADLCRDKFSKCGVMASSGLCQSVAASCARSCGSC

SEQ ID NO: 9644 - protein, 164 aa, Homo sapiens
MKIAVLFCFFLLIIFQTDFGKNEEIPRKQRRKIYHRRLRKSSTSHKHRSNRQLGIQQTTVFTPVARLPIVNFDYSMEEKFESFSSFPGVESSYNVLPGKKGHCLVKGITMYNKAVWSPEPCTTCLCSDGRVLCDETMCHPQRCPQTVIPEGECCPVCSATGTEI

SEQ ID NO: 9645 - protein, 2017 aa, Homo sapiens
MSLGLAGAQEVELTLETVIQTLESSVLCQEKGLGARDLAQDAQITSLPALIREIVTRNLSQPESPVLLPATEMASLLSLQEENQLLQQELSRVEDLLAQSRAERDELAIKYNAVSERLEQALRLEPGELETQEPRGLVRQSVELRRQLQEEQASYRRKLQAYQEGQQRQAQLVQRLQGKILQYKKRCSELEQQLLERSGELEQQRLRDTEHSQDLESALIRLEEEQQRSASLAQVNAMLREQLDQAGSANQALSEDIRKVTNDWTRCRKELEHREAAWRREEESFNAYFSNEHSRLLLLWRQVVGFRRLVSEVKMFTERDLLQLGGELARTSRAVQEAGLGLSTGLRLAESRAEAALEKQALLQAQLEEQLRDKVLREKDLAQQQMQSDLDKADLSARVTELGLAVKRLEKQNLEKDQVNKDLTEKLEALESLRLQEQAALETEDGEGLQQTLRDLAQAVLSDSESGVQLSGSERTADASNGSLRGLSGQRTPSPPRRSSPGRGRSPRRGPSPACSDSSTLALIHSALHKRQLQVQDMRGRYEASQDLLGTLRKQLSDSESERRALEEQLQRLRDKTDGAMQAHEDAQREVQRLRSANELLSREKSNLAHSLQVAQQQAEELRQEREKLQAAQEELRRQRDRLEEEQEDAVQDGARVRRELERSHRQLEQLEGKRSVLAKELVEVREALSRATLQRDMLQAEKAEVAEALTKAEAGRVELELSMTKLRAEEASLQDSLSKLSALNESLAQDKLDLNRLVAQLEEEKSALQGRQRQAEQEATVAREEQERLEELRLEQEVARQGLEGSLRVAEQAQEALEQQLPTLRHERSQLQEQLAQLSRQLSGREQELEQARREAQRQVEALERAAREKEALAKEHAGLAVQLVAAEREGRTLSEEATRLRLEKEALEGSLFEVQRQLAQLEARREQLEAEGQALLLAKETLTGELAGLRQQIIATQEKASLDKELMAQKLVQAEREAQASLREQRAAHEEDLQRLQREKEAAWRELEAERAQLQSQLQREQEELLARLEAEKEELSEEIAALQQERDEGLLLAESEKQQALSLKESEKTALSEKLMGTRHSLATISLEMERQKRDAQSRQEQDRSTVNALTSELRDLRAQREEAAAAHAQEVRRLQEQARDLGKQRDSCLREAEELRTQLRLLEDARDGLRRELLEAQRKLRESQEGREVQRQEAGELRRSLGEGAKEREALRRSNEELRSAVKKAESERISLKLANEDKEQKLALLEEARTAVGKEAGELRTGLQEVERSRLEARRELQELRRQMKMLDSENTRLGRELAELQGRLALGERAEKESRRETLGLRQRLLKGEASLEVMRQELQVAQRKLQEQEGEFRTRERRLLGSLEEARGTEKQQLDHARGLELKLEAARAEAAELGLRLSAAEGRAQGLEAELARVEVQRRAAEAQLGGLRSALRRGLGLGRAPSPAPRPVPGSPARDAPAEGSGEGLNSPSTLECSPGSQPPSPGPATSPASPDLDPEAVRGALREFLQELRSAQRERDELRTQTSALNRQLAEMEAERDSATSRARQLQKAVAESEEARRSVDGRLSGVQAELALQEESVRRSERERRATLDQVATLERSLQATESELRASQEKISKMKANETKLEGDKRRLKEVLDASESRTVKLELQRRSLEGELQRSRLGLSDREAQAQALQDRVDSLQRQVADSEVKAGTLQLTVERLNGALAKVEESEGALRDKVRGLTEALAQSSASLNSTRDKNLHLQKALTACEHDRQVLQERLDAARQALSEARKQSSSLGEQVQTLRGEVADLELQRVEAEGQLQQLREVLRQRQEGEAAALNTVQKLQDERRLLQERLGSLQRALAQLEAEKREVERSALRLEKDRVALRRTLDKVEREKLRSHEDTVRLSAEKGRLDRTLTGAELELAEAQRQIQQLEAQVVVLEQSHSPAQLEVDAQQQQLELQQEVERLRSAQAQTERTLEARERAHRQRVRGLEEQVSTLKGQLQQELRRSSAPFSPPSGPPEK

SEQ ID NO: 9646 - protein, 243 aa, Homo sapiens
MKEYVLLLFLALCSAKPFFSPSHIALKNMMLKDMEDTDDDDDDDDDDDDDDEDNSLFPTREPRSHFFPFDLFPMCPFGCQCYSRVVHCSDLGLTSVPTNIPFDTRMLDLQNNKIKEIKENDFKGLTSLYGLILNNNKLTKIHPKAFLTTKKLRRLYLSHNQLSEIPLNLPKSLAELRIHENKVKKIQKDTFKGMNALHVLEMSANPLDNNGIEPGAFEGVTVFHIRIAEAKLTSVPKDNLPSF

SEQ ID NO: 9647 - protein, 380 aa, Homo sapiens
MKEYVLLLFLALCSAKPFFSPSHIALKNMMLKDMEDTDDDDDDDDDDDDDDEDNSLFPTREPRSHFFPFDLFPMCPFGCQCYSRVVHCSDLGLTSVPTNIPFDTRMLDLQNNKIKEIKENDFKGLTSLYGLILNNNKLTKIHPKAFLTTKKLRRLYLSHNQLSEIPLNLPKSLAELRIHENKVKKIQKDTFKGMNALHVLEMSANPLDNNGIEPGAFEGVTVFHIRIAEAKLTSVPKGLPPTLLELHLDYNKISTVELEDFKRYKELQRLGLGNNKITDIENGSLANIPRVREIHLENNKLKKIPSGLPELKYLQIIFLHSNSIARVGVNDFCPTVPKMKKSLYSAISLFNNPVKYWEMQPATFRCVLSRMSVQLGNFGM

SEQ ID NO: 9648 - protein, 400 aa, Homo sapiens
MAGCVPLLQGLVLVLALHRVEPSVFLPASKANDVLVRWKRAGSYLLEELFEGNLEKECYEEICVYEEAREVFENEVVTDEFWRRYKGGSPCISQPCLHNGSCQDSIWGYTCTCSPGYEGSNCELAKNECHPERTDGCQHFCLPGQESYTCSCAQGYRLGEDHKQCVPHDQCACGVLTSEKRAPDLQDLPWQVKLTNSEGKDFCGGVIIRENFVLTTAKCSLLHRNITVKTYFNRTSQDPLMIKITHVHVHMRYDADAGENDLSLLELEWPIQCPGAGLPVCTPEKDFAEHLLIPRTRGLLSGWARNGTDLGNSLTTRPVTLVEGEECGQVLNVTVTTRTYCERSSVAAMHWMDGSVVTREHRGSWFLTGVLGSQPVGGQAHMVLVTKVSRYSLWFKQIMN

SEQ ID NO: 9649 - protein, 159 aa, Homo sapiens
MAVLWRLSAVCGALGGRALLLRTPVVRPAHISAFLQDRPIPEWCGVQHIHLSPSHHSGSKAASLHWTSERVVSVLLLGLLPAAYLNPCSAMDYSLAAALTLHGHWGLGQVVTDYVHGDALQKAAKAGLLALSALTFAGLCYFNYHDVGICKAVAMLWKL

SEQ ID NO: 9650 - protein, 421 aa, Homo sapiens
MGFLSPIYVIFFFFGVKVHCQYETYQWDEDYDQEPDDDYQTGFPFRQNVDYGVPFHQYTLGCVSECFCPTNFPSSMYCDNRKLKTIPNIPMHIQQLYLQFNEIEAVTANSFINATHLKEINLSHNKIKSQKIDYGVFAKLPNLLQLHLEHNNLEEFPFPLPKSLERLLLGYNEISKLQTNAMDGLVNLTMLDLCYNYLHDSLLKDKIFAKMEKLMQLNLCSNRLESMPPGLPSSLMYLSLENNSISSIPEKYFDKLPKLHTLRMSHNKLQDIPYNIFNLPNIVELSVGHNKLKQAFYIPRNLEHLYLQNNEIEKMNLTVMCPSIDPLHYHHLTYIRVDQNKLKEPISSYIFFCFPHIHTIYYGEQRSTNGQTIQLKTQVFRRFPDDDDESEDHDDPDNAHESPEQEGAEGHFDLHYYENQE

SEQ ID NO: 9651 - protein, 332 aa, Homo sapiens
MGRPLHLVLLSASLAGLLLLGESLFIRREQANNILARVTRANSFLEEMKKGHLERECMEETCSYEEAREVFEDSDKTNEFWNKYKDGDQCETSPCQNQGKCKDGLGEYTCTCLEGFEGKNCELFTRKLCSLDNGDCDQFCHEEQNSVVCSCARGYTLADNGKACIPTGPYPCGKQTLERRKRSVAQATSSSGEAPDSITWKPYDAADLDPTENPFDLLDFNQTQPERGDNNLTRIVGGQECKDGECPWQALLINEENEGFCGGTILSEFYILTAAHCLYQAKRFKGTGTRSRRRAVRRCTRWRWSSSTTGSQRRPMTSTSPCSGSRPPSPSA

SEQ ID NO: 9652 - protein, 488 aa, Homo sapiens
MGRPLHLVLLSASLAGLLLLGESLFIRREQANNILARVTRANSFLEEMKKGHLERECMEETCSYEEAREVFEDSDKTNEFWNKYKDGDQCETSPCQNQGKCKDGLGEYTCTCLEGFEGKNCELFTRKLCSLDNGDCDQFCHEEQNSVVCSCARGYTLADNGKACIPTGPYPCGKQTLERRKRSVAQATSSSGEAPDSITWKPYDAADLDPTENPFDLLDFNQTQPERGDNNLTRIVGGQECKDGECPWQALLINEENEGFCGGTILSEFYILTAAHCLYQAKRFKVRVGDRNTEQEEGGEAVHEVEVVIKHNRFTKETYDFDIAVLRLKTPITFRMNVAPACLPERDWAESTLMTQKTGIVSGFGRTHEKGRQSTRLKMLEVPYVDRNSCKLSSSFIITQNMFCAGYDTKQEDACQGDSGGPHVTRFKDTYFVTGIVSWGEGCARKGKYGIYTKVTAFLKWIDRSMKTRGLPKAKSHAPEVITSSPLK

SEQ ID NO: 9653 - protein, 268 aa, Homo sapiens
MAVNVYSTSVTSDNLSRHDMLAWINESLQLNLTKIEQLCSGAAYCQFMDMLFPGSIALKKVKFQAKLEHEYIQNFKILQAGFKRMGVDKIIPVDKLVKGKFQDNFEFVQWFKKFFDANYDGKDYDPVAARQGQETAVAPSLVAPALNKPKKPLTSSSAAPQRPISTQRTAAAPKAGPGVVRKNPGVGNGDDEAAELMQQVNVLKLTVEDLEKERDFYFGKLRNIELICQENEGENDPVLQRIVDILYATDEGFVIPDEGGPQEEQEEY

SEQ ID NO: 9654 - protein, 466 aa, Homo sapiens
MVSQALRLLCLLLGLQGCLAAGGVAKASGGETRDMPWKPGPHRVFVTQEEAHGVLHRRRRANAFLEELRPGSLERECKEEQCSFEEAREIFKDAERTKLFWISYSDGDQCASSPCQNGGSCKDQLQSYICFCLPAFEGRNCETHKDDQLICVNENGGCEQYCSDHTGTKRSCRCHEGYSLLADGVSCTPTVEYPCGKIPILEKRNASKPQGRIVGGKVCPKGECPWQVLLLVNGAQLCGGTLINTIWVVSAAHCFDKIKNWRNLIAVLGEHDLSEHDGDEQSRRVAQVIIPSTYVPGTTNHDIALLRLHQPVVLTDHVVPLCLPERTFSERTLAFVRFSLVSGWGQLLDRGATALELMVLNVPRLMTQDCLQQSRKVGDSPNITEYMFCAGYSDGSKDSCKGDSGGPHATHYRGTWYLTGIVSWGQGCATVGHFGVYTRVSQYIEWLQKLMRSEPRPGVLLRAPFP

SEQ ID NO: 9655 - protein, 717 aa, Homo sapiens
MASSSDSEDDSFMAVDQEETVLEGTMDQDEEPHPVLEAEETRHNRSMSELPEEVLEYILSFLSPYQEHKTAALVCKQWYRLIKGVAHQCYHGFMKAVQEGNIQWESRTYPYPGTPITQRFSHSACYYDANQSMYVFGGCTQSSCNAAFNDLWRLDLNSKEWIRPLASGSYPSPKAGATLVVYKDLLVLFGGWTRPSPYPLHQPERFFDEIHTYSPSKNWWNCIVTTHGPPPMAGHSSCVIDDKMIVFGGSLGSRQMSNDVWVLDLEQWAWSKPNISGPSPHPRGGQSQIVIDDATILILGGCGGPNALFKDAWLLHMHSGPWAWQPLKVENEEHGAPELWCHPACRVGQCVVVFSQAPSGRAPLSPSLNSRPSPISATPPALVPETREYRSQSPVRSMDEAPCVNGRWGTLRPRAQRQTPSGSREGSLSPARGDGSPILNGGSLSPGTAAVGGSSLDSPVQAISPSTPSAPEGYDLKIGLSLAPRRGSLPDQKDLRLGSIDLNWDLKPASSSNPMDGMDNRTVGGSMRHPPEQTNGVHTPPHVASALAGAVSPGALRRSLEAIKAMSSKGPSASAALSPPLGSSPGSPGSQSLSSGETVPIPRPGPAQGDGHSLPPIARRLGHHPPQSLNVGKPLYQSMNCKPMQMYVLDIKDTKEKGRVKWKVFNSSSVVGPPETSLHTVVQGRGELIIFGGLMDKKQNVKYYPKTNALYFVRAKR

SEQ ID NO: 9656 - protein, 984 aa, Homo sapiens
MTVRRLSLLCRDLWALWLLLKAGADEIMHQDIVPLCAADIQDQLKKRFAYLSGGRGQDGSPVITFPDYPAFSEIPDKEFQNVMTYLTSIPSLQDAGIGFILVIDRRRDKWTSVKASVLRIAASFPANLQLVLVLRPTGFFQRTLSDIAFKFNRDDFKMKVPVIMLSSVPDLHGYIDKSQLTEDLGGTLDYCHSRWLCQRTAIESFALMVKQTAQMLQSFGTELAETELPNDVQSTSSVLCAHTEKKDKAKEDLRLALKEGHSVLESLRELQAEGSEPSVNQDQLDNQATVQRLLAQLNETEAAFDEFWAKHQQKLEQCLQLRHFEQGFREVKAILDAASQKIATFTDIGNSLAHVEHLLRDLASFEEKSGVAVERARALSLDGEQLIGNKHYAVDSIRPKCQELRHLCDQFSAEIARRRGLLSKSLELHRRLETSMKWCDEGIYLLASQPVDKCQSQDGAEAALQEIEKFLETGAENKIQELNAIYKEYESILNQDLMEHVRKVFQKQASMEEVFHRRQASLKKLAARQTRPVQPVAPRPEALAKSPCPSPGIRRGSENSSSEGGALRRGPYRRAKSEMSESRQGRGSAGEEEESLAILRRHVMSELLDTERAYVEELLCVLEGYAAEMDNPLMAHLLSTGLHNKKDVLFGNMEEIYHFHNRIFLRELENYTDCPELVGRCFLERMEDFQIYEKYCQNKPRSESLWRQCSDCPFFQECQRKLDHKLSLDSYLLKPVQRITKYQLLLKEMLKYSRNCEGAEDLQEALSSILGILKAVNDSMHLIAITGYDGNLGDLGKLLMQGSFSVWTDHKRGHTKVKELARFKPMQRHLFLHEKAVLFCKKREENGEGYEKAPSYSYKQSLNMAAVGITENVKGDAKKFEIWYNAREEVYIVQAPTPEIKAAWVNEIRKVLTSQLQACREASQHRALEQSQSLPLPAPTSTSPSRGNSRNIKKLEERKTDPLSLEGYVSSAPLTKPPEKGKEP

SEQ ID NO: 9657 - protein, 1123 aa, Homo sapiens
MTVRRLSLLCRDLWALWLLLKAGADEIMHQDIVPLCAADIQDQLKKRFAYLSGGRGQDGSPVITFPDYPAFSEIPDKEFQNVMTYLTSIPSLQDAGIGFILVIDRRRDKWTSVKASVLRIAASFPANLQLVLVLRPTGFFQRTLSDIAFKFNRDDFKMKVPVIMLSSVPDLHGYIDKSQLTEDLGGTLDYCHSRWLCQRTAIESFALMVKQTAQMLQSFGTELAETELPNDVQSTSSVLCAHTEKKDKAKEDLRLALKEGHSVLESLRELQAEGSEPSVNQDQLDNQATVQRLLAQLNETEAAFDEFWAKHQQKLEQCLQLRHFEQGFREVKAILDAASQKIATFTDIGNSLAHVEHLLRDLASFEEKSGVAVERARALSLDGEQLIGNKHYAVDSIRPKCQELRHLCDQFSAEIARRRGLLSKSLELHRRLETSMKWCDEGIYLLASQPVDKCQSQDGAEAALQEIEKFLETGAENKIQELNAIYKEYESILNQDLMEHVRKVFQKQASMEEVFHRRQASLKKLAARQTRPVQPVAPRPEALAKSPCPSPGIRRGSENSSSEGGALRRGPYRRAKSEMSESRQGRGSAGEEEESLAILRRHVMSELLDTERAYVEELLCVLEGYAAEMDNPLMAHLLSTGLHNKKDVLFGNMEEIYHFHNRIFLRELENYTDCPELVGRCFLERMEDFQIYEKYCQNKPRSESLWRQCSDCPFFQECQRKLDHKLSLDSYLLKPVQRITKYQLLLKEMLKYSRNCEGAEDLQEALSSILGILKAVNDSMHLIAITGYDGNLGDLGKLLMQGSFSVWTDHKRGHTKVKELARFKPMQRHLFLHEKAVLFCKKREENGEGYEKAPSYSYKQSLNMAAVGITENVKGDAKKFEIWYNAREEVYIVQAPTPEIKAAWVNEIRKVLTSQLQACREASQHRALEQSQSLPLPAPTSTSPSRGNSRNIKKLEERKTDPLSLEGYVSSAPLTKPPEKGKGWSKTSHSLEAPEDDGGWSSAEEQINSSDAEEDGGLGPKKLVPGKYTVVADHEKGGPDALRVRSGDVVELVQEGDEGLWYVRDPTTGKEGWVPASSLSVRLGPSGSAQCLSSSESSPGSAVLSNSSSCSEGGQAPFSDLQG

SEQ ID NO: 9658 - protein, 374 aa, Homo sapiens
MRPGTALQAVLLAVLLVGLRAATGRLLSGQPVCRGGTQRPCYKVIYFHDTSRRLNFEEAKEACRRDGGQLVSIESEDEQKLIEKFIENLLPSDGDFWIGLRRREEKQSNSTACQDLYAWTDGSISQFRNWYVDEPSCGSEVCVVMYHQPSAPAGIGGPYMFQWNDDRCNMKNNFICKYSDEKPAVPSREAEGEETELTTPVLPEETQEEDAKKTFKESREAALNLAYILIPSIPLLLLLVVTTVVCWVWICRKRKREQPDPSTKKQHTIWPSPHQGNSPDLEVYNVIRKQSEADLAETRPDLKNISFRVCSGEATPDDMSCDYDNMAVNPSESGFVTLVSVESGFVTNDIYEFSPDQMGRSKESGWVENEIYGY

SEQ ID NO: 9659 - protein, 382 aa, Homo sapiens
MRPGTALQAVLLAVLLVGLRAATGRLLSASDLDLRGGQPVCRGGTQRPCYKVIYFHDTSRRLNFEEAKEACRRDGGQLVSIESEDEQKLIEKFIENLLPSDGDFWIGLRRREEKQSNSTACQDLYAWTDGSISQFRNWYVDEPSCGSEVCVVMYHQPSAPAGIGGPYMFQWNDDRCNMKNNFICKYSDEKPAVPSREAEGEETELTTPVLPEETQEEDAKKTFKESREAALNLAYILIPSIPLLLLLVVTTVVCWVWICRKRKREQPDPSTKKQHTIWPSPHQGNSPDLEVYNVIRKQSEADLAETRPDLKNISFRVCSGEATPDDMSCDYDNMAVNPSESGFVTLVSVESGFVTNDIYEFSPDQMGRSKESGWVENEIYGY

SEQ ID NO: 9660 - protein, 1191 aa, Homo sapiens
MDCSLVRTLVHRYCAGEENWVDSRTIYVGHREPPPGAEAYIPQRYPDNRIVSSKYTFWNFIPKNLFEQFRRVANFYFLIIFLVQLIIDTPTSPVTSGLPLFFVITVTAIKQGYEDWLRHKADNAMNQCPVHFIQHGKLVRKQSRKLRVGDIVMVKEDETFPCDLIFLSSNRGDGTCHVTTASLDGESSHKTHYAVQDTKGFHTEEDIGGLHATIECEQPQPDLYKFVGRINVYSDLNDPVVRPLGSENLLLRGATLKNTEKIFGVAIYTGMETKMALNYQSKSQKRSAVEKSMNAFLIVYLCILISKALINTVLKYMWQSEPFRDEPWYNQKTESERQRNLFLKAFTDFLAFMVLFNYIIPVSMYVTVEMQKFLGSYFITWDEDMFDEETGEGPLVNTSDLNEELGQVEYIFTDKTGTLTENNMEFKECCIEGHVYVPHVICNGQVLPESSGIDMIDSSPSVNGREREELFFRALCLCHTVQVKDDDSVDGPRKSPDGGKSCVYISSSPDEVALVEGVQRLGFTYLRLKDNYMEILNRENHIERFELLEILSFDSVRRRMSVIVKSATGEIYLFCKGADSSIFPRVIEGKVDQIRARVERNAVEGLRTLCVAYKRLIQEEYEGICKLLQAAKVALQDREKKLAEAYEQIEKDLTLLGATAVEDRLQEKAADTIEALQKAGIKVWVLTGDKMETAAATCYACKLFRRNTQLLELTTKRIEEQSLHDVLFELSKTVLRHSGSLTRDNLSGLSADMQDYGLIIDGAALSLIMKPREDGSSGNYRELFLEICRSCSAVLCCRMAPLQKAQIVKLIKFSKEHPITLAIGDGANDVSMILEAHVGIGVIGKEGRQAARNSDYAIPKFKHLKKMLLVHGHFYYIRISELVQYFFYKNVCFIFPQFLYQFFCGFSQQTLYDTAYLTLYNISFTSLPILLYSLMEQHVGIDVLKRDPTLYRDVAKNALLRWRVFIYWTLLGLFDALVFFFGAYFVFENTTVTSNGQIFGNWTFGTLVFTVMVFTVTLKLALDTHYWTWINHFVIWGSLLFYVVFSLLWGGVIWPFLNYQRMYYVFIQMLSSGPAWLAIVLLVTISLLPDVLKKVLCRQLWPTATERVQNGCAQPRDRDSEFTPLASLQSPGYQSTCPSAAWYSSHSQQVTLAAWKEKVSTEPPPILGGSHHHCSSIPSHSCPRSRVGMLV

SEQ ID NO: 9661 - protein, 415 aa, Homo sapiens
MTGERPSTALPDRRWGPRILGFWGGCRVWVFAAIFLLLSLAASWSKAENDFGLVQPLVTMEQLLWVSGRQIGSVDTFRIPLITATPRGTLLAFAEARKMSSSDEGAKFIALRRSMDQGSTWSPTAFIVNDGDVPDGLNLGAVVSDVETGVVFLFYSLCAHKAGCQVASTMLVWSKDDGVSWSTPRNLSLDIGTEVFAPGPGSGIQKQREPRKGRLIVCGHGTLERDGVFCLLSDDHGASWRYGSGVSGIPYGQPKQENDFNPDECQPYELPDGSVVINARNQNNYHCHCRIVLRSYDACDTLRPRDVTFDPELVDPVVAAGAVVTSSGIVFFSNPAHPEFRVNLTLRWSFSNGTSWRKETVQLWPGPSGYSSLATLEGSMDGEEQAPQLYVLYEKGRNHYTESISVAKISVYGTL

SEQ ID NO: 9662 - protein, 1134 aa, Homo sapiens
MDCSLVRTLVHRYCAGEENWVDSRTIYVGHREPPPGAEAYIPQRYPDNRIVSSKYTFWNFIPKNLFEQFRRVANFYFLIIFLVQLIIDTPTSPVTSGLPLFFVITVTAIKQGYEDWLRHKADNAMNQCPVHFIQHGKLVRKQSRKLRVGDIVMVKEDETFPCDLIFLSSNRGDGTCHVTTASLDGESSHKTHYAVQDTKGFHTEEDIGGLHATIECEQPQPDLYKFVGRINVYSDLNDPVVRPLGSENLLLRGATLKNTEKIFGVAIYTGMETKMALNYQSKSQKRSAVEKSMNAFLIVYLCILISKALINTVLKYMWQSEPFRDEPWYNQKTESERQRNLFLKAFTDFLAFMVLFNYIIPVSMYVTVEMQKFLGSYFITWDEDMFDEETGEGPLVNTSDLNEELGQVEYIFTDKTGTLTENNMEFKECCIEGHVYVPHVICNGQVLPESSGIDMIDSSPSVNGREREELFFRALCLCHTVQVKDDDSVDGPRKSPDGGKSCVYISSSPDEVALVEGVQRLGFTYLRLKDNYMEILNRENHIERFELLEILSFDSVRRRMSVIVKSATGEIYLFCKGADSSIFPRVIEGKVDQIRARVERNAVEGLRTLCVAYKRLIQEEYEGICKLLQAAKVALQDREKKLAEAYEQIEKDLTLLGATAVEDRLQEKAADTIEALQKAGIKVWVLTGDKMETAAATCYACKLFRRNTQLLELTTKRIEEQSLHDVLFELSKTVLRHSGSLTRDNLSGLSADMQDYGLIIDGAALSLIMKPREDGSSGNYRELFLEICRSCSAVLCCRMAPLQKAQIVKLIKFSKEHPITLAIGDGANDVSMILEAHVGIGVIGKEGRQAARNSDYAIPKFKHLKKMLLVHGHFYYIRISELVQYFFYKNVCFIFPQFLYQFFCGFSQQTLYDTAYLTLYNISFTSLPILLYSLMEQHVGIDVLKRDPTLYRDVAKNALLRWRVFIYWTLLGLFDALVFFFGAYFVFENTTVTSNGQIFGNWTFGTLVFTVMVFTVTLKLALDTHYWTWINHFVIWGSLLFYVVFSLLWGGVIWPFLNYQRMYYVFIQMLSSGPAWLAIVLLVTISLLPDVLKKVLCRQLWPTATERVQTKSQCLSVEQSTIFMLSQTSSSLSF

SEQ ID NO: 9663 - protein, 1239 aa, Homo sapiens
MELPNYSRQLLQQLYTLCKEQQFCDCTISIGTIYFRAHKLVLAAASLLFKTLLDNTDTISIDASVVSPEEFALLLEMMYTGKLPVGKHNFSKIISLADSLQMFDVAVSCKNLLTSLVNCSVQGQVVRDVSAPSSETFRKEPEKPQVEILSSEGAGEPHSSPELAATPGGPVKAETEEAAHSVSQEMSVNSPTAQESQRNAETPAETPTTAEACSPSPAVQTFSEAKKTSTEPGCERKHYQLNFLLENEGVFSDALMVTQDVLKKLEMCSEIKGPQKEMIVKCFEGEGGHSAFQRILGKVREESLDVQTVVSLLRLYQYSNPAVKTALLDRKPEDVDTVQPKGSTEEGKTLSVLLLEHKEDLIQCVTQLRPIMESLETAKEEFLTGTEKRVILNCCEGRTPKETIENLLHRMTEEKTLTAEGLVKLLQAVKTTFPNLGLLLEKLQKSATLPSTTVQPSPDDYGTELLRRYHENLSEIFTDNQILLKMISHMTSLAPGEREVMEKLVKRDSGSGGFNSLISAVLEKQTLSATAIWQLLLVVQETKTCPLDLLMEEIRREPGADAFFRAVTTPEHATLETILRHNQLILEAIQQKIEYKLFTSEEEHLAETVKEILSIPSETASPEASLRAVLSRAMEKSVPAIEICHLLCSVHKSFPGLQPVMQELAYIGVLTKEDGEKETWKVSNKFHLEANNKEDEKAAKEDSQPGEQNDQGETGSLPGQQEKEASASPDPAKKSFICKACDKSFHFYCRLKVHMKRCRVAKSKQVQCKECSETKDSKKELDKHQLEAHGAGGEPDAPKKKKKRLPVTCDLCGREFAHASGMQYHKLTEHFDEKPFSCEECGAKFAANSTLKNHLRLHTGDRPFMCKHCLMTFTQASALAYHTKKKHSEGKMYACQYCDAVFAQSIELSRHVRTHTGDKPYVCRDCGKGFRQANGLSIHLHTFHNIEDPYDCKKCRMSFPTLQDHRKHIHEVHSKEYHPCPTCGKIFSAPSMLERHVVTHVGGKPFSCGICNKAYQQLSGLWYHNRTHHPDVFAAQNHRSSKFSSLQCSSCDKTFPNTIEHKKHIKAEHADMKFHECDQCKELFPTPALLQVHVKCQHSGSQPFRCLYCAATFRFPGALQHHVTTEHFKQSETTFPCELCGELFTSQAQLDSHLESEHPKVMSTETQAAASQMAQVIQTPEPVAPTEQVITLEETQLAGSQVFVTLPDSQASQASSELVAVTVEDLLDGTVTLICGEAK

SEQ ID NO: 9664 - protein, 641 aa, Homo sapiens
MAKAAAIGIDLGTTYSCVGVFQHGKVEIIANDQGNRTTPSYVAFTDTERLIGDAAKNQVALNPQNTVFDAKRLIGRKFGDPVVQSDMKHWPFQVINDGDKPKVQVSYKGETKAFYPEEISSMVLTKMKEIAEAYLGYPVTNAVITVPAYFNDSQRQATKDAGVIAGLNVLRIINEPTAAAIAYGLDRTGKGERNVLIFDLGGGTFDVSILTIDDGIFEVKATAGDTHLGGEDFDNRLVNHFVEEFKRKHKKDISQNKRAVRRLRTACERAKRTLSSSTQASLEIDSLFEGIDFYTSITRARFEELCSDLFRSTLEPVEKALRDAKLDKAQIHDLVLVGGSTRIPKVQKLLQDFFNGRDLNKSINPDEAVAYGAAVQAAILMGDKSENVQDLLLLDVAPLSLGLETAGGVMTALIKRNSTIPTKQTQIFTTYSDNQPGVLIQVYEGERAMTKDNNLLGRFELSGIPPAPRGVPQIEVTFDIDANGILNVTATDKSTGKANKITITNDKGRLSKEEIERMVQEAEKYKAEDEVQRERVSAKNALESYAFNMKSAVEDEGLKGKISEADKKKVLDKCQEVISWLDANTLAEKDEFEHKRKELEQVCNPIISGLYQGAGGPGPGGFGAQGPKGGSGSGPTIEEVD

SEQ ID NO: 9665 - protein, 95 aa, Homo sapiens
MLFYSFFKSLVGKDVVVELKNDLSICGTLHSVDQYLNIKLTDISVTDPEKYPHMLSVKNCFIRGSVVRYVQLPADEVDTQLLQDAARKEALQQKQ

SEQ ID NO: 9666 - protein, 1264 aa, Homo sapiens
MSTLYVSPHPDAFPSLRALIAARYGEAGEGPGWGGAHPRICLQPPPTSRTPFPPPRLPALEQGPGGLWVWGATAVAQLLWPAGLGGPGGSRAAVLVQQWVSYADTELIPAACGATLPALGLRSSAQDPQAVLGALGRALSPLEEWLRLHTYLAGEAPTLADLAAVTALLLPFRYVLDPPARRIWNNVTRWFVTCVRQPEFRAVLGEVVLYSGARPLSHQPGPEAPALPKTAAQLKKEAKKREKLEKFQQKQKIQQQQPPPGEKKPKPEKREKRDPGVITYDLPTPPGEKKDVSGPMPDSYSPRYVEAAWYPWWEQQGFFKPEYGRPNVSAANPRGVFMMCIPPPNVTGSLHLGHALTNAIQDSLTRWHRMRGETTLWNPGCDHAGIATQVVVEKKLWREQGLSRHQLGREAFLQEVWKWKEEKGDRIYHQLKKLGSSLDWDRACFTMDPKLSAAVTEAFVRLHEEGIIYRSTRLVNWSCTLNSAISDIEVDKKELTGRTLLSVPGYKEKVEFGVLVSFAYKVQGSDSDEEVVVATTRIETMLGDVAVAVHPKDTRYQHLKGKNVIHPFLSRSLPIVFDEFVDMDFGTGAVKITPAHDQNDYEVGQRHGLEAISIMDSRGALINVPPPFLGLPRFEARKAVLVALKERGLFRGIEDNPMVVPLCNRSKDVVEPLLRPQWYVRCGEMAQAASAAVTRGDLRILPEAHQRTWHAWMDNIREWCISRQLWWGHRIPAYFVTVSDPAVPPGEDPDGRYWVSGRNEAEAREKAAKEFGVSPDKISLQQDEDVLDTWFSSGLFPLSILGWPNQSEDLSVFYPGTLLETGHDILFFWVARMVMLGLKLTGRLPFREVYLHAIVRDAHGRKMSKSLGNVIDPLDVIYGISLQGLHNQLLNSNLDPSEVEKAKEGQKADFPAGIPECGTDALRFGLCAYMSQGRDINLDVNRILGYRHFCNKLWNATKFALRGLGKGFVPSPTSQPGGHESLVDRWIRSRLTEAVRLSNQGFQAYDFPAVTTAQYSFWLYELCDVYLECLKPVLNGVDQVAAECARQTLYTCLDVGLRLLSPFMPFVTEELFQRLPRRMPQAPPSLCVTPYPEPSECSWKDPEAEAALELALSITRAVRSLRADYNLTRIRPDCFLEVADEATGALASAVSGYVQALASAGVVAVLALGAPAPQGCAVALASDRCSIHLQLQGLVDPARELGKLQAKRVEAQRQAQRLRERRAASGYPVKVPLEVQEADEAKLQQTEAELRKVDEAIALFQKML

SEQ ID NO: 9667 - protein, 327 aa, Homo sapiens
MLSLCICGTAITSQYLAERYKVNTPMLQSFINYCLLFLIYTVMLAFRSGSDNLLVILKRKWWKYILLGLADVEANYVIVRAYQYTTLTSVQLLDCFGIPVLMALSWFILHARYRVIHFIAVAVCLLGVGTMVGADILAGREDNSGSDVLIGDILVLLGASLYAISNVCEEYIVKKLSRQEFLGMVGLFGTIISGIQLLIVEYKDIASIHWDWKIALLFVAFALCMFCLYSFMPLVIKVTSATSVNLGILTADLYSLFVGLFLFGYKFSGLYILSFTVIMVGFILYCSTPTRTAEPAESSVPPVTSIGIDNLGLKLEENLQETHSAVL

SEQ ID NO: 9668 - protein, 834 aa, Homo sapiens
MAQKMDCGAGLLGFQNPDACRAVCHPLPQPPASTLPLSAFPTLCDPPYSQLRDPPAVLSCYCTPLGASPAPAEASVEDSALLMQTLMEAIQISEAPPTNQATAAASPQSSQPPTANEMADIQVSAAAARPKSAFKVQNATTKGPNGVYDFSQAHNAKDVPNTQPKAAFKSQNATPKGPNAAYDFSQAATTGELAANKSEMAFKAQNATTKVGPNATYNFSQSLNANDLANSRPKTPFKAWNDTTKAPTADTQTQNVNQAKMATSQADIETDPGISEPDGATAQTSADGSQAQNLESRTIIRGKRTRKINNLNVEENSSGDQRRAPLAAGTWRSAPVPVTTQNPPGAPPNVLWQTPLAWQNPSGWQNQTARQTPPARQSPPARQTPPAWQNPVAWQNPVIWPNPVIWQNPVIWPNPIVWPGPVVWPNPLAWQNPPGWQTPPGWQTPPGWQGPPDWQGPPDWPLPPDWPLPPDWPLPTDWPLPPDWIPADWPIPPDWQNLRPSPNLRPSPNSRASQNPGAAQPRDVALLQERANKLVKYLMLKDYTKVPIKRSEMLRDIIREYTDVYPEIIERACFVLEKKFGIQLKEIDKEEHLYILISTPESLAGILGTTKDTPKLGLLLVILGVIFMNGNRASEAVLWEALRKMGLRPGVRHPLLGDLRKLLTYEFVKQKYLDYRRVPNSNPPEYEFLWGLRSYHETSKMKVLRFIAEVQKRDPRDWTAQFMEAADEALDALDAAAAEAEARAEARTRMGIGDEAVSGPWSWDDIEFELLTWDEEGDFGDPWSRIPFTFWARYHQNARSRFPQTFAGPIIGPGGTASANFAANFGAIGFFWVE

SEQ ID NO: 9669 - protein, 778 aa, Homo sapiens
MSSAMLVTCLPDPSSSFREDAPRPPVPGEEGETPPCQPGVGKGQVTKPMPVSSNTRRNEDGLGEPEGRASPDSPLTRWTKSLHSLLGDQDGAYLFRTFLEREKCVDTLDFWFACNGFRQMNLKDTKTLRVAKAIYKRYIENNSIVSKQLKPATKTYIRDGIKKQQIDSIMFDQAQTEIQSVMEENAYQMFLTSDIYLEYVRSGGENTAYMSNGGLGSLKVVCGYLPTLNEEEEWTCADFKCKLSPTVVGLSSKTLRATASVRSTETVDSGYRSFKRSDPVNPYHIGSGYVFAPATSANDSEISSDALTDDSMSMTDSSVDGIPPYRVGSKKQLQREMHRSVKANGQVSLPHFPRTHRLPKEMTPVEPATFAAELISRLEKLKLELESRHSLEERLQQIREDEEREGSELTLNSREGAPTQHPLSLLPSGSYEEDPQTILDDHLSRVLKTPGCQSPGVGRYSPRSRSPDHHHHHHSQYHSLLPPGGKLPPAAASPGACPLLGGKGFVTKQTTKHVHHHYIHHHAVPKTKEEIEAEATQRVHCFCPGGSEYYCYSKCKSHSKAPETMPSEQFGAQSTKKAYPLESARSSPGERASRHHLWGGNSGHPRTTPRAHLFTQDPAMPPLTPPNTLAQLEEACRRLAEVSKPPKQRCCVASQQRDRNHSATVQTGATPFSNPSLAPEDHKEPKKLAGVHALQASELVVTYFFCGEEIPYRRMLKAQSLTLGHFKEQLSKKGNYRYYFKKASDEFACGAVFEEIWEDETVLPMYEGRILGKVERID

SEQ ID NO: 9670 - protein, 943 aa, Homo sapiens
MARGSALPRRPLLCIPAVWAAAALLLSVSRTSGEVEVLDPNDPLGPLDGQDGPIPTLKGYFLNFLEPVNNITIVQGQTAILHCKVAGNPPPNVRWLKNDAPVVQEPRRIIIRKTEYGSRLRIQDLDTTDTGYYQCVATNGMKTITATGVLFVRLGPTHSPNHNFQDDYHEDGFCQPYRGIACARFIGNRTIYVDSLQMQGEIENRITAAFTMIGTSTHLSDQCSQFAIPSFCHFVFPLCDARSRTPKPRELCRDECEVLESDLCRQEYTIARSNPLILMRLQLPKCEALPMPESPDAANCMRIGIPAERLGRYHQCYNGSGMDYRGTASTTKSGHQCQPWALQHPHSHHLSSTDFPELGGGHAYCRNPGGQMEGPWCFTQNKNVRMELCDVPSCSPRDSSKMGILYILVPSIAIPLVIACLFFLVCMCRNKQKASASTPQRRQLMASPSQDMEMPLINQHKQAKLKEISLSAVRFMEELGEDRFGKVYKGHLFGPAPGEQTQAVAIKTLKDKAEGPLREEFRHEAMLRARLQHPNVVCLLGVVTKDQPLSMIFSYCSHGDLHEFLVMRSPHSDVGSTDDDRTVKSALEPPDFVHLVAQIAAGMEYLSSHHVVHKDLATRNVLVYDKLNVKISDLGLFREVYAADYYKLLGNSLLPIRWMAPEAIMYGKFSIDSDIWSYGVVLWEVFSYGLQPYCGYSNQDVVEMIRNRQVLPCPDDCPAWVYALMIECWNEFPSRRPRFKDIHSRLRAWGNLSNYNSSAQTSGASNTTQTSSLSTSPVSNVSNARYVGPKQKAPPFPQPQFIPMKGQIRPMVPPPQLYVPVNGYQPVPAYGAYLPNFYPVQIPMQMAPQQVPPQMVPKPSSHHSGSGSTSTGYVTTAPSNTSMADRAALLSEGADDTQNAPEDGAQSTVQEAEEEEEGSVPETELLGDCDTLQVDEAQVQLEA

SEQ ID NO: 9671 - protein, 747 aa, Homo sapiens
MSKLKSSESVRVVVRCRPMNGKEKAASYDKVVDVDVKLGQVSVKNPKGTAHEMPKTFTFDAVYDWNAKQFELYDETFRPLVDSVLQGFNGTIFAYGQTGTGKTYTMEGIRGDPEKRGVIPNSFDHIFTHISRSQNQQYLVRASYLEIYQEEIRDLLSKDQTKRLELKERPDTGVYVKDLSSFVTKSVKEIEHVMNVGNQNRSVGATNMNEHSSRSHAIFVITIECSEVGLDGENHIRVGKLNLVDLAGSERQAKTGAQGERLKEATKINLSLSALGNVISALVDGKSTHIPYRDSKLTRLLQDSLGGNAKTVMVANVGPASYNVEETLTTLRYANRAKNIKNKPRVNEDPKDALLREFQEEIARLKAQLEKRSIGRRKRREKRREGGGSGGGGEEEEEEGEEGEEEGDDKDDYWREQQEKLEIEKRAIVEDHSLVAEEKMRLLKEKEKKMEDLRREKDAAEMLGAKIKAMESKLLVGGKNIVDHTNEQQKILEQKRQEIAEQKRREREIQQQMESRDEETLELKETYSSLQQEVDIKTKKLKKLFSKLQAVKAEIHDLQEEHIKERQELEQTQNELTRELKLKHLIIENFIPLEEKSKIMNRAFFDEEEDHWKLHPITRLENQQMMKRPVSAVGYKRPLSQHARMSMMIRPEARYRAENIVLLELDMPSRTTRDYEGPAIAPKVQAALDAALQDEDEIQVDASSFESTANKKSKARPKSGRKSGSSSSSSGTPASQLYPQSRGLVPK

SEQ ID NO: 9672 - protein, 194 aa, Homo sapiens
MGAAAWARPLSVSFLLLLLPLPGMPAGSWDPAGYLLYCPCMGRFGNQADHFLGSLAFAKLLNRTLAVPPWIEYQHHKPPFTNLHVSYQKYFKLEPLQAYHRVISLEDFMEKLAPTHWPPEKRVAYCFEVAAQRSPDKKTCPMKEGNPFGPFWDQFHVSFNKSELFTGISFSASYREQWSQRRENHSCVTLLFPR

SEQ ID NO: 9673 - protein, 339 aa, Homo sapiens
MAAAVAAAPGALGSLHAGGARLVAACSAWLCPGLRLPGSLAGRRAGPAIWAQGWVPAAGGPAPKRGYSSEMKTEDELRVRHLEEENRGIVVLGINRAYGKNSLSKNLIKMLSKAVDALKSDKKVRTIIIRSEVPGIFCAGADLKERAKMSSSEVGPFVSKIRAVINDIANLPVPTIAAIDGLALGGGLELALACDIRVAASSAKMGLVETKLAIIPGGGGTQRLPRAIGMSLAKELIFSARVLDGKEAKAVGLISHVLEQNQEGDAAYRKALDLAREFLPQGPVAMRVAKLAINQGMEVDLVTGLAIEEACYAQTIPTKDRLEGLLAFKEKRPPRYKGE

SEQ ID NO: 9674 - protein, 4307 aa, Homo sapiens
MANGTADVRKLFIFTTTQNYFGLMSELWDQPLLCNCLEINNFLDDGNQMLLRVQRSDAGISFSNTIEFGDTKDKVLVFFKLRPEVITDENLHDNILVSSMLESPISSLYQAVRQVFAPMLLKDQEWSRNFDPKLQNLLSELEAGLGIVLRRSDTNLTKLKFKEDDTRGILTPSDEFQFWIEQAHRGNKQISKERANYFKELFETIAREFYNLDSLSLLEVVDLVETTQDVVDDVWRQTEHDHYPESRMLHLLDIIGGSFGRFVQKKLGTLNLWEDPYYLVKESLKAGISICEQWVIVCNHLTGQVWQRYVPHPWKNEKYFPETLDKLGKRLEEVLAIRTIHEKFLYFLPASEEKIICLTRVFEPFTGLNPVQYNPYTEPLWKAAVSQYEKIIAPAEQKIAGKLKNYISEIQDSPQQLLQAFLKYKELVKRPTISKELMLERETLLARLVDSIKDFRLDFENRCRGIPGDASGPLSGKNLSEVVNSIVWVRQLELKVDDTIKIAEALLSDLPGFRCFHQSAKDLLDQLKLYEQEQFDDWSRDIQSGLSDSRSGLCIEASSRIMELDSNDGLLKVHYSDRLVILLREVRQLSALGFVIPAKIQQVANIAQKFCKQAIILKQVAHFYNSIDQQMIQSQRPMMLQSALAFEQIIKNSKAGSGGKSQITWDNPKELEGYIQKLQNAAERLATENRKLRKWHTTFCEKVVVLMNIDLLRQQQRWKDGLQELRTGLATVEAQGFQASDMHAWKQHWNHQLYKALEHQYQMGLEALNENLPEINIDLTYKQGRLQFRPPFEEIRAKYYREMKRFIGIPNQFKGVGEAGDESIFSIMIDRNASGFLTIFSKAEDLFRRLSAVLHQHKEWIVIGQVDMEALVEKHLFTVHDWEKNFKALKIKGKEVERLPSAVKVDCLNINCNPVKTVIDDLIQKLFDLLVLSLKKSIQAHLHEIDTFVTEAMEVLTIMPQSVEEIGDANLQYSKLQERKPEILPLFQEAEDKNRLLRTVAGGGLETISNLKAKWDKFELMMESHQLMIKDQIEVMKGNVKSRLQIYYQELEKFKARWDQLKPGDDVIETGQHNTLDKSAKLIKEKKIEFDDLEVTRKKLVDDCHHFRLEEPNFSLASSISKDIESCAQIWAFYEEFQQGFQEMANEDWITFRTKTYLFEEFLMNWHDRLRKVEEHSVMTVKLQSEVDKYKIVIPILKYVRGEHLSPDHWLDLFRLLGLPRGTSLEKLLFGDLLRVADTIVAKAADLKDLNSRAQGEVTIREALRELDLWGVGAVFTLIDYEDSQSRTMKLIKDWKDIVNQVGDNRCLLQSLKDSPYYKGFEDKVSIWERKLAELDEYLQNLNHIQRKWVYLEPIFGRGALPKEQTRFNRVDEDFRSIMTDIKKDNRVTTLTTHAGIRNSLLTILDQLQRCQKSLNEFLEEKRSAFPRFYFIGDDDLLEILGQSTNPSVIQSHLKKLFAGINSVCFDEKSKHITAMKSLEGEVVPFKNKVPLSNNVETWLNDLALEMKKTLEQLLKECVTTGRSSQGAVDPSLFPSQILCLAEQIKFTEDVENAIKDHSLHQIETQLVNKLEQYTNIDTSSEDPGNTESGILELKLKALILDIIHNIDVVKQLNQIQVHTTEDWAWKKQLRFYMKSDHTCCVQMVDSEFQYTYEYQGNASKLVYTPLTDKCYLTLTQAMKMGLGGNPYGPAGTGKTESVKALGGLLGRQVLVFNCDEGIDVKSMGRIFVGLVKCGAWGCFDEFNRLEESVLSAVSMQIQTIQDALKNHRTVCELLGKEVEVNSNSGIFITMNPAGKGYGGRQKLPDNLKQLFRPVAMSHPDNELIAEVILYSEGFKDAKVLSRKLVAIFNLSRELLTPQQHYDWGLRALKTVLRGSGNLLRQLNKSGTTQNANESHIVVQALRLNTMSKFTFTDCTRFDALIKDVFPGIELKEVEYDELSAALKQVFEEANYEIIPNQIKKALELYEQLCQRMGVVIVGPSGAGKSTLWRMLRAALCKTGKVVKQYTMNPKAMPRYQLLGHIDMDTREWSDGVLTNSARQVVREPQDVSSWIICDGDIDPEWIESLNSVLDDNRLLTMPSGERIQFGPNVNFVFETHDLSCASPATISRMGMIFLSDEETDLNSLIKSWLRNQPAEYRNNLENWIGDYFEKALQWVLKQNDYVVETSLVGTVMNGLSHLHGCRDHDEFIINLIRGLGGNLNMKSRLEFTKEVFHWARESPPDFHKPMDTYYDSTRGRLATYVLKKPEDLTADDFSNGLTLPVIQTPDMQRGLDYFKPWLSSDTKQPFILVGPEGCGKGMLLRYAFSQLRSTQIATVHCSAQTTSRHLLQKLSQTCMVISTNTGRVYRPKDCERLVLYLKDINLPKLDKWGTSTLVAFLQQVLTYQGFYDENLEWVGLENIQIVASMSAGGRLGRHKLTTRFTSIVRLCSIDYPEREQLQTIYGAYLEPVLHKNLKNHSIWGSSSKIYLLAGSMVQVYEQVRAKFTVDDYSHYFFTPCILTQWVLGLFRYDLEGGSSNHPLDYVLEIVAYEARRLFRDKIVGAKELHLFDIILTSVFQGDWGSDILDNMSDSFYVTWGARHNSGARAAPGQPLPPHGKPLGKLNSTDLKDVIKKGLIHYGRDNQNLDILLFHEVLEYMSRIDRVLSFPGGSLLLAGRSGVGRRTITSLVSHMHGAVLFSPKISRGYELKQFKNDLKHVLQLAGIEAQQVVLLLEDYQFVHPTFLEMINSLLSSGEVPGLYTLEELEPLLLPLKDQASQDGFFGPVFNYFTYRIQQNLHIVLIMDSANSNFMINCESNPALHKKCQVLWMEGWSNSSMKKIPEMLFSETGGGEKYNDKKRKEEKKKNSVDPDFLKSFLLIHESCKAYGATPSRYMTFLHVYSAISSSKKKELLKRQSHLQAGVSKLNEAKALVDELNRKAGEQSVLLKTKQDEADAALQMITVSMQDASEQKTELERLKHRIAEEVVKIEERKNKIDDELKEVQPLVNEAKLAVGNIKPESLSEIRSLRMPPDVIRDILEGVLRLMGIFDTSWVSMKSFLAKRGVREDIATFDARNISKEIRESVEELLFKNKGSFDPKNAKRASTAAAPLAAWVKANIQYSHVLERIHPLETEQAGLESNLKKTEDRKRKLEELLNSVGQKVSELKEKFQSRTSEAAKLEAEVSKAQETIKAAEVLINQLDREHKRWNAQVVEITEELATLPKRAQLAAAFITYLSAAPESLRKTCLEEWTKSAGLEKFDLRRFLCTESEQLIWKSEGLPSDDLSIENALVILQSRVCPFLIDPSSQATEWLKTHLKDSRLEVINQQDSNFITALELAVRFGKTLIIQEMDGVEPVLYPLLRRDLVAQGPRYVVQIGDKIIDYNEEFRLFLSTRNPNPFIPPDAASIVTEVNFTTTRSGLRGQLLALTIQHEKPDLEEQKTKLLQQEEDKKIQLAKLEESLLETLATSQGNILENKDLIESLNQTKASSALIQESLKESYKLQISLDQERDAYLPLAESASKMYFIISDLSKINNMYRFSLAAFLRLFQRALQNKQDSENTEQRIQSLISSLQHMVYEYICRCLFKADQLMFALHFVRGMHPELFQENEWDTFTGVVVGDMLRKADSQQKIRDQLPSWIDQERSWAVATLKIALPSLYQTLCFEDAALWRTYYNNSMCEQEFPSILAKKVSLFQQILVVQALRPDRLQSAMALFACKTLGLKEVSPLPLNLKRLYKETLEIEPILIIISPGADPSQELQELANAERSGECYHQVAMGQGQADLAIQMLKECARNGDWLCLKNLHLVVSWLPVLEKELNTLQPKDTFRLWLTAEVHPNFTPILLQSSLKITYESPPGLKKNLMRTYESWTPEQISKKDNTHRAHALFSLAWFHAACQERRNYIPQGWTKFYEFSLSDLRAGYNIIDRLFDGAKDVQWEFVHGLLENAIYGGRIDNYFDLRVLQSYLKQFFNSSVIDVFNQRNKKSIFPYSVSLPQSCSILDYRAVIEKIPEDDKPSFFGLPANIARSSQRMISSQVISQLRILGRSITAGSKFDREIWSNELSPVLNLWKKLNQNSNLIHQKVPPPNDRQGSPILSFIILEQFNAIRLVQSVHQSLAALSKVIRGTTLLSSEVQKLASALLNQKCPLAWQSKWEGPEDPLQYLRGLVARALAIQNWVDKAEKQALLSETLDLSELFHPDTFLNALRQETARAVGRSVDSLKFVASWKGRLQEAKLQIKISGLLLEGCSFDGNQLSENQLDSPSVSSVLPCFMGWIPQDACGPYSPDECISLPVYTSAERDRVVTNIDVPCGGNQDQWIQCGAALFLKNQ

SEQ ID NO: 9675 - protein, 803 aa, Homo sapiens
MDFPQHSQHVLEQLNQQRQLGLLCDCTFVVDGVHFKAHKAVLAACSEYFKMLFVDQKDVVHLDISNAAGLGQVLEFMYTAKLSLSPENVDDVLAVATFLQMQDIITACHALKSLAEPATSPGGNAEALATEGGDKRAKEEKVATSTLSRLEQAGRSTPIGPSRDLKEERGGQAQSAASGAEQTEKADAPREPPPVELKPDPTSGMAAAEAEAALSESSEQEMEVEPARKGEEEQKEQEEQEEEGAGPAEVKEEGSQLENGEAPEENENEESAGTDSGQELGSEARGLRSGTYGDRTESKAYGSVIHKCEDCGKEFTHTGNFKRHIRIHTGEKPFSCRECSKAFSDPAACKAHEKTHSPLKPYGCEECGKSYRLISLLNLHKKRHSGEARYRCEDCGKLFTTSGNLKRHQLVHSGEKPYQCDYCGRSFSDPTSKMRHLETHDTDKEHKCPHCDKKFNQVGNLKAHLKIHIADGPLKCRECGKQFTTSGNLKRHLRIHSGEKPYVCIHCQRQFADPGALQRHVRIHTGEKPCQCVMCGKAFTQASSLIAHVRQHTGEKPYVCERCGKRFVQSSQLANHIRHHDNIRPHKCSVCSKAFVNVGDLSKHIIIHTGEKPYLCDKCGRGFNRVDNLRSHVKTVHQGKAGIKILEPEEGSEVSVVTVDDMVTLATEALAATAVTQLTVVPVGAAVTADETEVLKAEISKAVKQVQEEDPNTHILYACDSCGDKFLDANSLAQHVRIHTAQALVMFQTDADFYQQYGPGGTWPAGQVLQAGELVFRPRDGAEGQPALAETSPTAPECPPPAE

SEQ ID NO: 9676 - protein, 388 aa, Homo sapiens
MGAAAWARPLSVSFLLLLLPLPGMPAGSWDPAGYLLYCPCMGRFGNQADHFLGSLAFAKLLNRTLAVPPWIEYQHHKPPFTNLHVSYQKYFKLEPLQAYHRVISLEDFMEKLAPTHWPPEKRVAYCFEVAAQRSPDKKTCPMKEGNPFGPFWDQFHVSFNKSELFTGISFSASYREQWSQRFSPKEHPVLALPGAPAQFPVLEEHRPLQKYMVWSDEMVKTGEAQIHAHLVRPYVGIHLRIGSDWKNACAMLKDGTAGSHFMASPQCVGYSRSTAAPLTMTMCLPDLKEIQRAVKLWVRSLDAQSVYVATDSESYVPELQQLFKGKVKVVSLKPEVAQVDLYILGQADHFIGNCVSSFTAFVKRERDLQGRPSSFFGMDRPPKLRDEF

SEQ ID NO: 9677 - protein, 3664 aa, Homo sapiens
MVRETRHLWVGNLPENVREEKIIEHFKRYGRVESVKILPKRGSEGGVAAFVDFVDIKSAQKAHNSVNKMGDRDLRTDYNEPGTIPSAARGLDDTVSIASRSREVSGFRGGGGGPAYGPPPSLHAREGRYERRLDGASDNRERAYEHSAYGHHERGTGGFDRTRHYDQDYYRDPRERTLQHGLYYASRSRSPNRFDAHDPRYEPRAREQFTLPSVVHRDIYRDDITREVRGRRPERNYQHSRSRSPHSSQSRNQSPQRLASQASRPTRSPSGSGSRSRSSSSDSISSSSSTSSDSSDSSSSSSDDSPARSVQSAAVPAPTSQLLSSLEKDEPRKSFGIKVQNLPVRSTDTSLKDGLFHEFKKFGKVTSVQIHGTSEERYGLVFFRQQEDQEKALTASKGKLFFGMQIEVTAWIGPETESENEFRPLDERIDEFHPKATRTLFIGNLEKTTTYHDLRNIFQRFGEIVDIDIKKVNGVPQYAFLQYCDIASVCKAIKKMDGEYLGNNRLKLGFGKSMPTNCVWLDGLSSNVSDQYLTRHFCRYGPVVKVVFDRLKGMALVLYNEIEYAQAAVKETKGRKIGGNKIKVDFANRESQLAFYHCMEKSGQDIRDFYEMLAERREERRASYDYNQDRTYYESVRTPGTYPEDSRRDYPARGREFYSEWETYQGDYYESRYYDDPREYRDYRNDPYEQDIREYSYRQRERERERERFESDRDRDHERRPIERSQSPVHLRRPQSPGASPSQAERLPSDSERRLYSRSSDRSGSCSSLSPPRYEKLDKSRLERYTKNEKTDKERTFDPERVERERRLIRKEKVEKDKTDKQKRKGKVHSPSSQSSETDQENEREQSPEKPRSCNKLSREKADKEGIAKNRLELMPCVVLTRVKEKEGKVIDHTPVEKLKAKLDNDTVKSSALDQKLQVSQTEPAKSDLSKLESVRMKVPKEKGLSSHVEVVEKEGRLKARKHLKPEQPADGVSAVDLEKLEARKRRFADSNLKAEKQKPEVKKSSPEMEDARVLSKKQPDVSSREVILLREGEAERKPVRKEILKRESKKIKLDRLNTVASPKDCQELASISVGSGSRPSSDLQARLGELAGESVENQEVQSKKPIPSKPQLKQLQVLDDQGPEREDVRKNYCSLRDETPERKSGQEKSHSVNTEEKIGIDIDHTQSYRKQMEQSRRKQQMEMEIAKSEKFGSPKKDVDEYERRSLVHEVGKPPQDVTDDSPPSKKKRMDHVDFDICTKRERNYRSSRQISEDSERTGGSPSVRHGSFHEDEDPIGSPRLLSVKGSPKVDEKVLPYSNITVREESLKFNPYDSSRREQMADMAKIKLSVLNSEDELNRWDSQMKQDAGRFDVSFPNSIIKRDSLRKRSVRDLEPGEVPSDSDEDGEHKSHSPRASALYESSRLSFLLRDREDKLRERDERLSSSLERNKFYSFALDKTITPDTKALLERAKSLSSSREENWSFLDWDSRFANFRNNKDKEKVDSAPRPIPSWYMKKKKIRTDSEGKMDDKKEDHKEEEQERQELFASRFLHSSIFEQDSKRLQHLERKEEDSDFISGRIYGKQTSEGANSTTDSIQEPVVLFHSRFMELTRMQQKEKEKDQKPKEVEKQEDTENHPKTPESAPENKDSELKTPPSVGPPSVTVVTLESAPSALEKTTGDKTVEAPLVTEEKTVEPATVSEEAKPASEPAPAPVEQLEQVDLPPGADPDKEAAMMPAGVEEGSSGDQPPYLDAKPPTPGASFSQAESNVDPEPDSTQPLSKPAQKSEEANEPKAEKPDATADAEPDANQKAEAAPESQPPASEDLEVDPPVAAKDKKPNKSKRSKTPVQAAAVSIVEKPVTRKSERIDREKLKRSNSPRGEAQKLLELKMEAEKITRTASKNSAADLEHPEPSLPLSRTRRRNVRSVYATMGDHENRSPVKEPVEQPRVTRKRLERELQEAAAVPTTPRRGRPPKTRRRADEEEENEAKEPAETLKPPEGWRSPRSQKTAAGGGPQGKKGKNEPKVDATRPEATTEVGPQIGVKESSMEPKAAEEEAGSEQKRDRKDAGTDKNPPETAPVEVVEKKPAPEKNSKSKRGRSRNSRLAVDKSASLKNVDAAVSPRGAAAQAGERESGVVAVSPEKSESPQKEDGLSSQLKSDPVDPDKEPEKEDVSASGPSPEATQLAKQMELEQAVEHIAKLAEASASAAYKADAPEGLAPEDRDKPAHQASETELAAAIGSIINDISGEPENFPAPPPYPGESQTDLQPPAGAQALQPSEEGMETDEAVSGILETEAATESSRPPVNAPDPSAGPTDTKEARGNSSETSHSVPEAKGSKEVEVTLVRKDKGRQKTTRSRRKRNTNKKVVAPVESHVPESNQAQGESPAANEGTTVQHPEAPQEEKQSEKPHSTPPQSCTSDLSKIPSTENSSQEISVEERTPTKASVPPDLPPPPQPAPVDEEPQARFRVHSIIESDPVTPPSDPSIPIPTLPSVTAAKLSPPVASGGIPHQSPPTKVTEWITRQEEPRAQSTPSPALPPDTKASDVDTSSSTLRKILMDPKYVSATSVTSTSVTTAIAEPVSAAPCLHEAPPPPVDSKKPLEEKTAPPVTNNSEIQASEVLVAADKEKVAPVIAPKITSVISRMPVSIDLENSQKITLAKPAPQTLTGLVSALTGLVNVSLVPVNALKGPVKGSVTTLKSLVSTPAGPVNVLKGPVNVLTGPVNVLTTPVNATVGTVNAAPGTVNAAASAVNATASAVTVTAGAVTAASGGVTATTGTVTMAGAVIAPSTKCKQRASANENSRFHPGSMPVIDDRPADAGSGAGLRVNTSEGVVLLSYSGQKTEGPQRISAKISQIPPASAMDIEFQQSVSKSQVKPDSVTASQPPSKGPQAPAGYANVATHSTLVLTAQTYNASPVISSVKADRPSLEKPEPIHLSVSTPVTQGGTVKVLTQGINTPPVLVHNQLVLTPSIVTTNKKLADPVTLKIETKVLQPANLGSTLTPHHPPALPSKLPTEVNHVPSGPSIPADRTVSHLAAAKLDAHSPRPSGPGPSSFPRASHPSSTASTALSTNATVMLAAGIPVPQFISSIHPEQSVIMPPHSITQTVSLSHLSQGEVRMNTPTLPSITYSIRPEALHSPRAPLQPQQIEVRAPQRASTPQPAPAGVPALASQHPPEEEVHYHLPVARATAPVQSEVLVMQSEYRLHPYTVPRDVRIMVHPHVTAVSEQPRAADGVVKVPPASKAPQQPGKEAAKTPDAKAAPTPTPAPVPVPVPLPAPAPAPHGEARILTVTPSNQLQGLPLTPPVVVTHGVQIVHSSGELFQEYRYGDIRTYHPPAQLTHTQFPAASSVGLPSRTKTAAQGPPPEGEPLQPPQPVQSTQPAQPAPPCPPSQLGQPGQPPSSKMPQVSQEAKGTQTGVEQPRLPAGPANRPPEPHTQVQRAQAETGPTSFPSPVSVSMKPDLPVSLPTQTAPKQPLFVPTTSGPSTPPGLVLPHTEFQPAPKQDSSPHLTSQRPVDMVQLLKKYPIVWQGLLALKNDTAAVQLHFVSGNNVLAHRSLPLSEGGPPLRIAQRMRLEATQLEGVARRMTVETDYCLLLALPCGRDQEDVVSQTESLKAAFITYLQAKQAAGIINVPNPGSNQPAYVLQIFPPCEFSESHLSRLAPDLLASISNISPHLMIVIASV

SEQ ID NO: 9678 - protein, 210 aa, Homo sapiens
MLHCVQRALIRSQELGDEKIQIVSQMVELVENRTRQVDSHVELFEAQQELGDTAGNSGKAGADRPKGEAAAQADKPNSKRSRRQRNNENRENASSNHDHDDGASGTPKEKKAKTSKKKKRSKAKAEREASPADLPIDPNEPTYCLCNQVSYGEMIGCDNDECPIEWFHFSCVGLNHKPKGKWYCPKCRGENEKTMDKALEKSKKERAYNR

SEQ ID NO: 9679 - protein, 241 aa, Homo sapiens
MAEEQPQVELFVKAGSDGAKIGNCPFSQRLFMVLWLKGVTFNVTTVDTKRRTETVQKLCPGGQLPFLLYGTEVHTDTNKIEEFLEAVLCPPRYPKLAALNPESNTAGLDIFAKFSAYIKNSNPALNDNLEKGLLKALKVLDNYLTSPLPEEVDETSAEDEGVSQRKFLDGNELTLADCNLLPKLHIVQVVCKKYRGFTIPEAFRGVHRYLSNAYAREEFASTCPDDEEIELAYEQVAKALK

SEQ ID NO: 9680 - protein, 285 aa, Homo sapiens
MGTPGEGLGRCSHALIRGVPESLASGEGAGAGLPALDLAKAQREHGVLGGKLRQRLGLQLLELPPEESLPLGPLLGDTAVIQGDTALITRPWSPARRPEVDGVRKALQDLGLRIVEIGDENATLDGTDVLFTGREFFVGLSKWTNHRGAEIVADTFRDFAVSTVPVSGPSHLRGLCGMGGPRTVVAGSSDAAQKAVRAMAVLTDHPYASLTLPDDAAADCLFLRPGLPGVPPFLLHRGGGDLPNSQEALQKLSDVTLVPVSCSELEKAGAGLSSLCLVLSTRPHS

SEQ ID NO: 9681 - protein, 999 aa, Homo sapiens
MEPGEVKDRILENISLSVKKLQSYFAACEDEIPAIRNHDKVLQRLCEHLDHALLYGLQDLSSGYWVLVVHFTRREAIKQIEVLQHVATNLGRSRAWLYLALNENSLESYLRLFQENLGLLHKYYVKNALVCSHDHLTLFLTLVSGLEFIRFELDLDAPYLDLAPYMPDYYKPQYLLDFEDRLPSSVHGSDSLSLNSFNSVTSTNLEWDDSAIAPSSEDGDLTDTVSGPRSTASDLTSSKASTRSPTQRQNPFNEEPAETVSSSDTTPVHTTSQEKEEAQALDPPDACTELEVIRVTKKKKIGKKKKSRSDEEASPLHPACSQKKCAKQGDGDSRNGSPSLGRDSPDTMLASPQEEGEGPSSTTESSERSEPGLLIPEMKDTSMERLGQPLSKVIDQLNGQLDPSTWCSRAEPPDQSFRTGSPGDAPERPPLCDFSEGLSAPMDFYRFTVESPSTVTSGGGHHDPAGLGQPLHVPSSPEAAGQEEEGGGGEGQTPRPLEDTTREAQELEAQLSLVREGPVSEPEPGTQEVLCQLKRDQPSPCLSSAEDSGVDEGQGSPSEMVHSSEFRVDNNHLLLLMIHVFRENEEQLFKMIRMSTGHMEGNLQLLYVLLTDCYVYLLRKGATEKPYLVEEAVSYNELDYVSVGLDQQTVKLVCTNRRKQFLLDTADVALAEFFLASLKSAMIKGCREPPYPSILTDATMEKLALAKFVAQESKCEASAVTVRFYGLVHWEDPTDESLGPTPCHCSPPEGTITKEGMLHYKAGTSYLGKEHWKTCFVVLSNGILYQYPDRTDVIPLLSVNMGGEQCGGCRRANTTDRPHAFQVILSDRPCLELSAESEAEMAEWMQHLCQAVSKGVIPQGVAPSPCIPCCLVLTDDRLFTCHEDCQTSFFRSLGTAKLGDISAVSTEPGKEYCVLEFSQDSQQLLPPWVIYLSCTSELDRLLSALNSGWKTIYQVDLPHTAIQEASNKKKFEDALSLIHSAWQRSDSLCRGRASRDPWC

SEQ ID NO: 9682 - protein, 1019 aa, Homo sapiens
MEPGEVKDRILENISLSVKKLQSYFAACEDEIPAIRNHDKVLQRLCEHLDHALLYGLQDLSSGYWVLVVHFTRREAIKQIEVLQHVATNLGRSRAWLYLALNENSLESYLRLFQENLGLLHKYYVKNALVCSHDHLTLFLTLVSGLEFIRFELDLDAPYLDLAPYMPDYYKPQYLLDFEDRLPSSVHGSDSLSLNSFNSVTSTNLEWDDSAIAPSSEDYDFGDVFPAVPSVPSTDWEDGDLTDTVSGPRSTASDLTSSKASTRSPTQRQNPFNEEPAETVSSSDTTPVHTTSQEKEEAQALDPPDACTELEVIRVTKKKKIGKKKKSRSDEEASPLHPACSQKKCAKQGDGDSRNGSPSLGRDSPDTMLASPQEEGEGPSSTTESSERSEPGLLIPEMKDTSMERLGQPLSKVIDQLNGQLDPSTWCSRAEPPDQSFRTGSPGDAPERPPLCDFSEGLSAPMDFYRFTVESPSTVTSGGGHHDPAGLGQPLHVPSSPEAAGQEEEGGGGEGQTPRPLEDTTREAQELEAQLSLVREGPVSEPEPGTQEVLCQLKRDQPSPCLSSAEDSGVDEGQGSPSEMVHSSEFRVDNNHLLLLMIHVFRENEEQLFKMIRMSTGHMEGNLQLLYVLLTDCYVYLLRKGATEKPYLVEEAVSYNELDYVSVGLDQQTVKLVCTNRRKQFLLDTADVALAEFFLASLKSAMIKGCREPPYPSILTDATMEKLALAKFVAQESKCEASAVTVRFYGLVHWEDPTDESLGPTPCHCSPPEGTITKEGMLHYKAGTSYLGKEHWKTCFVVLSNGILYQYPDRTDVIPLLSVNMGGEQCGGCRRANTTDRPHAFQVILSDRPCLELSAESEAEMAEWMQHLCQAVSKGVIPQGVAPSPCIPCCLVLTDDRLFTCHEDCQTSFFRSLGTAKLGDISAVSTEPGKEYCVLEFSQDSQQLLPPWVIYLSCTSELDRLLSALNSGWKTIYQVDLPHTAIQEASNKKKFEDALSLIHSAWQRSDSLCRGRASRDPWC

SEQ ID NO: 9683 - protein, 193 aa, Homo sapiens
MAVFLQLLPLLLSRAQGNPGASLDGRPGDRVNLSCGGVSHPIRWVWAPSFPACKGLSKGRRPILWASSSGTPTVPPLQPFVGRLRSLDSGIRRLELLLSAGDSGTFFCKGRHEDESRTVLHVLGDRTYCKAPGPTHALSPPHSSTCENRAPEASKGGRAQDSRGPGPGTEPALCGSGPSSPQQAPPAVHSGPC

SEQ ID NO: 9684 - protein, 217 aa, Homo sapiens
MAVFLQLLPLLLSRAQGNPGASLDGRPGDRVNLSCGGVSHPIRWVWAPSFPACKGLSKGRRPILWASSSGTPTVPPLQPFVGRLRSLDSGIRRLELLLSAGDSGTFFCKGRHEDESRTVLHVLGDRTYCKAPGPTHGACPRNRFDHSLDLLCPPHIAPLVKTEPQRPVKEEEPKIPGDLDQEPSLLYADLDHLALSRPRRLSTADPADASTIYAVVV

SEQ ID NO: 9685 - protein, 854 aa, Homo sapiens
MASEGPREPESEGIKLSADVKPFVPRFAGLNVAWLESSEACVFPSSAATYYPFVQEPPVTEQKIYTEDMAFGASTFPPQYLSSEITLHPYAYSPYTLDSTQNVYSVPGSQYLYNQPSCYRGFQTVKHRNENTCPLPQEMKALFKKKTYDEKKTYDQQKFDSERADGTISSEIKSARGSHHLSIYAENSLKSDGYHKRTDRKSRIIAKNVSTSKPEFEFTTLDFPELQGAENNMSEIQKQPKWGPVHSVSTDISLLREVVKPAAVLSKGEIVVKNNPNESVTANAATNSPSCTRELSWTPMGYVVRQTLSTELSAAPKNVTSMINLKTIASSADPKNVSIPSSEALSSDPSYNKEKHIIHPTQKSKASQGSDLEQNEASRKNKKKKEKSTSKYEVLTVQEPPRIEDAEEFPNLAVASERRDRIETPKFQSKQQPQDNFKNNVKKSQLPVQLDLGGMLTALEKKQHSQHAKQSSKPVVVSVGAVPVLSKECASGERGRRMSQMKTPHNPLDSSAPLMKKGKQREIPKAKKPTSLKKIILKERQERKQRLQENAVSPAFTSDDTQDGESGGDDQFPEQAELSGPEGMDELISTPSVEDKSEEPPGTELQRDTEASHLAPNHTTFPKIHSRRFRDYCSQMLSKEVDACVTDLLKELVRFQDRMYQKDPVKAKTKRRLVLGLREVLKHLKLKKLKCVIISPNCEKIQSKGGLDDTLHTIIDYACEQNIPFVFALNRKALGRSLNKAVPVSVVGIFSYDGAQDQFHKMVELTVAARQAYKTMLENVQQELVGEPRPQAPPSLPTQGPSCPAEDGPPALKEKEEPHYIEIWKKHLEAYSGCTLELEESLEASTSQMMNLNL

SEQ ID NO: 9686 - protein, 237 aa, Homo sapiens
MAVFLQLLPLLLSRAQGNPGASLDGRPGDRVNLSCGGVSHPIRWVWAPSFPACKGLSKGRRPILWASSSGTPTVPPLQPFVGRLRSLDSGIRRLELLLSAGDSGTFFCKGRHEDESRTVLHVLGDRTYCKAPGPTHGSVYPQLLIPLLGAGLVLGLGALGLVWWLHRRLPPQPIRPLPRFALSPPHSSTCENRAPEASKGGRAQDSRGPGPGTEPALCGSGPSSPQQAPPAVHSGPC

SEQ ID NO: 9687 - protein, 222 aa, Homo sapiens
MAVFLQLLPLLLSRAQGNPGASLDGRPGDRVNLSCGGVSHPIRWVWAPSFPACKGLSKGRRPILWASSSGTPTVPPLQPFVGRLRSLDSGIRRLELLLSAGDSGTFFCKGRHEDESRTVLHVLGDRTYCKAPGPTHGSVYPQLLIPLLGAGLVLGLGALGLVWWLHRRLPPQPIRPLPRFALSPPHSSTCENRAPEASKGGRAQDSRGPGPGTGKGMGMGRG

SEQ ID NO: 9688 - protein, 398 aa, Homo sapiens
MELEEGKAGSGLRQYYLSKIEELQLIVNDKSQNLRRLQAQRNELNAKVRLLREELQLLQEQGSYVGEVVRAMDKKKVLVKVHPEGKFVVDVDKNIDINDVTPNCRVALRNDSYTLHKILPNKVDPLVSLMMVEKVPDSTYEMIGGLDKQIKEIKEVIELPVKHPELFEALGIAQPKGVLLYGPPGTGKTLLARAVAHHTDCTFIRVSGSELVQKFIGEGARMVRELFVMAREHAPSIIFMDEIDSIGSSRLEGGSGGDSEVQRTMLELLNQLDGFEATKNIKVIMATNRIDILDSALLRPGRIDRKIEFPPPNEEARLDILKIHSRKMNLTRGINLRKIAELMPGASGAEVKGVCTEAGMYALRERRVHVTQEDFEMAVAKVMQKDSEKNMSIKKLWK

SEQ ID NO: 9689 - protein, 197 aa, Homo sapiens
MAVFLQLLPLLLSRAQGNPGASLDGRPGDRVNLSCGGVSHPIRWVWAPSFPACKGLSKGRRPILWASSSGTPTVPPLQPFVGRLRSLDSGIRRLELLLSAGDSGTFFCKGRHEDESRTVLHVLGDRTYCKAPGPTHAPLVKTEPQRPVKEEEPKIPGDLDQEPSLLYADLDHLALSRPRRLSTADPADASTIYAVVV

SEQ ID NO: 9690 - protein, 79 aa, Homo sapiens
MAHKQIYYSDKYFDEHYEYRHVMLPRELSKQVPKTHLMSEEEWRRLGVQQSLGWVHYMIHEPEPHILLFRRPLPKDQQK

SEQ ID NO: 9691 - protein, 125 aa, Homo sapiens
MKALMLLTLSVLLCWVSADIRCHSCYKVPVLGCVDRQSCRLEPGQQCLTTHAYLGKMWVFSNLRCGTPEEPCQEAFNQTNRKLGLTYNTTCCNKDNCNSAGPRPTPALGLVFLTSLAGLGLWLLH

SEQ ID NO: 9692 - protein, 1669 aa, Homo sapiens
MGPRLSVWLLLLPAALLLHEEHSRAAAKGGCAGSGCGKCDCHGVKGQKGERGLPGLQGVIGFPGMQGPEGPQGPPGQKGDTGEPGLPGTKGTRGPPGASGYPGNPGLPGIPGQDGPPGPPGIPGCNGTKGERGPLGPPGLPGFAGNPGPPGLPGMKGDPGEILGHVPGMLLKGERGFPGIPGTPGPPGLPGLQGPVGPPGFTGPPGPPGPPGPPGEKGQMGLSFQGPKGDKGDQGVSGPPGVPGQAQVQEKGDFATKGEKGQKGEPGFQGMPGVGEKGEPGKPGPRGKPGKDGDKGEKGSPGFPGEPGYPGLIGRQGPQGEKGEAGPPGPPGIVIGTGPLGEKGERGYPGTPGPRGEPGPKGFPGLPGQPGPPGLPVPGQAGAPGFPGERGEKGDRGFPGTSLPGPSGRDGLPGPPGSPGPPGQPGYTNGIVECQPGPPGDQGPPGIPGQPGFIGEIGEKGQKGESCLICDIDGYRGPPGPQGPPGEIGFPGQPGAKGDRGLPGRDGVAGVPGPQGTPGLIGQPGAKGEPGEFYFDLRLKGDKGDPGFPGQPGMPGRAGSPGRDGHPGLPGPKGSPGSVGLKGERGPPGGVGFPGSRGDTGPPGPPGYGPAGPIGDKGQAGFPGGPGSPGLPGPKGEPGKIVPLPGPPGAEGLPGSPGFPGPQGDRGFPGTPGRPGLPGEKGAVGQPGIGFPGPPGPKGVDGLPGDMGPPGTPGRPGFNGLPGNPGVQGQKGEPGVGLPGLKGLPGLPGIPGTPGEKGSIGVPGVPGEHGAIGPPGLQGIRGEPGPPGLPGSVGSPGVPGIGPPGARGPPGGQGPPGLSGPPGIKGEKGFPGFPGLDMPGPKGDKGAQGLPGITGQSGLPGLPGQQGAPGIPGFPGSKGEMGVMGTPGQPGSPGPVGAPGLPGEKGDHGFPGSSGPRGDPGLKGDKGDVGLPGKPGSMDKVDMGSMKGQKGDQGEKGQIGPIGEKGSRGDPGTPGVPGKDGQAGQPGQPGPKGDPGISGTPGAPGLPGPKGSVGGMGLPGTPGEKGVPGIPGPQGSPGLPGDKGAKGEKGQAGPPGIGIPGLRGEKGDQGIAGFPGSPGEKGEKGSIGIPGMPGSPGLKGSPGSVGYPGSPGLPGEKGDKGLPGLDGIPGVKGEAGLPGTPGPTGPAGQKGEPGSDGIPGSAGEKGEPGLPGRGFPGFPGAKGDKGSKGEVGFPGLAGSPGIPGSKGEQGFMGPPGPQGQPGLPGSPGHATEGPKGDRGPQGQPGLPGLPGPMGPPGLPGIDGVKGDKGNPGWPGAPGVPGPKGDPGFQGMPGIGGSPGITGSKGDMGPPGVPGFQGPKGLPGLQGIKGDQGDQGVPGAKGLPGPPGPPGPYDIIKGEPGLPGPEGPPGLKGLQGLPGPKGQQGVTGLVGIPGPPGIPGFDGAPGQKGEMGPAGPTGPRGFPGPPGPDGLPGSMGPPGTPSVDHGFLVTRHSQTIDDPQCPSGTKILYHGYSLLYVQGNERAHGQDLGTAGSCLRKFSTMPFLFCNINNVCNFASRNDYSYWLSTPEPMPMSMAPITGENIRPFISRCAVCEAPAMVMAVHSQTIQIPPCPSGWSSLWIGYSFVMHTSAGAEGSGQALASPGSCLEEFRSAPFIECHGRGTCNYYANAYSFWLATIERSEMFKKPTPSTLKAGELRTHVSRCQVCMRRT

SEQ ID NO: 9693 - protein, 174 aa, Homo sapiens
MKPQFVGILLSSLLGAALGNRMRCYNCGGSPSSSCKEAVTTCGEGRPQPGLEQIKLPGNRRCFLRGLKIPLGSLKSHLLCPRRQVLKPGVQHPSFILSLSPSDLDSPTSSLRRSPSLQSSGDRVGGRRDLSSPQGLLPGRPVQQRRGKPCGPCRHFGCSSYRPDLSLARTVERI

SEQ ID NO: 9694 - protein, 133 aa, Homo sapiens
MKPQFVGILLSSLLGAALGNRMRCYNCGGSPSSSCKEAVTTCGEGRPQPGLEQIKLPGNPPVTLIHQHPACVAAHHCNQVETESVGDVTYPAHRDCYLGDLCNSAVASHVAPAGILAAAATALTCLLPGLWSG

SEQ ID NO: 9695 - protein, 105 aa, Homo sapiens
MKPFEDALKNQPLGPVLSKAASVECISPVSPRAPDAKMLEELQAETWYQGEMSRKEAEGLLEKDGDFLVRKSTTNPGSFVLTGMHNGQAKHLLLVDPEGTRSNSY

SEQ ID NO: 9696 - protein, 297 aa, Homo sapiens
MAVLFLLLFLCGTPQAADNMQAIYVALGEAVELPCPSPPTLHGDEHLSWFCSPAAGSFTTLVAQVQVGRPAPDPGKPGRESRLRLLGNYSLWLEGSKEEDAGRYWCAVLGQHHNYQNWRVYDVLVLKGSQLSARAADGSPCNVLLCSVVPSRRMDSVTWQEGKGPVRGRVQSFWGSEAALLLVCPGEGLSEPRSRRPRIIRCLMTHNKGVSFSLAASIDASPALCAPSTGWDMPWILMLLLTMGQGVVILALSIVLWRQRVRGAPGRDASIPQFKPEIQVYENIHLARLGPPAHKPR

SEQ ID NO: 9697 - protein, 782 aa, Homo sapiens
MEVRKLSISWQFLIVLVLILQILSALDFDPYRVLGVSRTASQADIKKAYKKLAREWHPDKNKDPGAEDKFIQISKAYEILSNEEKRSNYDQYGDAGENQGYQKQQQQREYRFRHFHENFYFDESFFHFPFNSERRDSIDEKYLLHFSHYVNEVVPDSFKKPYLIKITSDWCFSCIHIEPVWKEVIQELEELGVGIGVVHAGYERRLAHHLGAHSTPSILGIINGKISFFHNAVVRENLRQFVESLLPGNLVEKVTNKNYVRFLSGWQQENKPHVLLFDQTPIVPLLYKLTAFAYKDYLSFGYVYVGLRGTEEMTRRYNINIYAPTLLVFKEHINRPADVIQARGMKKQIIDDFITRNKYLLAARLTSQKLFHELCPVKRSHRQRKYCVVLLTAETTKLSKPFEAFLSFALANTQDTVRFVHVYSNRQQEFADTLLPDSEAFQGKSAVSILERRNTAGRVVYKTLEDPWIGSESDKFILLGYLDQLRKDPALLSSEAVLPDLTDELAPVFLLRWFYSASDYISDCWDSIFHNNWREMMPLLSLIFSALFILFGTVIVQAFSDSNDERESSPPEKEEAQEKTGKTEPSFTKENSSKIPKKGFVEVTELTDVTYTSNLVRLRPGHMNVVLILSNSTKTSLLQKFALEVYTFTGSSCLHFSFLSLDKHREWLEYLLEFAQDAAPIPNQYDKHFMERDYTGYVLALNGHKKYFCLFKPQKTVEEEEAIGSCSDVDSSLYLGESRGKPSCGLGSRPIKGKLSKLSLWMERLLEGSLQRFYIPSWPELD

SEQ ID NO: 9698 - protein, 202 aa, Homo sapiens
MVRIWTTIMIVLILLLRIGPNKPSLSGRQAPAQAQTSDLVPSLFPLGLWAPGFCTWSSPDEDKVWRPAWEQGPKGEPDPRGLRPRKPVPGTGNRDSGTRRRLQDATEQDPRPGNDVASAETAGPPSPSGIRAQDRAPRHRRAPPARMPVAPAPSADGEPLQEQGGGLFHRTRSVYNGLELNTWMKVERLFVEKFHQSFSLDN

SEQ ID NO: 9699 - protein, 1338 aa, Homo sapiens
MASPPRHGPPGPASGDGPNLNNNNNNNNHSVRKCGYLRKQKHGHKRFFVLRGPGAGGDEATAGGGSAPQPPRLEYYESEKKWRSKAGAPKRVIALDCCLNINKRADAKHKYLIALYTKDEYFAVAAENEQEQEGWYRALTDLVSEGRAAAGDAPPAAAPAASCSASLPGALGGSAGAAGAEDSYGLVAPATAAYREVWQVNLKPKGLGQSKNLTGVYRLCLSARTIGFVKLNCEQPSVTLQLMNIRRCGHSDSFFFIEVGRSAVTGPGELWMQADDSVVAQNIHETILEAMKALKELFEFRPRSKSQSSGSSATHPISVPGARRHHHLVNLPPSQTGLVRRSRTDSLAATPPAAKCSSCRVRTASEGDGGAAAGAAAAGARPVSVAGSPLSPGPVRAPLSRSHTLSGGCGGRGSKVALLPAGGALQHSRSMSMPVAHSPPAATSPGSLSSSSGHGSGSYPPPPGPHPPLPHPLHHGPGQRPSSGSASASGSPSDPGFMSLDEYGSSPGDLRAFCSHRSNTPESIAETPPARDGGGGGEFYGYMTMDRPLSHCGRSYRRVSGDAAQDLDRGLRKRTYSLTTPARQRPVPQPSSASLDEYTLMRATFSGSAGRLCPSCPASSPKVAYHPYPEDYGDIEIGSHRSSSSNLGADDGYMPMTPGAALAGSGSGSCRSDDYMPMSPASVSAPKQILQPRAAAAAAAAVPSAGPAGPAPTSAAGRTFPASGGGYKASSPAESSPEDSGYMRMWCGSKLSMEHADGKLLPNGDYLNVSPSDAVTTGTPPDFFSAALHPGGEPLRGVPGCCYSSLPRSYKAPYTCGGDSDQYVLMSSPVGRILEEERLEPQATPGPSQAASAFGAGPTQPPHPVVPSPVRPSGGRPEGFLGQRGRAVRPTRLSLEGLPSLPSMHEYPLPPEPKSPGEYINIDFGEPGARLSPPAPPLLASAASSSSLLSASSPASSLGSGTPGTSSDSRQRSPLSDYMNLDFSSPKSPKPGAPSGHPVGSLDGLLSPEASSPYPPLPPRPSASPSSSLQPPPPPPAPGELYRLPPASAVATAQGPGAASSLSSDTGDNGDYTEMAFGVAATPPQPIAAPPKPEAARVASPTSGVKRLSLMEQVSGVEAFLQASQPPDPHRGAKVIRADPQGGRRRHSSETFSSTTTVTPVSPSFAHNPKRHNSASVENVSLRKSSEGGVGVGPGGGDEPPTSPRQLQPAPPLAPQGRPWTPGQPGGLVGCPGSGGSPMRRETSAGFQNGLNYIAIDVREEPGLPPQPQPPPPPLPQPGDKSSWGRTRSLGGLISAVGVGSTGGGCGGPGPGALPPANTYASIDFLSHHLKEATIVKE

SEQ ID NO: 9700 - protein, 262 aa, Homo sapiens
MKTPFGKTPGQRSRADAGHAGVSANMMKKRTSHKKHRSSVGPSKPVSQPRRNIVGCRIQHGWKEGNGPVTQWKGTVLDQVPVNPSLYLIKYDGFDCVYGLELNKDERVSALEVLPDRVATSRISDAHLADTMIGKAVEHMFETEDGSKDEWRGMVLARAPVMNTWFYITYEKDPVLYMYQLLDDYKEGDLRIMPDSNDSPPAEREPGEVVDSLVGKQVEYAKEDGSKRTGMVIHQVEAKPSVYFIKFDDDFHIYVYDLVKTS

SEQ ID NO: 9701 - protein, 201 aa, Homo sapiens
MKVHMLVGVLVMVGFTVGKVPVPDIRTCHFCLVEDPSVGCISGSEKCTISSSSLCMVITIYYDVKVRFIVRGCGQYISYRCQEKRNTYFAEYWYQAQCCQYDYCNSWSSPQLQSSLPEPHDRPLALPLSDSQIQWFYQALNLSLPLPNFHAGTEPDGLDPMVTLSLNLGLSFAELRRMYLFLNSSGLLVLPQAGLLTPHPS

SEQ ID NO: 9702 - protein, 215 aa, Homo sapiens
MSSSEEVSWISWFCGLRGNEFFCEVDEDYIQDKFNLTGLNEQVPHYRQALDMILDLEPDEELEDNPNQSDLIEQAAEMLYGLIHARYILTNRGIAQMLEKYQQGDFGYCPRVYCENQPMLPIGLSDIPGEAMVKLYCPKCMDVYTPKSSRHHHTDGAYFGTGFPHMLFMVHPEYRPKRPANQFVPRLYGFKIHPMAYQLQLQAASNFKSPVKTIR

SEQ ID NO: 9703 - protein, 228 aa, Homo sapiens
MSSSEEVSWISWFCGLRGNEFFCEVDEDYIQDKFNLTGLNEQVPHYRQALDMILDLEPDEELEDNPNQSDLIEQAAEMLYGLIHARYILTNRGIAQMLEKYQQGDFGYCPRVYCENQPMLPIGLSDIPGEAMVKLYCPKCMDVYTPKSSRHHHTDGAYFGTGFPHMLFMVHPEYRPKRPANQFVPSSCSRHPDVPLLPRRRPFCRMHFRLREVYHQQLIPVHGDHHLL

SEQ ID NO: 9704 - protein, 285 aa, Homo sapiens
MDDSTEREQSRLTSCLKKREEMKLKECVSILPRKESPSVRSSKDGKLLAATLLLALLSCCLTVVSFYQVAALQGDLASLRAELQGHHAEKLPAGAGAPKAGLEEAPAVTAGLKIFEPPAPGEGNSSQNSRNKRAVQGPEETVTQDCLQLIADSETPTIQKGSYTFVPWLLSFKRGSALEEKENKILVKETGYFFIYGQVLYTDKTYAMGHLIQRKKVHVFGDELSLVTLFRCIQNMPETLPNNSCYSAGIAKLEEGDELQLAIPRENAQISLDGDVTFFGALKLL

SEQ ID NO: 9705 - protein, 534 aa, Homo sapiens
MFQFHAGSWESWCCCCLIPADRPWDRGQHWQLEMADTRSVHETRFEAAVKVIQSLPKNGSFQPTNEMMLKFYSFYKQATEGPCKLSRPGFWDPIGRYKWDAWSSLGDMTKEEAMIAYVEEMKKIIETMPMTEKVEELLRVIGPFYEIVEDKKSGRSSDITSVRLEKISKCLEDLGNVLTSTPNAKTVNGKAESSDSGAESEEEEAQEEVKGAEQSDNDKKMMKKSADHKNLEVIVTNGYDKDGFVQDIQNDIHASSSLNGRSTEEVKPIDENLGQTGKSAVCIHQDINDDHVEDVTGIQHLTSDSDSEVYCDSMEQFGQEESLDSFTSNNGPFQYYLGGHSSQPMENSGFREDIQVPPGNGNIGNMQVVAVEGKGEVKHGGEDGRNNSGAPHREKRGGETDEFSNVRRGRGHRMQHLSEGTKGRQVGSGGDGERWGSDRGSRGSLNEQIALVLMRLQEDMQNVLQRLQKLETLTALQAKSSTSTLQTAPQPTSQRPSWWPFEMSPGVLTFAIIWPFIAQWLVYLYYQRRRRKLN

SEQ ID NO: 9706 - protein, 523 aa, Homo sapiens
MFQFHAGSWESWCCCCLIPADRPWDRGQHWQLEMADTRSVHETRFEAAVKVIQSLPKNGSFQPTNEMMLKFYSFYKQATEGPCKLSRPGFWDPIGRYKWDAWSSLGDMTKEEAMIAYVEEMKKIIETMPMTEKVEELLRVIGPFYEIVEDKKSGRSSDITSDLGNVLTSTPNAKTVNGKAESSDSGAESEEEEAQEEVKGAEQSDNDKKMMKKSADHKNLEVIVTNGYDKDGFVQDIQNDIHASSSLNGRSTEEVKPIDENLGQTGKSAVCIHQDINDDHVEDVTGIQHLTSDSDSEVYCDSMEQFGQEESLDSFTSNNGPFQYYLGGHSSQPMENSGFREDIQVPPGNGNIGNMQVVAVEGKGEVKHGGEDGRNNSGAPHREKRGGETDEFSNVRRGRGHRMQHLSEGTKGRQVGSGGDGERWGSDRGSRGSLNEQIALVLMRLQEDMQNVLQRLQKLETLTALQAKSSTSTLQTAPQPTSQRPSWWPFEMSPGVLTFAIIWPFIAQWLVYLYYQRRRRKLN

SEQ ID NO: 9707 - protein, 337 aa, Homo sapiens
MEKSWMLWNFVERWLIALASWSWALCRISLLPLIVTFHLYGGIILLLLIFISIAGILYKFQDVLLYFPEQPSSSRLYVPMPTGIPHENIFIRTKDGIRLNLILIRYTGDNSPYSPTIIYFHGNAGNIGHRLPNALLMLVNLKVNLLLVDYRGYGKSEGEASEEGLYLDSEAVLDYVMTRPDLDKTKIFLFGRSLGGAVAIHLASENSHRISAIMVENTFLSIPHMASTLFSFFPMRYLPLWCYKNKFLSYRKISQCRMPSLFISGLSDQLIPPVMMKQLYELSPSRTKRLAIFPDGTHNDTWQCQGYFTALEQFIKEVVKSHSPEEMAKTSSNVTII

SEQ ID NO: 9708 - protein, 490 aa, Homo sapiens
MADTRSVHETRFEAAVKVIQSLPKNGSFQPTNEMMLKFYSFYKQATEGPCKLSRPGFWDPIGRYKWDAWSSLGDMTKEEAMIAYVEEMKKIIETMPMTEKVEELLRVIGPFYEIVEDKKSGRSSDITSDLGNVLTSTPNAKTVNGKAESSDSGAESEEEEAQEEVKGAEQSDNDKKMMKKSADHKNLEVIVTNGYDKDGFVQDIQNDIHASSSLNGRSTEEVKPIDENLGQTGKSAVCIHQDINDDHVEDVTGIQHLTSDSDSEVYCDSMEQFGQEESLDSFTSNNGPFQYYLGGHSSQPMENSGFREDIQVPPGNGNIGNMQVVAVEGKGEVKHGGEDGRNNSGAPHREKRGGETDEFSNVRRGRGHRMQHLSEGTKGRQVGSGGDGERWGSDRGSRGSLNEQIALVLMRLQEDMQNVLQRLQKLETLTALQAKSSTSTLQTAPQPTSQRPSWWPFEMSPGVLTFAIIWPFIAQWLVYLYYQRRRRKLN

SEQ ID NO: 9709 - protein, 269 aa, Homo sapiens
MIRTLLLSTLVAGALSCGVSTYAPDMSRMLGGEEARPNSWPWQVSLQYSSNGQWYHTCGGSLIANSWVLTAAHCISSSGIYRVMLGQHNLYVAESGSLAVSVSKIVVHKDWNSDQVSKGNDIALLKLANPVSLTDKIQLACLPPAGTILPNNYPCYVTGWGRLQTNGALPDDLKQGQLLVVDYATCSSSGWWGSTVKTNMICAGGDGVICTCNGDSGGPLNCQASDGRWEVHGIGSLTSVLGCNYYYKPSIFTRVSNYNDWINSVIANN

SEQ ID NO: 9710 - protein, 294 aa, Homo sapiens
MFLRRLGGWLPRPWGRRKPMRPDPPYPEPRRVDSSSENSGSDWDSAPETMEDVGHPKTKDSGALRVSGAASEPSKEEPQVEQLGSKRMDSLKWDQPISSTQESGRLEAGGASPKLRWDHVDSGGTRRPGVSPEGGLSVPGPGAPLEKPGRREKLLGWLRGEPGAPSRYLGGPEECLQISTNLTLHLLELLASALLALCSRPLRAALDTLGLRGPLGLWLHGLLSFLAALHGLHAVLSLLTAHPLHFACLFGLLQALVLAVSLREPNGDEAATDWESEGLEREGEEQRGDPGKGL

SEQ ID NO: 9711 - protein, 188 aa, Homo sapiens
MFHQIWAALLYFYGIILNSIYQCPEHSQLTTLGVDGKEFPEVHLGQWYFIAGAAPTKEELATFDPVDNIVFNMAAGSAPMQLHLRATIRMKDGLCVPRKWIYHLTEGSTDLRTEGRPDMKTELFSSSCPGGIMLNETGQGYQRFLLYNRSPHPPEKCVEEFKSLTSCLDSKAFLLTPRNQEACELSNN

SEQ ID NO: 9712 - protein, 69 aa, Homo sapiens
MLGITVLAALLACATPGPTVWPWERTTWRWKTKKDPCLWVWTPSTSTRDGMPSCCAMILPSSSLQSMWS

SEQ ID NO: 9713 - protein, 268 aa, Homo sapiens [sequence omitted]

SEQ ID NO: 9714 - protein, 395 aa, Homo sapiens
MTINGLETAEGLDCVRTIEELARVLRKHSGLRNILPITTAKVPIVKFFHLRSGLEVDISLYNTLALHNTRLLSAYSAIDPRVKYLCYTMKVFTKIYKGEKKPEIFVDGWNIYFFDQIDELPTYWSECGKNTESVGQLWLGLLRFYTEEFDFKEHVISIRRKSLLTTFKKQWTSKYIVIEDPFDLNHNLGAGLSRKMTNFIMKAFINGRRVFGIPVKGFPKDYPSKMEYFFDPDVLTEGELAPNDRCCRICGKIGHFMKDCPMRRKVRRRRDQEDALNQRYPENKEKRSKEDKEIHNKYTEREVSTKEDKPIQCTPQKAKPMRAAADLGREKILRPPVEKWKRQDDKDLREKRCFICGREGHIKKECPQFKGSSGSLSSKYMTQGKASAKRTQQES

SEQ ID NO: 9715 - protein, 1495 aa, Homo sapiens
MGDTAKPYFVKRTKDRGTMDDDDFRRGHPQQDYLIIDDHAKGHGSKMEKGLQKKKITPGNYGNTPRKGPCAVSSNPYAFKNPIYSQPAWMNDSHKDQSKRWLSDEHTGNSDNWREFKPGPRIPVINRQRKDSFQENEDGYRWQDTRGCRTVRRLFHKDLTSLETTSEMEAGSPENKKQRSRPRKPRKTRNEENEQDGDLEGPVIDESVLSTKELLGLQQAEERLKRDCIDRLKRRPRNYPTAKYTCRLCDVLIESIAFAHKHIKEKRHKKNIKEKQEEELLTTLPPPTPSQINAVGIAIDKVVQEFGLHNENLEQRLEIKRIMENVFQHKLPDCSLRLYGSSCSRLGFKNSDVNIDIQFPAIMSQPDVLLLVQECLKNSDSFIDVDADFHARVPVVVCREKQSGLLCKVSAGNENACLTTKHLTALGKLEPKLVPLVIAFRYWAKLCSIDRPEEGGLPPYVFALMAIFFLQQRKEPLLPVYLGSWIEGFSLSKLGNFNLQDIEKDVVIWEHTDSAAGDTGITKEEAPRETPIKRGQVSLILDVKHQPSVPVGQLWVELLRFYALEFNLADLVISIRVKELVSRELKDWPKKRIAIEDPYSVKRNVARTLNSQPVFEYILHCLRTTYKYFALPHKITKSSLLKPLNAITCISEHSKEVINHHPDVQTKDDKLKNSVLAQGPGATSSAANTCKVQPLTLKETAESFGSPPKEEMGNEHISVHPENSDCIQADVNSDDYKGDKVYHPETGRKNEKEKVGRKGKHLLTVDQKRGEHVVCGSTRNNESESTLDLEGFQNPTAKECEGLATLDNKADLDGESTEGTEELEDSLNHFTHSVQGQTSEMIPSDEEEEDDEEEEEEEEPRLTINQREDEDGMANEDELDNTYTGSGDEDALSEEDDELGEAAKYEDVKECGKHVERALLVELNKISLKEENVCEEKNSPVDQSDFFYEFSKLIFTKGKSPTVVCSLCKREGHLKKDCPEDFKRIQLEPLPPLTPKFLNILDQVCIQCYKDFSPTIIEDQAREHIRQNLESFIRQDFPGTKLSLFGSSKNGFGFKQSDLDVCMTINGLETAEGLDCVRTIEELARVLRKHSGLRNILPITTAKVPIVKFFHLRSGLEVDISLYNTLALHNTRLLSAYSAIDPRVKYLCYTMKVFTKMCDIGDASRGSLSSYAYTLMVLYFLQQRNPPVIPVLQEIYKGEKKPEIFVDGWNIYFFDQIDELPTYWSECGKNTESVGQLWLGLLRFYTEEFDFKEHVISIRRKSLLTTFKKQWTSKYIVIEDPFDLNHNLGAGLSRKMTNFIMKAFINGRRVFGIPVKGFPKDYPSKMEYFFDPDVLTEGELAPNDRCCRICGKIGHFMKDCPMRRKVRRRRDQEDALNQRYPENKEKRSKEDKEIHNKYTEREVSTKEDKPIQCTPQKAKPMRAAADLGREKILRPPVEKWKRQDDKDLREKRCFICGREGHIKKECPQFKGSSGSLSSKYMTQGKASAKRTQQES

SEQ ID NO: 9716 - protein, 1132 aa, Homo sapiens
MEPNDSTSTAVEEPDSLEVLVKTLDSQTRTFIVGAQMNVKEFKEHIAASVSIPSEKQRLIYQGRVLQDDKKLQEYNVGGKVIHLVERAPPQTHLPSGASSGTGSASATHGGGSPPGTRGPGASVHDRNANSYVMVGTFNLPSDGSAVDVHINMEQAPIQSEPRVRLVMAQHMIRDIQTLLSRMETLPYLQCRGGPQPQHSQPPPQPPAVTPEPVALSSQTSEPVESEAPPREPMEAEEVEERAPAQNPELTPGPAPAGPTPAPETNAPNHPSPAEYVEVLQELQRLESRLQPFLQRYYEVLGAAATTDYNNNHEGREEDQRLINLVGESLRLLGNTFVALSDLRCNLACTPPRHLHVVRPMSHYTTPMVLQQAAIPIQINVGTTVTMTGNGTRPPPTPNAEAPPPGPGQASSVAPSSTNVESSAEGAPPPGPAPPPATSHPRVIRISHQSVEPVVMMHMNIQDSGTQPGGVPSAPTGPLGPPGHGQTLGQQVPGFPTAPTRVVIARPTPPQARPSHPGGPPVSGTLQGAGLGTNASLAQMVSGLVGQLLMQPVLVAQGTPGMAPPPAPATASASAGTTNTATTAGPAPGGPAQPPPTPQPSMADLQFSQLLGNLLGPAGPGAGGSGVASPTITVAMPGVPAFLQGMTDFLQATQTAPPPPPPPPPPPPAPEQQTMPPPGSPSGGAGSPGGLGLESLSPEFFTSVVQGVLSSLLGSLGARAGSSESIAAFIQRLSGSSNIFEPGADGALGFFGALLSLLCQNFSMVDVVMLLHGHFQPLQRLQPQLRSFFHQHYLGGQEPTPSNIRMATHTLITGLEEYVRESFSLVQVQPGVDIIRTNLEFLQEQFNSIAAHVLHCTDSGFGARLLELCNQGLFECLALNLHCLGGQQMELAAVINGRIRRMSRGVNPSLVSWLTTMMGLRLQVVLEHMPVGPDAILRYVRRVGDPPQPLPEEPMEVQGAERASPEPQRENASPAPGTTAEEAMSRGPPPAPEGGSRDEQDGASAETEPWAAAVPPEWVPIIQQDIQSQRKVKPQPPLSDAYLSGMPAKRRKTMQGEGPQLLLSEAVSRAAKAAGARPLTSPESLSRDLEAPEVQESYRQQLRSDIQKRLQEDPNYSPQRFPNAQRAFADDP

SEQ ID NO: 9717 - protein, 240 aa, Homo sapiens
MATDELATKLSRRLQMEGEGGGETPEQPGLNGAAAAAAGAPDEAAEALGSADCELSAKLLRRADLNQGIGEPQSPSRRVFNPYTEFKEFSRKQIKDMEKMFKQYDAGRDGFIDLMELKLMMEKLGAPQTHLGLKNMIKEVDEDFDSKLSFREFLLIFRKAAAGELQEDSGLCVLARLSEIDVSSEGVKGAKSFFEAKVQAINVSSRFEEEIKAEQEERKKQAEEMKQRKAAFKELQSTFK

SEQ ID NO: 9718 - protein, 502 aa, Homo sapiens
MFGTLLLYCFFLATVPALAETGGERQLSPEKSEIWGPGLKADVVLPARYFYIQAVDTSGNKFTSSPGEKVFQVKVSAPEEQFTRVGVQVLDRKDGSFIVRYRMYASYKNLKVEIKFQGQHVAKSPYILKGPVYHENCDCPLQDSAAWLREMNCPETIAQIQRDLAHFPAVDPEKIAVEIPKRFGQRQSLCHYTLKDNKVYIKTHGEHVGFRIFMDAILLSLTRKVKMPDVELFVNLGDWPLEKKKSNSNIHPIFSWCGSTDSKDIVMPTYDLTDSVLETMGRVSLDMMSVQANTGPPWESKNSTAVWRGRDSRKERLELVKLSRKHPELIDAAFTNFFFFKHDENLYGPIVKHISFFDFFKHKYQINIDGTVAAYRLPYLLVGDSVVLKQDSIYYEHFYNELQPWKHYIPVKSNLSDLLEKLKWAKDHDEEAKKIAKAGQEFARNNLMGDDIFCYYFKLFQEYANLQVSEPQIREGMKRVEPQTEDDLFPCTCHRKKTKDEL

SEQ ID NO: 9719 - protein, 2157 aa, Homo sapiens
MSDRSGPTAKGKDGKKYSSLNLFDTYKGKSLEIQKPAVAPRHGLQSLGKVAIARRMPPPANLPSLKAENKGNDPNVSLVPKDGTGWASKQEQSDPKSSDASTAQPPESQPLPASQTPASNQPKRPPAAPENTPLVPSGVKSWAQASVTHGAHGDGGRASSLLSRFSREEFPTLQAAGDQDKAAKERESAEQSSGPGPSLRPQNSTTWRDGGGRGPDELEGPDSKLHHGHDPRGGLQPSGPPQFPPYRGMMPPFMYPPYLPFPPPYGPQGPYRYPTPDGPSRFPRVAGPRGSGPPMRLVEPVGRPSILKEDNLKEFDQLDQENDDGWAGAHEEVDYTEKLKFSDEEDGRDSDEEGAEGHRDSQSASGEERPPEADGKKGNSPNSEPPTPKTAWAETSRPPETEPGPPAPKPPLPPPHRGPAGNWGPPGDYPDRGGPPCKPPAPEDEDEAWRQRRKQSSSEISLAVERARRRREEEERRMQEERRAACAEKLKRLDEKFGAPDKRLKAEPAAPPAAPSTPAPPPAVPKELPAPPAPPPASAPTPETEPEEPAQAPPAQSTPTPGVAAAPTLVSGGGSTSSTSSGSFEASPVEPQLPSKEGPEPPEEVPPPTTPPVPKVEPKGDGIGPTRQPPSQGLGYPKYQKSLPPRFQRQQQEQLLKQQQQHQWQQHQQGSAPPTPVPPSPPQPVTLGAVPAPQAPPPPPKALYPGALGRPPPMPPMNFDPRWMMIPPYVDPRLLQGRPPLDFYPPGVHPSGLVPRERSDSGGSSSEPFDRHAPAMLRERGTPPVDPKLAWVGDVFTATPAEPRPLTSPLRQAADEDDKGMRSETPPVPPPPPYLASYPGFPENGAPGPPISRFPLEEPGPRPLPWPPGSDEVAKIQTPPPKKEPPKEETAQLTGPEAGRKPARGVGSGGQGPPPPRRESRTETRWGPRPGSSRRGIPPEEPGAPPRRAGPIKKPPPPTKVEELPPKPLEQGDETPKPPKPDPLKITKGKLGGPKETPPNGNLSPAPRLRRDYSYERVGPTSCRGRGRGEYFARGRGFRGTYGGRGRGARSREFRSYREFRGDDGRGGGTGGPNHPPAPRGRTASETRSEGSEYEEIPKRRRQRGSETGSETHESDLAPSDKEAPTPKEGTLTQVPLAPPPPGAPPSPAPARFTARGGRVFTPRGVPSRRGRGGGRPPPQVCPGWSPPAKSLAPKKPPTGPLPPSKEPLKEKLIPGPLSPVARGGSNGGSNVGMEDGERPRRRRHGRAQQQDKPPRFRRLKQERENAARGSEGKPSLTLPASAPGPEEALTTVTVAPAPRRAAAKSPDLSNQNSDQANEEWETASESSDFTSERRGDKEAPPPVLLTPKAVGTPGGGGGGAVPGISAMSRGDLSQRAKDLSKRSFSSQRPGMERQNRRPGPGGKAGSSGSSSGGGGGGPGGRTGPGRGDKRSWPSPKNRSRPPEERPPGLPLPPPPPSSSAVFRLDQVIHSNPAGIQQALAQLSSRQGSVTAPGGHPRHKPGLPQAPQGPSPRPPTRYEPQRVNSGLSSDPHFEEPGPMVRGVGGTPRDSAGVSPFPPKRRERPPRKPELLQEESLPPPHSSGFLGSKPEGPGPQAESRDTGTEALTPHIWNRLHTATSRKSYRPSSMEPWMEPLSPFEDVAGTEMSQSDSGVDLSGDSQVSSGPCSQRSSPDGGLKGAAEGPPKRPGGSSPLNAVPCEGPPGSEPPRRPPPAPHDGDRKELPREQPLPPGPIGTERSQRTDRGTEPGPIRPSHRPGPPVQFGTSDKDSDLRLVVGDSLKAEKELTASVTEAIPVSRDWELLPSAAASAEPQSKNLDSGHCVPEPSSSGQRLYPEVFYGSAGPSSSQISGGAMDSQLHPNSGGFRPGTPSLHPYRSQPLYLPPGPAPPSALLSGLALKGQFLDFSTMQATELGKLPAGGVLYPPPSFLYSPAFCPSPLPDTSLLQVRQDLPSPSDFYSTPLQPGGQSGFLPSGAPAQQMLLPMVDSQLPVVNFGSLPPAPPPAPPPLSLLPVGPALQPPSLAVRPPPAPATRVLPSPARPFPASLGRAELHPVELKPFQDYQKLSSNLGGPGSSRTPPTGRSFSGLNSRLKATPSTYSGVFRTQRVDLYQQASPPDALRWIPKPWERTGPPPREGPSRRAEEPGSRGDKEPGLPPPR

SEQ ID NO: 9720 - protein, 716 aa, Homo sapiens
MFSLSSTVQPQVTVPLSHLINAFHTPKNTSVSLSGVSVSQNQHRDVVPEHEAPSSEPSLNLRDLGLSELKIGQIDQLVENLLPGFCKGKNISSHWHTSHVSAQSFFENKYGNLDIFSTLRSSCLYRHHSRALQSICSDLQYWPVFIQSRGFKTLKSRTRRLQSTSERLAETQNIAPSFVKGFLLRDRGSDVESLDKLMKTKNIPEAHQDAFKTGFAEGFLKAQALTQKTNDSLRRTRLILFVLLLFGIYGLLKNPFLSVRFRTTTGLDSAVDPVQMKNVTFEHVKGVEEAKQELQEVVEFLKNPQKFTILGGKLPKGILLVGPPGTGKTLLARAVAGEADVPFYYASGSEFDEMFVGVGASRIRNLFREAKANAPCVIFIDELDSVGGKRIESPMHPYSRQTINQLLAEMDGFKPNEGVIIIGATNFPEALDNALIRPGRFDMQVTVPRPDVKGRTEILKWYLNKIKFDQSVDPEIIARGTVGFSGAELENLVNQAALKAAVDGKEMVTMKELEFSKDKILMGPERRSVEIDNKNKTITAYHESGHAIIAYYTKDAMPINKATIMPRGPTLGHVSLLPENDRWNETRAQLLAQMDVSMGGRVAEELIFGTDHITTGASSDFDNATKIAKRMVTKFGMSEKLGVMTYSDTGKLSPETQSAIEQEIRILLRDSYERAKHILKTHAKEHKNLAEALLTYETLDAKEIQIVLEGKKLEVR

SEQ ID NO: 9721 - protein, 186 aa, Homo sapiens
MNLPHLMSLASHLASHGFFCLRFTCKGLNIVHRIKAYKSVLNYLKTSGEYKLAGVFLGGRSMGSRAAASVMCHIEPDDGDDFVRGLICISYPLHHPKQQHKLRDEDLFRLKEPVLFVSGSADEMCEKNLLEKVAQKMQAPHKIHWIEKANHSMAVKGRSTNDVFKEINTQILFWIQEITEMDKKCH

SEQ ID NO: 9722 - protein, 1262 aa, Homo sapiens
MATAATEEPFPFHGLLPKKETGAASFLCRYPEYDGRGVLIAVLDTGVDPGAPGMQVTTDGKPKIVDIIDTTGSGDVNTATEVEPKDGEIVGLSGRVLKIPASWTNPSGKYHIGIKNGYDFYPKALKERIQKERKEKIWDPVHRVALAEACRKQEEFDVANNGSSQANKLIKEELQSQVELLNSFEKKYSDPGPVYDCLVWHDGEVWRACIDSNEDGDLSKSTVLRNYKEAQEYGSFGTAEMLNYSVNIYDDGNLLSIVTSGGAHGTHVASIAAGHFPEEPERNGVAPGAQILSIKIGDTRLSTMETGTGLIRAMIEVINHKCDLVNYSYGEATHWPNSGRICEVINEAVWKHNIIYVSSAGNNGPCLSTVGCPGGTTSSVIGVGAYVSPDMMVAEYSLREKLPANQYTWSSRGPSADGALGVSISAPGGAIASVPNWTLRGTQLMNGTSMSSPNACGGIALILSGLKANNIDYTVHSVRRALENTAVKADNIEVFAQGHGIIQVDKAYDYLVQNTSFANKLGFTVTVGNNRGIYLRDPVQVAAPSDHGVGIEPVFPENTENSEKISLQLHLALTSNSSWVQCPSHLELMNQCRHINIRVDPRGLREGLHYTEVCGYDIASPNAGPLFRVPITAVIAAKVNESSHYDLAFTDVHFKPGQIRRHFIEVPEGATWAEVTVCSCSSEVSAKFVLHAVQLVKQRAYRSHEFYKFCSLPEKGTLTEAFPVLGGKAIEFCIARWWASLSDVNIDYTISFHGIVCTAPQLNIHASEGINRFDVQSSLKYEDLAPCITLKNWVQTLRPVSAKTKPLGSRDVLPNNRQLYEMVLTYNFHQPKSGEVTPSCPLLCELLYESEFDSQLWIIFDQNKRQMGSGDAYPHQYSLKLEKGDYTIRLQIRHEQISDLERLKDLPFIVSHRLSNTLSLDIHENHSFALLGKKKSSNLTLPPKYNQPFFVTSLPDDKIPKGAGPGCYLAGSLTLSKTELGKKAGQSAAKRQGKFKKDVIPVHYYLIPPPTKTKNGSKDKEKDSEKEKDLKEEFTEALRDLKIQWMTKLDSSDIYNELKETYPNYLPLYVARLHQLDAEKERMKRLNEIVDAANAVISHIDQTALAVYIAMKTDPRPDAATIKNDMDKQKSTLVDALCRKGCALADHLLHTQAQDGAISTDAEGKEEEGESPLDSLAETFWETTKWTDLFDNKVLTFAYKHALVNKMYGRGLKFATKLVEEKPTKENWKNCIQLMKLLGWTHCASFTENWLPIMYPPDYCVF

SEQ ID NO: 9723 - protein, 236 aa, Homo sapiens
MLTPLGKFSTAKFAVRLPRVWEARAPSLSGAPAPTPPAPPPSRSSRLGLWPRCFLIFPQLRILLLGPQESNNSTGTMWKVSALLFVLGSASLWVLAEGASTGQPEDDTETTGLEGGVAMPGAEDDVVTPGTSEDRYKSGLTTLVATSVNSVTGIRIEDLPTSESTVHAQEQSPSATASNVATSHSTEKVDGDTQTTVEKDGLSTVTLVGIIVGVLLAIGFIGAIIVVVMRKMSGRP

SEQ ID NO: 9724 - protein, 120 aa, Homo sapiens
MPGAEDDVVTPGTSEDRYKSGLTTLVATSVNSVTGIRIEDLPTSESTVHAQEQSPSATASNVATSHSTEKVDGDTQTTVEKDGLSTVTLVGIIVGVLLAIGFIGAIIVVVMRKMSGRYSP

SEQ ID NO: 9725 - protein, 1249 aa, Homo sapiens
MATAATEEPFPFHGLLPKKETGAASFLCRYPEYDGRGVLIAVLDTGVDPGAPGMQVTTDGKPKIVDIIDTTGSGDVNTATEVEPKDGEIVGLSGRVLKIPASWTNPSGKYHIGIKNGYDFYPKALKERIQKERKEKIWDPVHRVALAEACRKQEEFDVANNGSSQANKLIKEELQSQVELLNSFEKKYSDPGPVYDCLVWHDGEVWRACIDSNEDGDLSKSTVLRNYKEAQEYGSFGTAEMLNYSVNIYDDGNLLSIVTSGGAHGTHVASIAAGHFPEEPERNGVAPGAQILSIKIGDTRLSTMETGTGLIRAMIEVINHKCDLVNYSYGEATHWPNSGRICEVINEAVWKHNIIYVSSAGNNGPCLSTVGCPGGTTSSVIGVGAYVSPDMMVAEYSLREKLPANQYTWSSRGPSADGALGVSISAPGGAIASVPNWTLRGTQLMNGTSMSSPNACGGIALILSGLKANNIDYTVHSVRRALENTAVKADNIEVFAQGHGIIQVDKAYDYLVQNTSFANKLGFTVTVGNNRGIYLRDPVQVAAPSDHGVGIEPVFPENTENSEKISLQLHLALTSNSSWVQCPSHLELMNQCRHINIRVDPRGLREGLHYTEVCGYDIASPNAGPLFRVPITAVIAAKVNESSHYDLAFTDVHFKPGQIRRHFIEVPEGATWAEVTVCSCSSEVSAKFVLHAVQLVKQRAYRSHEFYKFCSLPEKGTLTEAFPVLGGKAIEFCIARWWASLSDVNIDYTISFHGIVCTAPQLNIHASEGINRFDVQSSLKYEDLAPCITLKNWVQTLRPVSAKTKPLGSRDVLPNNRQLYEMVLTYNFHQPKSGEVTPSCPLLCELLYESEFDSQLWIIFDQNKRQMGSGDAYPHQYSLKLEKGDYTIRLQIRHEQISDLERLKDLPFIVSHRLSNTLSLDIHENHSFALLGKKKSSNLTLPPKYNQPFFVTSLPDDKIPKGAGPGCYLAGSLTLSKTELGKKADVIPVHYYLIPPPTKTKNGSKDKEKDSEKEKDLKEEFTEALRDLKIQWMTKLDSSDIYNELKETYPNYLPLYVARLHQLDAEKERMKRLNEIVDAANAVISHIDQTALAVYIAMKTDPRPDAATIKNDMDKQKSTLVDALCRKGCALADHLLHTQAQDGAISTDAEGKEEEGESPLDSLAETFWETTKWTDLFDNKVLTFAYKHALVNKMYGRGLKFATKLVEEKPTKENWKNCIQLMKLLGWTHCASFTENWLPIMYPPDYCVF

SEQ ID NO: 9726 - protein, 165 aa, Homo sapiens
MAWMLLLILIMVHPGSCALWVSQPPEIRTLEGSSAFLPCSFNASQGRLAIGSVTWFRDEVVPGKEAELHIRDVRGHDASIYVCRVEVLGLGVGTGNGTRLVVEKEHPQLGAGTVLLLRAGFYAVSFLSVAVGSTVYYQGKCHCHMGTHCHSSDGPRGVIPEPRCP

SEQ ID NO: 9727 - protein, 190 aa, Homo sapiens
MAWMLLLILIMVHPGSCALWVSQPPEIRTLEGSSAFLPCSFNASQGRLAIGSVTWFRDEVVPGKEVRNGTPEFRGRLAPLASSRFLHDHQAELHIRDVRGHDASIYVCRVEVLGLGVGTGNGTRLVVEKEHPQLGAGTVLLLRAGFYAVSFLSVAVGSTVYYQGKCHCHMGTHCHSSDGPRGVIPEPRCP

SEQ ID NO: 9728 - protein, 177 aa, Homo sapiens
MAWMLLLILIMVHPGSCALWVSQPPEIRTLEGSSAFLPCSFNASQGRLAIGSVTWFRDEVVPGKEVRNGTPEFRGRLAPLASSRFLHDHQAELHIRDVRGHDASIYVCRVEVLGLGVGTGNGTRLVVEKEHPQLGAGTVLLLRAGFYAVSFLSVAVGSTVYYQGKYAKSTLSGFPQL

SEQ ID NO: 9729 - protein, 294 aa, Homo sapiens
MRPRAPACAAAALGLCSLLLLLAPGHACPAGCACTDPHTVDCRDRGLPSVPDPFPLDVRKLLVAGNRIQRIPEDFFIFYGDLVYLDFRNNSLRSLEEGTFSGSAKLVFLDLSYNNLTQLGAGAFRSAGRLVKLSLANNNLVGVHEDAFETLESLQVLELNDNNLRSLSVAALAALPALRSLRLDGNPWLCDCDFAHLFSWIQENASKLPKGLDEIQCSLPMESRRISLRELSEASFSECRFSLSLTDLCIIIFSGVAVSIAAIISSFFLATVVQCLQRCAPNKDAEDEDEDKDD

SEQ ID NO: 9730 - protein, 1710 aa, Homo sapiens
MKKIFSKKGESPLGSFARRQRSSAGGGGEPGEGAYSQPGYHVRDRDLGKIHKAASAGNVAKVQQILLLRKNGLNDRDKMNRTALHLACANGHPEVVTLLVDRKCQLNVCDNENRTALMKAVQCQEEKCATILLEHGADPNLADVHGNTALHYAVYNEDISVATKLLLYDANIEAKNKDDLTPLLLAVSGKKQQMVEFLIKKKANVNAVDKLESSHQLISEYKEERIPKHSSQNSNSVDESSEDSLSRLSGKPGVDDSWPTSDDEDLNFDTKNVPKPSLAKLMTASQQSRKNLEATYGTVRTGNRTLFEDRDSDSQDEVVVESLPTTSIKVQCFSHPTYQSPDLLPKPSHKSLANPGLMKEEPTKPGIAKKENGIDIIESAPLEQTNNDNLTYVDEVHKNNRSDMMSALGLGQEEDIESPWDSESISENFPQKYVDPLAGAADGKEKNIGNEQAEDVFYIPSCMSGSRNFKMAKLEDTRNVGMPVAHMESPERYLHLKPTIEMKDSVPNKAGGMKDVQTSKAAEHDLEVASEEEQEREGSENNQPQVEEERKKHRNNEMEVSANIHDGATDDAEDDDDDDGLIQKRKSGETDHQQFPRKENKEYASSGPALQMKEVKSTEKEKRTSKESVNSPVFGKASLLTGGLLQVDDDSSLSEIDEDEGRPTKKTSNEKNKVKNQIQSMDDVDDLTQSSETASEDCELPHSSYKNFMLLIEQLGMECKDSVSLLKIQDAALSCERLLELKKNHCELLTVKIKKMEDKVNVLQRELSETKEIKSQLEHQKVEWERELCSLRFSLNQEEEKRRNADTLYEKIREQLRRKEEQYRKEVEVKQQLELSLQTLEMELRTVKSNLNQVVQERNDAQRQLSREQNARMLQDGILTNHLSKQKEIEMAQKKMNSENSHSHEEEKDLSHKNSMLQEEIAMLRLEIDTIKNQNQEKEKKCFEDLKIVKEKNEDLQKTIKQNEETLTQTISQYNGRLSVLTAENAMLNSKLENEKQSKERLEAEVESYHSRLAAAIHDRDQSETSKRELELAFQRARDECSRLQDKMNFDVSNLKDNNEILSQQLFKTESKLNSLEIEFHHTRDALREKTLGLERVQKDLSQTQCQMKEMEQKYQNEQVKVNKYIGKQESVEERLSQLQSENMLLRQQLDDAHNKADNKEKTVINIQDQFHAIVQKLQAESEKQSLLLEERNKELISECNHLKERQYQYENEKAEREVVVRQLQQELADTLKKQSMSEASLEVTSRYRINLEDETQDLKKKLGQIRNQLQEAQDRHTEAVRCAEKMQDHKQKLEKDNAKLKVTVKKQMDKIEELQKNLLNANLSEDEKEQLKKLMELKQSLECNLDQEMKKNVELEREITGFKNLLKMTRKKLNEYENGEFSFHGDLKTSQFEMDIQINKLKHKIDDLTAELETAGSKCLHLDTKNQILQEELLSMKTVQKKCEKLQKNKKKLEQEVINLRSHIERNMVELGQVKQYKQEIEERARQEIAEKLKEVNLFLQAQAASQENLEQFRENNFASMKSQMELRIKDLESELSKIKTSQEDFNKTELEKYKQLYLEELKVRKSLSSKLTKTNERLAEVNTKLLVEKQQSRSLFTTLTTRPVMEPPCVGNLNNSLDLNRKLIPRENLVISTSNPRASNNSMENYLSKMQQELEKNITRELKEAAAELESGSIASPLGSTDESNLNQDLVWKASREYVQVLKKNYMI

SEQ ID NO: 9731 - protein, 975 aa, Homo sapiens
MGIFKSSLFQALLDIQEFYEVTLLNSQKSCEQKIEEANQVLQKWEKTSLLAPCHDRLQKSSELTDCSGSKENASCIEQNKENQSFENETDETTTQNQGRCPAQNCSVEAPAWMPVHHCTKYRYQDEDAPHDHSLPRLTHEVRGPELVHVSEKNLSQIENVHGYVLQSHISPLKASPAPIIVNTDTLDTIPYVNGTEIEYEFEEITLERGNSGLGFSIAGGTDNPHIGDDPGIFITKIIPGGAAAEDGRLRVNDCILRVNEVDVSEVSHSKAVEALKEAGSIVRLYVRRRRPILETVVEIKLFKGPKGLGFSIAGGVGNQHIPGDNSIYVTKIIDGGAAQKDGRLQVGDRLLMVNNYSLEEVTHEEAVAILKNTSEVVYLKVGKPTTIYMTDPYGPPDITHSYSPPMENHLLSGNNGTLEYKTSLPPISPGRYSPIPKHMLVDDDYTRPPEPVYSTVNKLCDKPASPRHYSPVECDKSFLLSAPYSHYHLGLLPDSEMTSHSQHSTATRQPSMTLQRAVSLEGEPRKVVLHKGSTGLGFNIVGGEDGEGIFVSFILAGGPADLSGELQRGDQILSVNGIDLRGASHEQAAAALKGAGQTVTIIAQYQPEDYARFEAKIHDLREQMMNHSMSSGSGSLRTNQKRSLYVRAMFDYDKSKDSGLPSQGLSFKYGDILHVINASDDEWWQARRVMLEGDSEEMGVIPSKRRVERKERARLKTVKFNAKPGVIDSKGSFNDKRKKSFIFSRKFPFYKNKEQSEQETSDPERGQEDLILSYEPVTRQEINYTRPVIILGPMKDRINDDLISEFPDKFGSCVPHTTRPKRDYEVDGRDYHFVISREQMEKDIQEHKFIEAGQYNDNLYGTSVQSVRFVAERGKHCILDVSGNAIKRLQVAQLYPIAIFIKPRSLEPLMEMNKRLTEEQAKKTYDRAIKLEQEFGEYFTAIVQGDTLEDIYNQCKLVIEEQSGPFIWIPSKEKL

SEQ ID NO: 9732 - protein, 149 aa, Homo sapiens
MKVASGSTATAAAGPSCALKAGKTASGAGEVVRCLSEQSVAISRCAGGAGARLPALLDEQQVNVLLYDMNGCYSRLKELVPTLPQNRKVSKVEILQHVIDYIRDLQLELNSESEVGTPGGRGLPVRAPLSTLNGEISALTAEVRSRSDH

SEQ ID NO: 9733 - protein, 155 aa, Homo sapiens
MKVASGSTATAAAGPSCALKAGKTASGAGEVVRCLSEQSVAISRCAGGAGARLPALLDEQQVNVLLYDMNGCYSRLKELVPTLPQNRKVSKVEILQHVIDYIRDLQLELNSESEVGTPGGRGLPVRAPLSTLNGEISALTAEAACVPADDRILCR

SEQ ID NO: 9734 - protein, 452 aa, Homo sapiens
MAELQMLLEEEIPSGKRALIESYQNLTRVADYCENNYIQATDKRKALEETKAYTTQSLASVAYQINALANNVLQLLDIQASQLRRMESSINHISQTVDIHKEKVARREIGILTTNKNTSRTHKIIAPANMERPVRYIRKPIDYTVLDDVGHGVKWLKAKHGNNQPARTGTLSRTNPPTQKPPSPPMSGRGTLGRNTPYKTLEPVKPPTVPNDYMTSPARLGSQHSPGRTASLNQRPRTHSGSSGGSGSRENSGSSSIGIPIAVPTPSPPTIGPAAPGSAPGSQYGTMTRQISRHNSTTSSTSSGGYRRTPSVTAQFSAQPHVNGGPLYSQNSIADSPTPPPPPPPDDIPMFDDSPPPPPPPPVDYEDEEAAVVQYNDPYADGDPAWAPKNYIEKVVAIYDYTKDKDDELSFMEGAIIYVIKKNDDGWYEGVCNRVTGLFPGNYVESIMHYTD

SEQ ID NO: 9735 - protein, 476 aa, Homo sapiens
MAELQMLLEEEIPSGKRALIESYQNLTRVADYCENNYIQATDKRKALEETKAYTTQSLASVAYQINALANNVLQLLDIQASQLRRMESSINHISQTVDIHKEKVARREIGILTTNKNTSRTHKIIAPANMERPVRYIRKPIDYTVLDDVGHGVKHGNNQPARTGTLSRTNPPTQKPPSPPMSGRGTLGRNTPYKTLEPVKPPTVPNDYMTSPARLGSQHSPGRTASLNQRPRTHSGSSGGSGSRENSGSSSIGIPIAVPTPSPPTIGPAAPGSAPGSQYGTMTRQISRHNSTTSSTSSGGYRRTPSVTAQFSAQPHVNGGPLYSQNSISIAPPPPPMPQLTPQIPLTGFVARVQENIADSPTPPPPPPPDDIPMFDDSPPPPPPPPVDYEDEEAAVVQYNDPYADGDPAWAPKNYIEKVVAIYDYTKDKDDELSFMEGAIIYVIKKNDDGWYEGVCNRVTGLFPGNYVESIMHYTD

SEQ ID NO: 9736 - protein, 481 aa, Homo sapiens
MAELQMLLEEEIPSGKRALIESYQNLTRVADYCENNYIQATDKRKALEETKAYTTQSLASVAYQINALANNVLQLLDIQASQLRRMESSINHISQTVDIHKEKVARREIGILTTNKNTSRTHKIIAPANMERPVRYIRKPIDYTVLDDVGHGVKWLKAKHGNNQPARTGTLSRTNPPTQKPPSPPMSGRGTLGRNTPYKTLEPVKPPTVPNDYMTSPARLGSQHSPGRTASLNQRPRTHSGSSGGSGSRENSGSSSIGIPIAVPTPSPPTIGPAAPGSAPGSQYGTMTRQISRHNSTTSSTSSGGYRRTPSVTAQFSAQPHVNGGPLYSQNSISIAPPPPPMPQLTPQIPLTGFVARVQENIADSPTPPPPPPPDDIPMFDDSPPPPPPPPVDYEDEEAAVVQYNDPYADGDPAWAPKNYIEKVVAIYDYTKDKDDELSFMEGAIIYVIKKNDDGWYEGVCNRVTGLFPGNYVESIMHYTD

SEQ ID NO: 9737 - protein, 467 aa, Homo sapiens
MAALTIATGTGNWFSALALGVTLLKCLLIPTYHSTDFEVHRNWLAITHSLPISQWYYEATSEWTLDYPPFFAWFEYILSHVAKYFDQEMLNVHNLNYSSSRTLLFQRFSVIFMDVLFVYAVRECCKCIDGKKVGKELTEKPKFILSVLLLWNFGLLIVDHIHFQYNGFLFGLMLLSIARLFQKRHMEGAFLFAVLLHFKHIYLYVAPAYGVYLLRSYCFTANKPDGSIRWKSFSFVRVISLGLVVFLVSALSLGPFLALNQLPQVFSRLFPFKRGLCHAYWAPNFWALYNALDKVLSVIGLKLKFLDPNNIPKASMTSGLVQQFQHTVLPSVTPLATLICTLIAILPSIFCLWFKPQGPRGFLRCLTLCALSSFMFGWHVHEKAILLAILPMSLLSVGKAGDASIFLILTTTGHYSLFPLLFTAPELPIKILLMLLFTIYSISSLKTLFRRSFTLVAQAGVQWHDLS

SEQ ID NO: 9738 - protein, 475 aa, Homo sapiens
MAELQMLLEEEIPSGKRALIESYQNLTRVADYCENNYIQATDKRKALEETKAYTTQSLASVAYQINALANNVLQLLDIQASQLRRMESSINHISQTVDIHKEKVARREIGILTTNKNTSRTHKIIAPANMERPVRYIRKPIDYTVLDDVGHGVKHGNNQPARTGTLSRTNPPTQKPPSPPMSGRGTLGRNTPYKTLEPVKPPTVPNDYMTSPARLGSQHSPGRTASLNQRPRTHSGSSGGSGSRENSGSSSIGIPIAVPTPSPPTIGPAPGSAPGSQYGTMTRQISRHNSTTSSTSSGGYRRTPSVTAQFSAQPHVNGGPLYSQNSISIAPPPPPMPQLTPQIPLTGFVARVQENIADSPTPPPPPPPDDIPMFDDSPPPPPPPPVDYEDEEAAVVQYNDPYADGDPAWAPKNYIEKVVAIYDYTKDKDDELSFMEGAIIYVIKKNDDGWYEGVCNRVTGLFPGNYVESIMHYTD

SEQ ID NO: 9739 - protein, 446 aa, Homo sapiens
MAELQMLLEEEIPSGKRALIESYQNLTRVADYCENNYIQATDKRKALEETKAYTTQSLASVAYQINALANNVLQLLDIQASQLRRMESSINHISQTVDIHKEKVARREIGILTTNKNTSRTHKIIAPANMERPVRYIRKPIDYTVLDDVGHGVKHGNNQPARTGTLSRTNPPTQKPPSPPMSGRGTLGRNTPYKTLEPVKPPTVPNDYMTSPARLGSQHSPGRTASLNQRPRTHSGSSGGSGSRENSGSSSIGIPIAVPTPSPPTIGPAPGSAPGSQYGTMTRQISRHNSTTSSTSSGGYRRTPSVTAQFSAQPHVNGGPLYSQNSIADSPTPPPPPPPDDIPMFDDSPPPPPPPPVDYEDEEAAVVQYNDPYADGDPAWAPKNYIEKVVAIYDYTKDKDDELSFMEGAIIYVIKKNDDGWYEGVCNRVTGLFPGNYVESIMHYTD

SEQ ID NO: 9740 - protein, 451 aa, Homo sapiens
MAELQMLLEEEIPSGKRALIESYQNLTRVADYCENNYIQATDKRKALEETKAYTTQSLASVAYQINALANNVLQLLDIQASQLRRMESSINHISQTVDIHKEKVARREIGILTTNKNTSRTHKIIAPANMERPVRYIRKPIDYTVLDDVGHGVKWLKAKHGNNQPARTGTLSRTNPPTQKPPSPPMSGRGTLGRNTPYKTLEPVKPPTVPNDYMTSPARLGSQHSPGRTASLNQRPRTHSGSSGGSGSRENSGSSSIGIPIAVPTPSPPTIGPAPGSAPGSQYGTMTRQISRHNSTTSSTSSGGYRRTPSVTAQFSAQPHVNGGPLYSQNSIADSPTPPPPPPPDDIPMFDDSPPPPPPPPVDYEDEEAAVVQYNDPYADGDPAWAPKNYIEKVVAIYDYTKDKDDELSFMEGAIIYVIKKNDDGWYEGVCNRVTGLFPGNYVESIMHYTD

SEQ ID NO: 9741 - protein, 425 aa, Homo sapiens
MAENDVDNELLDYEDDEVETAAGGDGAEAPAKKDVKGSYVSIHSSGFRDFLLKPELLRAIVDCGFEHPSEVQHECIPQAILGMDVLCQAKSGMGKTAVFVLATLQQLEPVTGQVSVLVMCHTRELAFQISKEYERFSKYMPNVKVAVFFGGLSIKKDEEVLKKNCPHIVVGTPGRILALARNKSLNLKHIKHFILDECDKMLEQLDMRRDVQEIFRMTPHEKQVMMFSATLSKEIRPVCRKFMQDPMEIFVDDETKLTLHGLQQYYVKLKDNEKNRKLFDLLDVLEFNQVVIFVKSVQRCIALAQLLVEQNFPAIAIHRGMPQEERLSRYQQFKDFQRRILVATNLFGRGMDIERVNIAFNYDMPEDSDTYLHRCYPLSPSRWPEQAGLAPRAWLSHLCPMRMMPRSSMMCRIALRSILVSCLMR

SEQ ID NO: 9742 - protein, 494 aa, Homo sapiens
MRPPGFRNFLLLASSLLFAGLSAVPQSFSPSLRSWPGAACRLSRAESERRCRAPGQPPGAALCHGRGRCDCGVCICHVTEPGMFFGPLCECHEWVCETYDGSTCAGHGKCDCGKCKCDQGWYGDACQYPTNCDLTKKKSNQMCKNSQDIICSNAGTCHCGRCKCDNSDGSGLVYGKFCECDDRECIDDETEEICGGHGKCYCGNCYCKAGWHGDKCEFQCDITPWESKRRCTSPDGKICSNRGTCVCGECTCHDVDPTGDWGDIHGDTCECDERDCRAVYDRYSDDFCSGHGQCNCGRCDCKAGWYGKKCEHPQSCTLSAEESIRKCQGSSDLPCSGRGKCECGKCTCYPPGDRRVYGKTCECDDRRCEDLDGVVCGGHGTCSCGRCVCERGWFGKLCQHPRKCNMTEEQSKNLCESADGILCSGKGSCHCGKCICSAEEWYISGEFCDCDDRDCDKHDGLICTGNGICSCGNCECWDGWNGNACEIWLGSEYP

SEQ ID NO: 9743 - protein, 415 aa, Homo sapiens
MASRWWRWRRGCSWKPAARSPGPGSPGRAGPLGPSAAAEVRAQVHRRKGLDLSQIPYINLVKHLTSACPNVCRISRFHHTTPDSKTHSGEKYTDPFKLGWRDLKGLYEDIRKELLISTSELKEMSEYYFDGKGKAFRPIIVALMARACNIHHNNSRHVQASQRAIALIAEMIHTASLVHDDVIDDASSRRGKHTVNKIWGEKKAVLAGDLILSAASIALARIGNTTVISILTQVIEDLVRGEFLQLGSKENENERFAHYLEKTFKKTASLIANSCKAVSVLGCPDPVVHEIAYQYGKNVGIAFQLIDDVLDFTSCSDQMGKPTSADLKLGLATGPVLFACQQFPEMNAMIMRRFSLPGDVDRARQYVLQSDGVQQTTYLAQQYCHEAIREISKLRPSPERDALIQLSEIVLTRDK

SEQ ID NO: 9744 - protein, 627 aa, Homo sapiens
MEEADRILIHSLRQAGTAVPPDVQTLRAFTTELVVEAVVRCLRVINPAVGSGLSPLLPLAMSARFRLAMSLAQACMDLGYPLELGYQNFLYPSEPDLRDLLLFLAERLPTDASEDADQPAGDSAILLRAIGSQIRDQLALPWVPPHLRTPKLQHLQGSALQKPFHASRLVVPELSSRGEPREFQASPLLLPVPTQVPQPVGRVASLLEHHALQLCQQTGRDRPGDEDWVHRTSRLPPQEDTRAQRQRLQKQLTEHLRQSWGLLGAPIQARDLGELLQAWGAGAKTGAPKGSRFTHSEKFTFHLEPQAQATQVSDVPATSRRPEQVTWAAQEQELESLREQLEGVNRSIEEVEADMKTLGVSFVQAESECRHSKLSTAEREQALRLKSRAVELLPDGTANLAKLQLVVENSAQRVIHLAGQWEKHRVPLLAEYRHLRKLQDCRELESSRRLAEIQELHQSVRAAAEEARRKEEVYKQLMSELETLPRDVSRLAYTQRILEIVGNIRKQKEEITKILSDTKELQKEINSLSGKLDRTFAVTDELVFKDAKKDDAVRKAYKYLAALHENCSQLIQTIEDTGTIMREVRDLEEQIETELGKKTLSNLEKIREDYRALRQENAGLLGRVREA

SEQ ID NO: 9745 - protein, 366 aa, Homo sapiens
MRVMAPRALLLLLSGGLALTETWACSHSMRYFDTAVSRPGRGEPRFISVGYVDDTQFVRFDSDAASPRGEPRAPWVEQEGPEYWDRETQKYKRQAQADRVSLRNLRGYYNQSEDGSHTLQRMSGCDLGPDGRLLRGYDQSAYDGKDYIALNEDLRSWTAADTAAQITQRKLEAARAAEQLRAYLEGTCVEWLRRYLENGKETLQRAEPPKTHVTHHPLSDHEATLRCWALGFYPAEITLTWQRDGEDQTQDTELVETRPAGDGTFQKWAAVVVPSGQEQRYTCHMQHEGLQEPLTLSWEPSSQPTIPIMGIVAGLAVLVVLAVLGAVVTAMMCRRKSSGGKGGSCSQAACSNSAQGSDESLITCKA

SEQ ID NO: 9746 - protein, 640 aa, Homo sapiens
MAEAALVITPQIPMVTEEFVKPSQGHVTFEDIAVYFSQEEWGLLDEAQRCLYHDVMLENFSLMASVGCLHGIEAEEAPSEQTLSAQGVSQARTPKLGPSIPNAHSCEMCILVMKDILYLSEHQGTLPWQKPYTSVASGKWFSFGSNLQQHQNQDSGEKHIRKEESSALLLNSCKIPLSDNLFPCKDVEKDFPTILGLLQHQTTHSRQEYAHRSRETFQQRRYKCEQVFNEKVHVTEHQRVHTGEKAYKRREYGKSLNSKYLFVEHQRTHNAEKPYVCNICGKSFLHKQTLVGHQQRIHTRERSYVCIECGKSLSSKYSLVEHQRTHNGEKPYVCNVCGKSFRHKQTFVGHQQRIHTGERPYVCMECGKSFIHSYDRIRHQRVHTGEGAYQCSECGKSFIYKQSLLDHHRIHTGERPYECKECGKAFIHKKRLLEHQRIHTGEKPYVCIICGKSFIRSSDYMRHQRIHTGERAYECSDCGKAFISKQTLLKHHKIHTRERPYECSECGKGFYLEVKLLQHQRIHTREQLCECNECGKVFSHQKRLLEHQKVHTGEKPCECSECGKCFRHRTSLIQHQKVHSGERPYNCTACEKAFIYKNKLVEHQRIHTGEKPYECGKCGKAFNKRYSLVRHQKVHITEEP

SEQ ID NO: 9747 - protein, 666 aa, Homo sapiens
MGESSEDIDQMFSTLLGEMDLLTQSLGVDTLPPPDPNPPRAEFNYSVGFKDLNESLNALEDQDLDALMADLVADISEAEQRTIQAQKESLQNQHHSASLQASIFSGAASLGYGTNVAATGISQYEDDLPPPPADPVLDLPLPPPPPEPLSQEEEEAQAKADKIKLALEKLKEAKVKKLVVKVHMNDNSTKSLMVDERQLARDVLDNLFEKTHCDCNVDWCLYEIYPELQIERFFEDHENVVEVLSDWTRDTENKILFLEKEEKYAVFKNPQNFYLDNRGKKESKETNEKMNAKNKESLLEESFCGTSIIVPELEGALYLKEDGKKSWKRRYFLLRASGIYYVPKGKTKTSRDLACFIQFENVNIYYGTQHKMKYKAPTDYCFVLKHPQIQKESQYIKYLCCDDTRTLNQWVMGIRIAKYGKTLYDNYQRAVAKAGLASRWTNLGTVNAAAPAQPSTGPKTGTTQPNGQIPQATHSVSAVLQEAQRHAETSKDKKPALGNHHDPAVPRAPHAPKSSLPPPPPVRRSSDTSGSPATPLKAKGTGGGGLPAPPDDFLPPPPPPPPLDDPELPPPPPDFMEPPPDFVPPPPPSYAGIAGSELPPPPPPPPAPAPAPVPDSARPPPAVAKRPPVPPKRQENPGHPGGAGGGEQDFMSDLMKALQKKRGNVS

SEQ ID NO: 9748 - protein, 131 aa, Homo sapiens
MRVMAPRALLLLLSGGLALTETWACSHSMRYFDTAVSRPGRGEPRFISVGYVDDTQFVRFDSDAASPRGEPRAPWVEQEGPEYWDRETQKYKRQAQADRVSLRNLRGYYNQSEDEDVWLRPGARRAPPPRV

SEQ ID NO: 9749 - protein, 461 aa, Homo sapiens
MAPVAVWAALAVGLELWAAAHALPAQVAFTPYAPEPGSTCRLREYYDQTAQMCCSKCSPGQHAKVFCTKTSDTVCDSCEDSTYTQLWNWVPECLSCGSRCSSDQVETQACTREQNRICTCRPGWYCALSKQEGCRLCAPLRKCRPGFGVARPGTETSDVVCKPCAPGTFSNTTSSTDICRPHQICNVVAIPGNASMDAVCTSTSPTRSMAPGAVHLPQPVSTRSQHTQPTPEPSTAPSTSFLLPMGPSPPAEGSTGDFALPVGLIVGVTALGLLIIGVVNCVIMTQVKKKPLCLQREAKVPHLPADKARGTQGPEQQHLLITAPSSSSSSLESSASALDRRAPTRNQPQAPGVEASGAGEARASTGSSDSSPGGHGTQVNVTCIVNVCSSSDHSSQCSSQASSTMGDTDSSPSESPKDEQVPFSKEECAFRSQLETPETLLGSTEEKPLPLGVPDAGMKPS

SEQ ID NO: 9750 - protein, 464 aa, Homo sapiens
METEQPEETFPNTETNGEFGKRPAEDMEEEQAFKRSRNTDEMVELRILLQSKNAGAVIGKGGKNIKALRTDYNASVSVPDSSGPERILSISADIETIGEILKKIIPTLEEGLQLPSPTATSQLPLESDAVECLNYQHYKGSDFDCELRLLIHQSLAGGIIGVKGAKIKELRENTQTTIKLFQECCPHSTDRVVLIGGKPDRVVECIKIILDLISESPIKGRAQPYDPNFYDETYDYGGFTMMFDDRRGRPVGFPMRGRGGFDRMPPGRGGRPMPPSRRDYDDMSPRRGPPPPPPGRGGRGGSRARNLPLPPPPPPRGGDLMAYDRRGRPGDRYDGMVGFSADETWDSAIDTWSPSEWQMAYEPQGGSGYDYSYAGGRGSYGDLGGPIITTQVTIPKDLAGSIIGKGGQRIKQIRHESGASIKIDEPLEGSEDRIITITGTQDQIQNAQYLLQNSVKQYADVEGF

SEQ ID NO: 9751 - protein, 782 aa, Homo sapiens
MFPPSGSTGLIPPSHFQARPLSTLPRMAPTWLSDIPLVQPPGHQDVSERRLDTQRPQVTMWERDVSSDRQEPGRRGRSWGLEGSQALSQQAEVIVRQLQELRRLEEEVRLLRETSLQQKMRLEAQAMELEALARAEKAGRAEAEGLRAALAGAEVVRKNLEEGSQRELEEVQRLHQEQLSSLTQAHEEALSSLTSKAEGLEKSLSSLETRRAGEAKELAEAQREAELLRKQLSKTQEDLEAQVTLVENLRKYVGEQVPSEVHSQTWELERQKLLETMQHLQEDRDSLHATAELLQVRVQSLTHILALQEEELTRKVQPSDSLEPEFTRKCQSLLNRWREKVFALMVQLKAQELEHSDSVKQLKGQVASLQEKVTSQSQEQAILQRSLQDKAAEVEVERMGAKGLQLELSRAQEARRRWQQQTASAEEQLRLVVNAVSSSQIWLETTMAKVEGAAAQLPSLNNRLSYAVRKVHTIRGLIARKLALAQLRQESCPLPPPVTDVSLELQQLREERNRLDAELQLSARLIQQEVGRAREQGEAERQQLSKVAQQLEQELQQTQESLASLGLQLEVARQGQQESTEEAASLRQELTQQQELYGQALQEKVAEVETRLREQLSDTERRLNEARREHAKAVVSLRQIQRRAAQEKERSQELRRLQEEARKEEGQRLARRLQELERDKNLMLATLQQEGLLSRYKQQRLLTVLPSLLDKKKSVVSSPRPPECSASAPVAAAVPTRESIKGSLSVLLDDLQDLSEAISKEEAVCQGDNLDRCSSSNPQMSS

SEQ ID NO: 9752 - protein, 728 aa, Homo sapiens
MAGFWVGTAPLVAAGRRGRWPPQQLMLSAALRTLKHVLYYSRQCLMVSRNLGSVGYDPNEKTFDKILVANRGEIACRVIRTCKKMGIKTVAIHSDVDASSVHVKMADEAVCVGPAPTSKSYLNMDAIMEAIKKTRAQAVHPGYGFLSENKEFARCLAAEDVVFIGPDTHAIQAMGDKIESKLLAKKAEVNTIPGFDGVVKDAEEAVRIAREIGYPVMIKASAGGGGKGMRIAWDDEETRDGFRLSSQEAASSFGDDRLLIEKFIDNPRHIEIQVLGDKHGNALWLNERECSIQRRNQKVVEEAPSIFLDAETRRAMGEQAVALARAVKYSSAGTVEFLVDSKKNFYFLEMNTRLQVEHPVTECITGLDLVQEMIRVAKGYPLRHKQADIRINGWAVECRVYAEDPYKSFGLPSIGRLSQYQEPLHLPGVRVDSGIQPGSDISIYYDPMISKLITYGSDRTEALKRMADALDNYVIRGVTHNIALLREVIINSRFVKGDISTKFLSDVYPDGFKGHMLTKSEKNQLLAIASSLFVAFQLRAQHFQENSRMPVIKPDIANWELSVKLHDKVHTVVASNNGSVFSVEVDGSKLNVTSTWNLASPLLSVSVDGTQRTVQCLSREAGGNMSIQFLGTVYKVNILTRLAAELNKFMLEKVTEDTSSVLRSPMPGVVVAVSVKPGDAVAEGQEICVIEAMKMQNSMTAGKTGTVKSVHCQAGDTVGEGDLLVELE

SEQ ID NO: 9753 - protein, 529 aa, Homo sapiens
MGSSRAPWMGRVGGHGMMALLLAGLLLPGTLAKSIGTFSDPCKDPTRITSPNDPCLTGKGDSSGFSSYSGSSSSGSSISSARSSGGGSSGSSSGSSIAQGGSAGSFKPGTGYSQVSYSSGSGSSLQGASGSSQLGSSSSHSGNSGSHSGSSSSHSSSSSSFQFSSSSFQVGNGSALPTNDNSYRGILNPSQPGQSSSSSQTFGVSSSGQSVSSNQRPCSSDIPDSPCSGGPIVSHSGPYIPSSHSVSGGQRPVVVVVDQHGSGAPGVVQGPPCSNGGLPGKPCPPITSVDKSYGGYEVVGGSSDSYLVPGMTYSKGKIYPVGYFTKENPVKGSPGVPSFAAGPPISEGKYFSSNPIIPSQSAASSAIAFQPVGTGGVQLCGGGSTGSKGPCSPSSSRVPSSSSISSSSGLPYHPCGSASQSPCSPPGTGSFSSSSSSQSSGKIILQPCGSKSSSSGHPCMSVSSLTLTGGPDGSPHPDPSAGAKPCGSSSAGKIPCRSIRDILAQVKPLGPQLADPEVFLPQGELLNSP

SEQ ID NO: 9754 - protein, 566 aa, Homo sapiens
MKMQKGNVLLMFGLLLHLEAATNSNETSTSANTGSSVISSGASTATNSGSSVTSSGVSTATISGSSVTSNGVSIVTNSEFHTTSSGISTATNSEFSTVSSGISIATNSESSTTSSGASTATNSESSTPSSGASTATNSDSSTTSSGASTATNSDSSTTSSEASTATNSESSTTSSGASTATNSESSTVSSRASTATNSESSTTSSGASTATNSESRTTSNGAGTATNSESSTTSSGASTATNSESSTPSSGAGTATNSESSTTSSGAGTATNSESSTVSSGISTVTNSESSTPSSGANTATNSESSTTSSGANTATNSDSSTTSSGASTATNSESSTTSSGASTATNSESSTTSSGASTATNSGSSTTSSGTSTATNSESSTVSSGASTATTSESSTTSSGASTATNSESSTVSSGASTATNSESSTTSSGANTATNSGSSVTSAGSGTAALTGMHTTSHSASTAVSEAKPGGSLVPWEIFLITLVSVVAAVGLFAGLFFCVRNSLSLRNTFNTAVYHPHGLNHGLGPGPGGNHGAPHRPRWSPNWFWRRPVSSIAMEMSGRNSGP

SEQ ID NO: 9755 - protein, 631 aa, Homo sapiens
MGLPRGPEGQGLPEVETREDEEQNVKLTEILELLVAAGYFRARIKGLSPFDKVVGGMTWCITTCNFDVDVDLLFQENSTIGQKIALSEKIVSVLPRMKCPHQLEPHQIQGMDFIHIFPVVQWLVKRAIETKEEMGDYIRSYSVSQFQKTYSLPEDDDFIKRKEKAIKTVVDLSEVYKPRRKYKRHQGAEELLDEESRIHATLLEYGRRYGFSRQSKMEKAEDKKTALPAGLSATEKADAHEEDELRAAEEQRIQSLMTKMTAMANEESRLTASSVGQIVGLCSAEIKQIVSEYAEKQSELSAEESPEKLGTSQLHRRKVISLNKQIAQKTKHLEELRASHTSLQARYNEAKKTLTELKTYSEKLDKEQAALEKIESKADPSILQNLRALVAMNENLKSQEQEFKAHCREEMTRLQQEIENLKAERAPRGDEKTLSSGEPPGTLTSAMTHDEDLDRRYNMEKEKLYKIRLLQARRNREIAILHRKIDEVPSRAELIQYQKRFIELYRQISAVHKETKQFFTLYNTLDDKKVYLEKEISLLNSIHENFSQAMASPAARDQFLRQMEQIVEGIKQSRMKMEKKKQENKMRRDQLNDQYLELLEKQRLYFKTVKEFKEEGRKNEMLLSKVKAKAS

SEQ ID NO: 9756 - protein, 67 aa, Homo sapiens
MKLLLLTLTVLLLLSQLTPGGTQRCWNLYGKCRYRCSKKERVYVYCINNKMCCVKPKYQPKERWWPF

SEQ ID NO: 9757 - protein, 88 aa, Homo sapiens
MKLLYLFLAILLAIEEPVISVECWMDGHCRLLCKDGEDSIIRCRNRKRCCVPSRYLTIQPVTIHGILGWTTPQMSTTAPKMKTNITNR

SEQ ID NO: 9758 - protein, 84 aa, Homo sapiens
MKLLYLFLAILLAIEEPVISGKRHILRCMGNSGICRASCKKNEQPYLYCRNCQSCCLQSYMRISISGKEENTDWSYEKQWPRLP

SEQ ID NO: 9759 - protein, 538 aa, Homo sapiens
MPALLLLVLLASSAGQARARPSNATSAEPAGPLPALLAHLRRLTGALTGGGGAASPGANGTRTGPAGGAGAAARAPPPAELCHGYYDVMGQYDATFNCSTGSYRFCCGTCHYRFCCEHRHMRLAQASCSNYDTPRWATTPPPLAGGAGGAGGAGGGPGPGQAGWLEGGRTGGAGGRGGEGPGGSTAYVVCGVISFALAVGVGAKVAFSKASRAPRAHRDINVPRALVDILRHQAGPGTRPDRARSSSLTPGIGGPDSMPPRTPKNLYNTVKTPNLDWRALPPPSPSLHYSTLSCSRSFHNLSHLPPSYEAAVKSELNRYSSLKRLAEKDLDEAYLKRRPLELPRGTLPLHALRRPGTGGGYRMEAWGGPEELGLAPAPNPRRVMSQEHLLGDGGRSRYEFTLPRARLVSQEHLLLSSPEALRQSREHLLSPPRSPALPPDPTARASLAASHSNLLLGPGGPPTPLRGLPPPSSLHAHHHHALHGSPQPAWMSDAGGGGGTLARRPPFQRQGTLEQLQFIPGHHLPQHLRTASKNEVTV

SEQ ID NO: 9760 - protein, 152 aa, Homo sapiens
MADSERLSAPGCWAACTNFSRTRKGILLFAEIILCLVILICFSASTPGYSSLSVIEMILAAIFFVVYMCDLHTKIPFINWPWSDFFRTLIAAILYLITSIVVLVERGNHSKIVAGVLGLIATCLFGYDAYVTFPVRQPRHTAAPTDPADGPV

SEQ ID NO: 9761 - protein, 429 aa, Homo sapiens
MVPEVRVLSSLLGLALLWFPLDSHARARPDMFCLFHGKRYSPGESWHPYLEPQGLMYCLRCTCSEGAHVSCYRLHCPPVHCPQPVTEPQQCCPKCVEPHTPSGLRAPPKSCQHNGTMYQHGEIFSAHELFPSRLPNQCVLCSCTEGQIYCGLTTCPEPGCPAPLPLPDSCCQACKDEASEQSDEEDSVQSLHGVRHPQDPCSSDAGRKRGPGTPAPTGLSAPLSFIPRHFRPKGAGSTTVKIVLKEKHKKACVHGGKTYSHGEVWHPAFRAFGPLPCILCTCEDGRQDCQRVTCPTEYPCRHPEKVAGKCCKICPEDKADPGHSEISSTRCPKAPGRVLVHTSVSPSPDNLRRFALEHEASDLVEIYLWKLVKGIFHLTQIKKVRKQDFQKEAQHFRLLAGPHEGHWNVFLAQTLELKVTASPDKVTKT

SEQ ID NO: 9762 - protein, 341 aa, Homo sapiens
MDGLLNPRESSKFIAENSRDVFIDSGGVRRVAELLLAKAAGPELRVEGWKALHELNPRAADEAAVNWVFVTDTLNFSFWSEQDEHKCVVRYRGKTYSGYWSLCAAVNRALDEGIPITSASYYATVTLDQVRNILRSDTDVSMPLVEERHRILNETGKILLEKFGGSFLNCVRESENSAQKLMHLVVESFPSYRDVTLFEGKRVSFYKRAQILVADTWSVLEGKGDGCFKDISSITMFADYRLPQVLAHLGALKYSDDLLKKLLKGEMLSYGDRQEVEIRGCSLWCVELIRDCLLELIEQKGEKPNGEINSILLDYYLWDYAHDHREDMKGIPFHRIRCIYY

SEQ ID NO: 9763 - protein, 1115 aa, Homo sapiens
MAGAGGGLGVWGNLVLLGLCSWTGARAPAPNPGRNLTVETQTTSSISLSWEVPDGLDSQNSNYWVQCTGDGGTTETRNTTATNVTVDGLGPGSLYTCSVWVEKDGVNSSVGTVTTATAPNPVRNLRVEAQTNSSIALTWEVPDGPDPQNSTYGVEYTGDGGRAGTRSTAHTNITVDGLEPGCLYAFSMWVGKNGINSSRETRNATTAHNPVRNLRVEAQTTSSISLSWEVPDGTDPQNSTYCVQCTGDGGRTETRNTTDTRVTVDGLGPGSLYTCSVWVEKDGVNSSVEIVTSATAPNPVRNLTVEAQTNSSIALTWEVPDGPDPQNSTYGVEYTGDGGRAGTRSTAHTNITVDRLEPGCLYVFSVWVGKNGINSSRETRNATTAPNPVRNLHMETQTNSSIALCWEVPDGPYPQDYTYWVEYTGDGGGTETRNTTNTSVTAERLEPGTLYTFSVWAEKNGARGSRQNVSISTVPNAVTSLSKQDWTNSTIALRWTAPQGPGQSSYSYWVSWVREGMTDPRTQSTSGTDITLKELEAGSLYHLTVWAERNEVRGYNSTLTAATAPNEVTDLQNETQTKNSVMLWWKAPGDPHSQLYVYWVQWASKGHPRRGQDPQANWVNQTSRTNETWYKVEALEPGTLYNFTVWAERNDVASSTQSLCASTYPDTVTITSCVSTSAGYGVNLIWSCPQGGYEAFELEVGGQRGSQDRSSCGEAVSVLGLGPARSYPATITTIWDGMKVVSHSVVCHTESAGVIAGAFVGILLFLILVGLLIFFLKRRNKKKQQKPELRDLVFSSPGDIPAEDFADHVRKNERDSNCGFADEYQQLSLVGHSQSQMVASASENNAKNRYRNVLPYDWSRVPLKPIHEEPGSDYINASFMPGLWSPQEFIATQGPLPQTVGDFWRLVWEQQSHTLVMLTNCMEAGRVKCEHYWPLDSQPCTHGHLRVTLVGEEVMENWTVRELLLLQVEEQKTLSVRQFHYQAWPDHGVPSSPDTLLAFWRMLRQWLDQTMEGGPPIVHCSAGVGRTGTLIALDVLLRQLQSEGLLGPFSFVRKMRESRPLMVQTEAQYVFLHQCILRFLQQSAQAPAEKEVPYEDVENLIYENVAAIQAHKLEV

SEQ ID NO: 9764 - protein, 1215 aa, Homo sapiens
MGAMAYPLLLCLLLAQLGLGAVGASRDPQGRPDSPRERTPKGKPHAQQPGRASASDSSAPWSRSTDGTILAQKLAEEVPMDVASYLYTGDSHQLKRANCSGRYELAGLPGKWPALASAHPSLHRALDTLTHATNFLNVMLQSNKSREQNLQDDLDWYQALVWSLLEGEPSISRAAITFSTDSLSAPAPQVFLQATREESRILLQDLSSSAPHLANATLETEWFHGLRRKWRPHLHRRGPNQGPRGLGHSWRRKDGLGGDKSHFKWSPPYLECENGSYKPGWLVTLSSAIYGLQPNLVPEFRGVMKVDINLQKVDIDQCSSDGWFSGTHKCHLNNSECMPIKGLGFVLGAYECICKAGFYHPGVLPVNNFRRRGPDQHISGSTKDVSEEAYVCLPCREGCPFCADDSPCFVQEDKYLRLAIISFQALCMLLDFVSMLVVYHFRKAKSIRASGLILLETILFGSLLLYFPVVILYFEPSTFRCILLRWARLLGFATVYGTVTLKLHRVLKVFLSRTAQRIPYMTGGRVMRMLAVILLVVFWFLIGWTSSVCQNLEKQISLIGQGKTSDHLIFNMCLIDRWDYMTAVAEFLFLLWGVYLCYAVRTVPSAFHEPRYMAVAVHNELIISAIFHTIRFVLASRLQSDWMLMLYFAHTHLTVTVTIGLLLIPKFSHSSNNPRDDIATEAYEDELDMGRSGSYLNSSINSAWSEHSLDPEDIRDELKKLYAQLEIYKRKKMITNNPHLQKKRCSKKGLGRSIMRRITEIPETVSRQCSKEDKEGADHGTAKGTALIRKNPPESSGNTGKSKEETLKNRVFSLKKSHSTYDHVRDQTEESSSLPTESQEEETTENSTLESLSGKKLTQKLKEDSEAESTESVPLVCKSASAHNLSSEKKTGHPRTSMLQKSLSVIASAKEKTLGLAGKTQTAGVEERTKSQKPLPKDKETNRNHSNSDNTETKDPAPQNSNPAEEPRKPQKSGIMKQQRVNPTTANSDLNPGTTQMKDNFDIGEVCPWEVYDLTPGPVPSESKVQKHVSIVASEMEKNPTFSLKEKSHHKPKAAEVCQQSNQKRIDKAEVCLWESQGQSILEDEKLLISKTPVLPERAKEENGGQPRAANVCAGQSEELPPKAVASKTENENLNQIGHQEKKTSSSEENVRGSYNSSNNFQQPLTSRAEVCPWEFETPAQPNAGRSVALPASSALSANKIAGPRKEEIWDSFKV

SEQ ID NO: 9765 - protein, 553 aa, Homo sapiens
MNKNTSTVVSPSLLEKDPAFQMITIAKETGLGLKVLGGINRNEGPLVYIQEIIPGGDCYKDGRLKPGDQLVSVNKESMIGVSFEEAKSIITGAKLRLESAWEIAFIRQKSDNIQPENLSCTSLIEASGEYGPQASTLSLFSSPPEILIPKTSSTPKTNNDILSSCEIKTGYNKTVQIPITSENSTVGLSNTDVASAWTENYGLQEKISLNPSVRFKAEKLEMALNYLGIQPTKEQHQALRQQVQADSKGTVSFGDFVQVARNLFCLQLDEVNVGAHEISNILDSQLLPCDSSEADEMERLKCERDDALKEVNTLKEKLLESDKQRKQLTEELQNVKQEAKAVVEETRALRSRIHLAEAAQRQAHGMEMDYEEVIRLLEAKITELKAQLADYSDQNKESVQDLKKRIMVLDCQLRKSEMARKTFEASTEKLLHFVEAIQEVFSDNSTPLSNLSERRAVLASQTSLTPLGRNGRSIPATLALESKELVKSVRALLDMDCLPYGWEEAYTADGIKYFINHVTQTTSWIHPVMSVLNLSRSEENEEDCSRELPNQKS

SEQ ID NO: 9766 - protein, 743 aa, Homo sapiens
MLHFNRCHHLKKITQKCFSSIHVKTDKHAQRFLSRTFALAELRKSWYSTHSLVGDKNIILMGPPGAGKTTVGRIIGQKLGCCVIDVDDDILEKTWNMSVSEKLQDVGNEQFLEEEGKAVLNFSASGSVISLTGSNPMHDASMWHLKKNGIIVYLDVPLLDLICRLKLMKTDRIVGQNSGTSMKDLLKFRRQYYKKWYDARVFCESGASPEEVADKVLNAIKRYQDVDSETFISTRHVWPEDCEQKVSAKFFSEAVIEGLASDGGLFVPAKEFPKLSCGEWKSLVGATYVERAQILLERCIHPADIPAARLGEMIETAYGENFACSKIAPVRHLSGNQFILELFHGPTGSFKDLSLQLMPHIFAHCIPPSCNYMILVATSGDTGSAVLNGFSRLNKNDKQRIAVVAFFPENGVSDFQKAQIIGSQRENGWAVGVESDFDFCQTAIKRIFNDSDFTGFLTVEYGTILSSANSINWGRLLPQVVYHASAYLDLVSQGFISFGSPVDVCIPTGNFGNILAAVYAKMMGIPIRKFICASNQNHVLTDFIKTGHYDLRERKLAQTFSPSIDILKSSNLERHLHLMANKDGQLMTELFNRLESQHHFQIEKALVEKLQQDFVADWCSEGECLAAINSTYNTSGYILDPHTAVAKVVADRVQDKTCPVIISSTAHYSKFAPAIMQALKIKEINETSSSQLYLLGSYNALPPLHEALLERTKQQEKMEYQVCAADMNVLKSHVEQLVQNQFI

SEQ ID NO: 9767 - protein, 371 aa, Homo sapiens
MTQQPLRGVTSLRFNQDQSCFCCAMETGVRIYNVEPLMEKGHLDHEQVGSMGLVEMLHRSNLLALVGGGSSPKFSEISVLIWDDAREGKDSKEKLVLEFTFTKPVLSVRMRHDKIVIVLKNRIYVYSFPDNPRKLFEFDTRDNPKAAHPTPHLHTLGLCDLCPSLEKQLLVFPGHKCGSLQLVDLASTKPGTSSAPFTINAHQSDIACVSLNQPGTVVASASQKGTLIRLFDTQSKEKLVELRRGTDPATLYCINFSHDSSFLCASSDKGTVHIFALKDTRLNRRSALARVGKVGPMIGQYVDSQWSLASFTVPAESACICAFGRNTSKNVNSVIAICVDGTFHKYVFTPDGNCNREAFDVYLDICDDDDF

SEQ ID NO: 9768 - protein, 360 aa, Homo sapiens
MTQQPLRGVTSLRFNQDQSCFCCAMETGVRIYNVEPLMEKGHLDHEQVGSMGLVEMLHRSNLLALVGGGSSPKFSEISVLIWDDAREGKDSKEKLVLEFTFTKPVLSVRMRHDKIVIVLKNRIYVYSFPDNPRKLFEFDTRDNPKGLCDLCPSLEKQLLVFPGHKCGSLQLVDLASTKPGTSSAPFTINAHQSDIACVSLNQPGTVVASASQKGTLIRLFDTQSKEKLVELRRGTDPATLYCINFSHDSSFLCASSDKGTVHIFALKDTRLNRRSALARVGKVGPMIGQYVDSQWSLASFTVPAESACICAFGRNTSKNVNSVIAICVDGTFHKYVFTPDGNCNREAFDVYLDICDDDDF

SEQ ID NO: 9769 - protein, 160 aa, Homo sapiens
MSEVRLPPLRALDDFVLGSARLAAPDPCDPQRWCHRVINNLLYYQTNYLLCFGIGLALAGYVRPLHTLLSALVVAVALGVLVWAAETRAAVRRCRRSHPAACLAAVLAVGLLVLWVAGGACTFLFSIAGPVLRESPLPRDSQESSQSMLKAPGQPCRSPG

SEQ ID NO: 9770 - protein, 663 aa, Homo sapiens
MSARLPVLSPPRWPRLLLLSLLLLGAVPGPRRSGAFYLPGLAPVNFCDEEKKSDECKAEIELFVNRLDSVESVLPYEYTAFDFCQASEGKRPSENLGQVLFGERIEPSPYKFTFNKKETCKLVCTKTYHTEKAEDKQKLEFLKKSMLLNYQHHWIVDNMPVTWCYDVEDGQRFCNPGFPIGCYITDKGHAKDACVISSDFHERDTFYIFNHVDIKIYYHVVETGSMGARLVAAKLEPKSFKHTHIDKPDCSGPPMDISNKASGEIKIAYTYSVSFEEDDKIRWASRWDYILESMPHTHIQWFSIMNSLVIVLFLSGMVAMIMLRTLHKDIARYNQMDSTEDAQEEFGWKLVHGDIFRPPRKGMLLSVFLGSGTQILIMTFVTLFFACLGFLSPANRGALMTCAVVLWVLLGTPAGYVAARFYKSFGGEKWKTNVLLTSFLCPGIVFADFFIMNLILWGEGSSAAIPFGTLVAILALWFCISVPLTFIGAYFGFKKNAIEHPVRTNQIPRQIPEQSFYTKPLPGIIMGGILPFGCIFIQLFFILNSIWSHQMYYMFGFLFLVFIILVITCSEATILLCYFHLCAEDYHWQWRSFLTSGFTAVYFLIYAVHYFFSKLQITGTASTILYFGYTMIMVLIFFLFTGTIGFFACFWFVTKIYSVVKVD

SEQ ID NO: 9771 - protein, 427 aa, Homo sapiens
MFFTCGPNEAMVVSGFCRSPPVMVAGGRVFVLPCIQQIQRISLNTLTLNVKSEKVYTRHGVPISVTGIAQVKIQGQNKEMLAAACQMFLGKTEAEIAHIALETLEGHQRAIMAHMTVEEIYKDRQKFSEQVFKVASSDLVNMGISVVSYTLKDIHDDQDYLHSLGKARTAQVQKDARIGEAEAKRDAGIREAKAKQEKVSAQYLSEIEMAKAQRDYELKKAAYDIEVNTRRAQADLAYQLQVAKTKQQIEEQRVQVQVVERAQQVAVQEQEIARREKELEARVRKPAEAERYKLERLAEAEKSQLIMQAEAEAASVRMRGEAEAFAIGARARAEAEQMAKKAEAFQLYQEAAQLDMLLEKLPQVAEEISGPLTSANKITLVSSGSGTMGAAKVTGEVLDILTRLPESVERLTGVSISQVNHKPLRTA

SEQ ID NO: 9772 - protein, 197 aa, Homo sapiens
MANCERTFIAIKPDGVQRGLVGEIIKRFEQKGFRLVGLKFMQASEDLLKEHYVDLKDRPFFAGLVKYMHSGPVVAMVWEGLNVVKTGRVMLGETNPADSKPGTIRGDFCIQVGRTMANLERTFIAIKPDGVQRGLVGEIIKRFEQKGFRLVAMKFLRASEEHLKQHYIDLKDRPFFPGLVKYMNSGPVVAMEHHSWQ

SEQ ID NO: 9773 - protein, 589 aa, Homo sapiens
MAESGESGGPPGSQDSAAGAEGAGAPAAAASAEPKIMKVTVKTPKEKEEFAVPENSSVQQFKEEISKRFKSHTDQLVLIFAGKILKDQDTLSQHGIHDGLTVHLVIKTQNRPQDHSAQQTNTAGSNVTTSSTPNSNSTSGSATSNPFGLGGLGGLAGLSSLGLNTTNFSELQSQMQRQLLSNPEMMVQIMENPFVQSMLSNPDLMRQLIMANPQMQQLIQRNPEISHMLNNPDIMRQTLELARNPAMMQEMMRNQDRALSNLESIPGGYNALRRMYTDIQEPMLSAAQEQFGGNPFASLVSNTSSGEGSQPSRTENRDPLPNPWAPQTSQSSSASSGTASTVGGTTGSTASGTSGQSTTAPNLVPGVGASMFNTPGMQSLLQQITENPQLMQNMLSAPYMRSMMQSLSQNPDLAAQMMLNNPLFAGNPQLQEQMRQQLPTFLQQMQNPDTLSAMSNPRAMQALLQIQQGLQTLATEAPGLIPGFTPGLGALGSTGGSSGTNGSNATPSENTSPTAGTTEPGHQQFIQQMLQALAGVNPQLQNPEVRFQQQLEQLSAMGFLNREANLQALIATGGDINAAIERLLGSQPS

SEQ ID NO: 9774 - protein, 372 aa, Homo sapiens
MDSVRSGPFGQIFRPDNFVFGQSGAGNNWAKGHYTEGAELVDSVLDVVRKEAESCDCLQGFQLTHSLGGGTGSGMGTLLISKIREEYPDRIMNTFSVVPSPKVSDTVVEPYNATLSVHQLVENTDETYCIDNEALYDICFRTLKLTTPTYGDLNHLVSATMSGVTTCLRFPGQLNADLRKLAVNMVPFPRLHFFMPGFAPLTSRGSQQYRALTVPELTQQVFDAKNMMAACDPRHGRYLTVAAVFRGRMSMKEVDEQMLNVQNKNSSYFVEWIPNNVKTAVCDIPPRGLKMAVTFIGNSTAIQELFKRISEQFTAMFRRKAFLHWYTGEGMDEMEFTEAESNMNDLVSEYQQYQDATAEEEEDFGEEAEEEA

SEQ ID NO: 9775 - protein, 2089 aa, Homo sapiens
MEDTQAIDWDVEEEEETEQSSESLRCNVEPVGRLHIFSGAHGPEKDFPLHLGKNVVGRMPDCSVALPFPSISKQHAEIEILAWDKAPILRDCGSLNGTQILRPPKVLSPGVSHRLRDQELILFADLLCQYHRLDVSLPFVSRGPLTVEETPRVQGETQPQRLLLAEDSEEEVDFLSERRMVKKSRTTSSSVIVPESDEEGHSPVLGGLGPPFAFNLNSDTDVEEGQQPATEEASSAARRGATVEAKQSEAEVVTEIQLEKDQPLVKERDNDTKVKRGAGNGVVPAGVILERSQPPGEDSDTDVDDDSRPPGRPAEVHLERAQPFGFIDSDTDAEEERIPATPVVIPMKKRKIFHGVGTRGPGAPGLAHLQESQAGSDTDVEEGKAPQAVPLEKSQASMVINSDTDDEEEVSAALTLAHLKESQPAIWNRDAEEDMPQRVVLLQRSQTTTERDSDTDVEEEELPVENREAVLKDHTKIRALVRAHSEKDQPPFGDSDDSVEADKSSPGIHLERSQASTTVDINTQVEKEVPPGSAIIHIKKHQVSVEGTNQTDVKAVGGPAKLLVVSLEEAWPLHGDCETDAEEGTSLTASVVADVRKSQLPAEGDAGAEWAAAVLKQERAHEVGAQGGPPVAQVEQDLPISRENLTDLVVDTDTLGESTQPQREGAQVPTGREREQHVGGTKDSEDNYGDSEDLDLQATQCFLENQGLEAVQSMEDEPTQAFMLTPPQELGPSHCSFQTTGTLDEPWEVLATQPFCLRESEDSETQPFDTHLEAYGPCLSPPRAIPGDQHPESPVHTEPMGIQGRGRQTVDKVMGIPKETAERVGPERGPLERETEKLLPERQTDVTGEEELTKGKQDREQKQLLARDTQRQESDKNGESASPERDRESLKVEIETSEEIQEKQVQKQTLPSKAFEREVERPVANRECDPAELEEKVPKVILERDTQRGEPEGGSQDQKGQASSPTPEPGVGAGDLPGPTSAPVPSGSQSGGRGSPVSPRRHQKGLLNCKMPPAEKASRIRAAEKVSRGDQESPDACLPPTVPEAPAPPQKPLNSQSQKHLAPPPLLSPLLPSIKPTVRKTRQDGSQEAPEAPLSSELEPFHPKPKIRTRKSSRMTPFPATSAAPEPHPSTSTAQPVTPKPTSQATRSRTNRSSVKTPEPVVPTAPELQPSTSTDQPVTSEPTSQVTRGRKSRSSVKTPETVVPTALELQPSTSTDRPVTSEPTSQATRGRKNRSSVKTPEPVVPTAPELQPSTSTDQPVTSEPTYQATRGRKNRSSVKTPEPVVPTAPELRPSTSTDRPVTPKPTSRTTRSRTNMSSVKTPETVVPTAPELQISTSTDQPVTPKPTSRTTRSRTNMSSVKNPESTVPIAPELPPSTSTEQPVTPEPTSRATRGRKNRSSGKTPETLVPTAPKLEPSTSTDQPVTPEPTSQATRGRTNRSSVKTPETVVPTAPELQPSTSTDQPVTPEPTSQATRGRTDRSSVKTPETVVPTAPELQASASTDQPVTSEPTSRTTRGRKNRSSVKTPETVVPAAPELQPSTSTDQPVTPEPTSRATRGRTNRSSVKTPESIVPIAPELQPSTSRNQLVTPEPTSRATRCRTNRSSVKTPEPVVPTAPEPHPTTSTDQPVTPKLTSRATRRKTNRSSVKTPKPVEPAASDLEPFTPTDQSVTPEAIAQGGQSKTLRSSTVRAMPVPTTPEFQSPVTTDQPISPEPITQPSCIKRQRAAGNPGSLAAPIDHKPCSAPLEPKSQASRNQRWGAVRAAESLTAIPEPASPQLLETPIHASQIQKVEPAGRSRFTPELQPKASQSRKRSLATMDSPPHQKQPQRGEVSQKTVIIKEEEEDTAEKPGKEEDVVTPKPGKRKRDQAEEEPNRIPSRSLRRTKLNQESTAPKVLFTGVVDARGERAVLALGGSLAGSAAEASHLVTDRIRRTVKFLCALGRGIPILSLDWLHQSRKAGFFLPPDEYVVTDPEQEKNFGFSLQDALSRARERRLLEGYEIYVTPGVQPPPPQMGEIISCCGGTYLPSMPRSYKPQRVVITCPQDFPHCSIPLRVGLPLLSPEFLLTGVLKQEAKPEAFVLSPLEMSST

SEQ ID NO: 9776 - protein, 556 aa, Homo sapiens
MFASCHCVPRGRRTMKMIHFRSSSVKSLSQEMRCTIRLLDDSEISCHIQRETKGQFLIDHICNYYSLLEKDYFGIRYVDPEKQRHWLEPNKSIFKQMKTHPPYTMCFRVKFYPHEPLKIKEELTRYLLYLQIKRDIFHGRLLCSFSDAAYLGACIVQAELGDYDPDEHPENYISEFEIFPKQSQKLERKIVEIHKNELRGQSPPVAEFNLLLKAHTLETYGVDPHPCKDSTGTTTFLGFTAAGFVVFQGNKRIHLIKWPDVCKLKFEGKTFYVIGTQKEKKAMLAFHTSTPAACKHLWKCGVENQAFYKYAKSSQIKTVSSSKIFFKGSRFRYSGKVAKEVVEASSKIQREPPEVHRANITQSRSSHSLNKQLIINMEPLQPLLPSPSEQEEELPLGEGVPLPKEENISAPLISSSPVKAAREYEDPPSEEEDKIKEEPLTISELVYNPSASLLPTPVDDDEIDMLFDCPSRLELEREDTDSFEDLEADENAFLIAEEEELKEARRALSWSYDILTGHIRVNPLVKSFSRLLVVGLGLLLFVFPLLLLLLESVSMQ

SEQ ID NO: 9777 - protein, 1041 aa, Homo sapiens
MATPAGLERWVQDELHSVLGLSERHVAQFLIGTAQRCTSAEEFVQRLRDTDTLDLSGPARDFALRLWNKVPRKAVVEKPARAAEREARALLEKNRSYRLLEDSEESSEETVSRAGSSLQKKRKKRKHLRKKREEEEEEEASEKGKKKTGGSKQQTEKPESEDEWERTERERLQDLEERDAFAERVRQRDKDRTRNVLERSDKKAYEEAQKRLKMAEEDRKAMVPELRKKSRREYLAKREREKLEDLEAELADEEFLFGDVELSRHERQELKYKRRVRDLAREYRAAGEQEKLEATNRYHMPKETRGQPARAVDLVEEESGAPGEEQRRWEEARLGAASLKFGARDAASQEPKYQLVLEEEETIEFVRATQLQGDEEPSAPPTSTQAQQKESIQAVRRSLPVFPFREELLAAIANHQVLIIEGETGSGKTTQIPQYLFEEGYTNKGMKIACTQPRRVAAMSVAARVAREMGVKLGNEVGYSIRFEDCTSERTVLRYMTDGMLLREFLSEPDLASYSVVMVDEAHERTLHTDILFGLIKDVARFRPELKVLVASATMDTARFSTFFDDAPVFRIPGRRFPVDIFYTKAPEADYLEACVVSVLQIHVTQPPGDILVFLTGQEEIEAACEMLQDRCRRLGSKIRELLVLPIYANLPSDMQARIFQPTPPGARKVVVATNIAETSLTIEGIIYVLDPGFCKQKSYNPRTGMESLTVTPCSKASANQRAGRAGRVAAGKCFRLYTAWAYQHELEETTVPEIQRTSLGNVVLLLKSLGIHDLMHFDFLDPPPYETLLLALEQLYALGALNHLGELTTSGRKMAELPVDPMLSKMILASEKYSCSEEILTVAAMLSVNNSIFYRPKDKVVHADNARVNFFLPGGDHLVLLNVYTQWAESGYSSQWCYENFVQFRSMRRARDVREQLEGLLERVEVGLSSCQGDYIRVRKAITAGYFYHTARLTRSGYRTVKQQQTVFIHPNSSLFEQQPRWLLYHELVLTTKEFMRQVLEIESSWLLEVAPHYYKAKELEDPHAKKMPKKIGKTREELG

SEQ ID NO: 9778 - protein, 685 aa, Homo sapiens
MVLVLHHILIAVVQFLRRGQQVFLKPDEPPPPPQPCADSLQDALLSLGSVIDISGLQRAVKEALSAVLPRVETVYTYLLDGESQLVCEDPPHELPQEGKVRFTDEDEHVIQHCFHYTSTVLTSTLAFQKEQKLKCECQALLQVAKNLFTHLDDVSVLLQEIITEARNLSNAEICSVFLLDQNELVAKVFDGGVVDDESYEIRIPADQGIAGHVATTGQILNIPDAYAHPLFYRGVDDSTGFRTRNILCFPIKNENQEVIGVAELVNKINGPWFSKFDEDLATAFSIYCGISIAHSLLYKKVNEAQYRSHLANEMMMYHMKVSDDEYTKLLHDGIQPVAAIDSNFASFTYTPRSLPEDDTSMAILSMLQDMNFINNYKIDCPTLARFCLMVKKGYRDPPYHNWMHAFSVSHFCYLLYKNLELTNYLEDIEIFALFISCMCHDLDHRGTNNSFQVASKSVLAALYSSEGSVMERHHFAQAIAILNTHGCNIFDHFSRKDYQRMLDLMRDIILATDLAHHLRIFKDLQKMAEVGYDRNNKQHHRLLLCLLMTSCDLSDQTKGWKTTRKIAELIYKEFFSQGDLEKAMGNRPMEMMDREKAYIPELQISFMEHIAMPIYKLLQDLFPKAAELYERVASNREHWTKVSHKFTIRGLPSNNSLDFLDEEYEVPDLDGTRAPINGCCSLDAE

SEQ ID NO: 9779 - protein, 134 aa, Homo sapiens
MDPQTAPSRALLLLLFLHLAFLGGRSHPLGSPGSASDLETSGLQEQRNHLQGKLSELQVEQTSLEPLQESPRPTGVWKSREVATEGIRGHRKMVLYTLRAPRSPKMVQGSGCFGRKMDRISSSSGLGCKVLRRH

SEQ ID NO: 9780 - protein, 315 aa, Homo sapiens
MYQPSRGAARRLGPCLRAYQARPQDQLYPGTLPFPPLWPHSTTTTSPSSPLFWSPLPPRLPTQRLPQVPPLPLPQIQALSSAWVVLPPGKGEEGPGPELHSGCLDGLRSLFEGPPCPYPGAWIPFQVPGTAHPSPATPSGDPSMEEHLSVMYERLRQELPKLFLQSHDYSLYSLDVEFINEILNIRTKGRTWYILSLTLCRFLAWNYFAHLRLEVLQLTRHPENWTLQARWRLVGLPVHLLFLRFYKRDKDEHYRTYDAYSTFYLNSSGLICRHRLDKLMPSHSPPTPVKKLLVGALVALGLSEPEPDLNLCSKP

SEQ ID NO: 9781 - protein, 151 aa, Homo sapiens
MSSFSTTTVSFLLLLAFQLLGQTRANPMYNAVSNADLMDFKNLLDHLEEKMPLEDEVVPPQVLSEPNEEAGAALSPLPEVPPWTGEVSPAQRDGGALGRGPWDSSDRSALLKSKLRALLTAPRSLRRSSCFGGRMDRIGAQSGLGCNSFRY

SEQ ID NO: 9782 - protein, 421 aa, Homo sapiens
MEFPFDVDALFPERITVLDQHLRPPARRPGTTTPARVDLQQQIMTIIDELGKASAKAQNLSAPITSASRMQSNRHVVYILKDSSARPAGKGAIIGFIKVGYKKLFVLDDREAHNEVEPLCILDFYIHESVQRHGHGRELFQYMLQKERVEPHQLAIDRPSQKLLKFLNKHYNLETTVPQVNNFVIFEGFFAHQHRPPAPSLRATRHSRAAAVDPTPAAPARKLPPKRAEGDIKPYSSSDREFLKVAVEPPWPLNRAPRRATPPAHPPPRSSSLGNSPERGPLRPFVPEQELLRSLRLCPPHPTARLLLAADPGGSPAQRRRTRGTPPGLVAQSCCYSRHGGVNSSSPNTGNQDSKQGEQETKNRSASEEQALSQDGSGEKPMHTAPPQAPAPPAQSWTVGGDILNARFIRNLQERRSTRPW

SEQ ID NO: 9783 - protein, 566 aa, Homo sapiens
MTILPKKKPPPPDADPANEPPPPGPMPPAPRRGGGVGVGGGGTGVGGGDRDRDSGVVGARPRASPPPQGPLPGPPGALHRWALAVPPGAVAGPRPQQASPPPCGGPGGPGGGPGDALGAAAAGVGAAGVVVGVGGAVGVGGCCSGPGHSKRRRQAPGVGAVGGGSPEREEVGAGYNSEDEYEAAAARIEAMDPATVEQQEHWFEKALRDKKGFIIKQMKEDGACLFRAVADQVYGDQDMHEVVRKHCMDYLMKNADYFSNYVTEDFTTYINRKRKNNCHGNHIEMQAMAEMYNRPVEVYQYSTEPINTFHGIHQNEDEPIRVSYHRNIHYNSVVNPNKATIGVGLGLPSFKPGFAEQSLMKNAIKTSEESWIEQQMLEDKKRATDWEATNEAIEEQVARESYLQWLRDQEKQARQVRGPSQPRKASATCSSATAAASSGLEEWTSRSPRQRSSASSPEHPELHAELGMKPPSPGTVLALAKPPSPCAPGTSSQFSAGADRATSPLVSLYPALECRALIQQMSPSAFGLNDWDDDEILASVLAVSQQEYLDSMKKNKVHRDPPPDKS

SEQ ID NO: 9784 - protein, 481 aa, Homo sapiens
MQLYSSVCTHYPAGAPGPTAAAPAPPAAATPFKVSLQPPGAAGAAPEPETGECQPAAAAEHREAAAVPAAKMPAFSSCFEVVSGAAAPASAAAGPPGASCKPPLPPHYTSTAQITVRALGADRLLLHGPDPVPGAAGSAAAPRGRCLLLAPAPAAPVPPRRGSSAWLLEELLRPDCPEPAGLDATREGPDRNFRLSEHRQALAAAKHRGPAATPGSPDPGPGPWGEEHLAERGPRGWERGGDRCDAPGGDAARRPDPEAEAPPAGSIEAAPSSAAEPVIVSRSDPRDEKLALYLAEVEKQDKYLRQRNKYRFHIIPDGNCLYRAVSKTVYGDQSLHRELREQTVHYIADHLDHFSPLIEGDVGEFIIAAAQDGAWAGYPELLAMGQMLNVNIHLTTGGRLESPTVSTMIHYLGPEDSLRPSIWLSWLSNGHYDAVFDHSYPNPEYDNWCKQTQVQRKRDEELAKSMAISLSKMYIEQNACS

SEQ ID NO: 9785 - protein, 770 aa, Homo sapiens
MFPQSRHPTPHQAAGQPFKFTIPESLDRIKEEFQFLQAQYHSLKLECEKLASEKTEMQRHYVMYYEMSYGLNIEMHKQTEIAKRLNTICAQVIPFLSQEHQQQVAQAVERAKQVTMAELNAIIGQQQLQAQHLSHGHGPPVPLTPHPSGLQPPGIPPLGGSAGLLALSSALSGQSHLAIKDDKKHHDAEHHRDREPGTSNSLLVPDSLRGTDKRRNGPEFSNDIKKRKVDDKDSSHYDSDGDKSDDNLVVDVSNEDPSSPRASPAHSPRENGIDKNRLLKKDASSSPASTASSASSTSLKSKEMSLHEKASTPVLKSSTPTPRSDMPTPGTSATPGLRPGLGKPPAIDPLVNQAAAGLRTPLAVPGPYPAPFGMVPHAGMNGELTSPGAAYASLHNMSPQMSAAAAAAAVVAYGRSPMVGFDPPPHMRVPTIPPNLAGIPGGKPAYSFHVTADGQMQPVPFPPDALIGPGIPRHARQINTLNHGEVVCAVTISNPTRHVYTGGKGCVKVWDISHPGNKSPVSQLDCLNRDNYIRSCKLLPDGCTLIVGGEASTLSIWDLAAPTPRIKAELTSSAPACYALAISPDSKVCFSCCSDGNIAVWDLHNQTLVRQFQGHTDGASCIDISNDGTKLWTGGLDNTVRSWDLREGRQLQQHDFTSQIFSLGYCPTGEWLAVGMESSNVEVLHVNKPDKYQLHLHESCVLSLKFAYCGKWFVSTGKDNLLNAWRTPYGASIFQSKESSSVLSCDISVDDKYIVTGSGDKKATVYEVIY

SEQ ID NO: 9786 - protein, 182 aa, Homo sapiens
MARLLWLLRGLTLGTAPRRAVRGQAGGGGPGTGPGLGEAGSLATCELPLAKSEWQKKLTPEQFYVTREKGTEPPFSGIYLNNKEAGMYHCVCCDSPLFSSEKKYCSGTGWPSFSEAHGTSGSDESHTGILRRLDTSLGSARTEVVCKQCEAHLGHVFPDGPGPNGQRFCINSVALKFKPRKH

SEQ ID NO: 9787 - protein, 940 aa, Homo sapiens
MGSGPIDPKELLKGLDSFLNRDGEVKSVDGISKIFSLMKEARKMVSRCTYLNILLQTRSPEILVKFIDVGGYKLLNNWLTYSKTTNNIPLLQQILLTLQHLPLTVDHLKQNNTAKLVKQLSKSSEDEELRKLASVLVSDWMAVIRSQSSTQPAEKDKKKRKDEGKSRTTLPERPLTEVKAETRAEEAPEKKREKPKSLRTTAPSHAKFRSTGLELETPSLVPVKKNASTVVVSDKYNLKPIPLKRQSNVAAPGDATPPAEKKYKPLNTTPNATKEIKVKIIPPQPMEGLGFLDALNSAPVPGIKIKKKKKVLSPTAAKPSPFEGKTSTEPSTAKPSSPEPAPPSEAMDADRPGTPVPPVEVPELMDTASLEPGALDAKPVESPGDPNQLTRKGRKRKSVTWPEEGKLREYFYFELDETERVNVNKIKDFGEAAKREILSDRHAFETARRLSHDNMEEKVPWVCPRPLVLPSPLVTPGSNSQERYIQAEREKGILQELFLNKESPHEPDPEPYEPIPPKLIPLDEECSMDETPYVETLEPGGSGGSPDGAGGSKLPPVLANLMGSMGAGKGPQGPGGGGINVQEILTSIMGSPNSHPSEELLKQPDYSDKIKQMLVPHGLLGPGPIANGFPPGGPGGPKGMQHFPPGPGGPMPGPHGGPGGPVGPRLLGPPPPPRGGDPFWDGPGDPMRGGPMRGGPGPGPGPYHRGRGGRGGNEPPPPPPPFRGARGGRSGGGPPNGRGGPGGGMVGGGGHRPHEGPGGGMGNSSGHRPHEGPGGGMGSGHRPHEGPGGSMGGGGGHRPHEGPGGGISGGSGHRPHEGPGGGMGAGGGHRPHEGPGGSMGGSGGHRPHEGPGHGGPHGHRPHDVPGHRGHDHRGPPPHEHRGHDGPGHGGGGHRGHDGGHSHGGDMSNRPVCRHFMMKGNCRYENNCAFYHPGVNGPPLP

SEQ ID NO: 9788 - protein, 837 aa, Homo sapiens
MAANVGDQRSTDWSSQYSMVAGAGRENGMETPMHENPEWEKARQALASISKSGAAGGSAKSSSNGPVASAQYVSQAEASALQQQQYYQWYQQYNYAYPYSYYYPMPPVPGMDESMSYQAPPQQLPSAQPPQPSNPPHGAHTLNSGPQPGTAPATQHSQAGPATGQAYGPHTYTEPAKPKKGQQLWNRMKPAPGTGGLKFNIQKRPFAVTTQSFGSNAEGQHSGFGPQPNPEKVQNHSGSSARGNLSGKPDDWPQDMKEYVERCFTACESEEDKDRTEKLLKEVLQARLQDGSAYTIDWSREPLPGLTREPVAESPKKKRWEAASSLHPPRGAGSATRGGGAPSQRGTPGAGGAGRARGNSFTKFGNRNVFMKDNSSSSSTDSRSRSSSRSPTRHFRRSDSHSDSDSSYSGNECHPVGRRNPPPKGRGGRGAHMDRGRGRAQRGKRHDLAPTKRSRKKMAALECEDPERELKKQKRAARFQHGHSRRLRLEPLVLQMSSLESSGADPDWQELQIVGTCPDITKHYLRLTCAPDPSTVRPVAVLKKSLCMVKCHWKEKQDYAFACEQMKSIRQDLTVQGIRTEFTVEVYETHARIALEKGDHEEFNQCQTQLKSLYAENLPGNVGEFTAYRILYYIFTKNSGDITTELAYLTRELKADPCVAHALALRTAWALGNYHRFFRLYCHAPCMSGYLVDKFADRERKVALKAMIKTYVVPSSLLPLLFPSFRLAPPLRPAPGRRPPPAPNPCPGPCFPIIFLHSALPSPVPLALLVGHLCVPGHSSPSPHCSQLTASGASSPPHLCVSSSCSLLPGPPSSLLALGFLRTLRSLLSQLVAVLPP

SEQ ID NO: 9789 - protein, 393 aa, Homo sapiens
MAAVGAGGSTAAPGPGAVSAGALEPGTASAAHRRLKYISLAVLVVQNASLILSIRYARTLPGDRFFATTAVVMAEVLKGLTCLLLLFAQKRGNVKHLVLFLHEAVLVQYVDTLKLAVPSLIYTLQNNLQYVAISNLPAATFQVTYQLKILTTALFSVLMLNRSLSRLQWASLLLLFTGVAIVQAQQAGGGGPRPLDQNPGAGLAAVVASCLSSGFAGVYFEKILKGSSGSVWLRNLQLGLFGTALGLVGLWWAEGTAVATRGFFFGYTPAVWGVVLNQAFGGLLVAVVVKYADNILKGFATSLSIVLSTVASIRLFGFHVDPLFALGAGLVIGAVYLYSLPRGAAKAIASASASASGPCVHQQPPGQPPPPQLSSHRGDLITEPFLPKSVLVK

SEQ ID NO: 9790 - protein, 224 aa, Homo sapiens
MAAVGAGGSTAAPGPGAVSAGALEPGTASAAHRRLKYISLAVLVVQNASLILSIRYARTLPGDRFFATTAVVMAEVLKGLTCLLLLFAQKRGNVKHLVLFLHEAVLVQYVDTLKLAVPSLIYTLQNNLQYVAISNLPAATFQPSPRCSQSHSLCLCLRLRALRSPAASRAATTTAAVFPPWRPHHGALSAKVAHQGEGFLAAGIEDIGLASFSLLALGPAGTKL

SEQ ID NO: 9791 - protein, 404 aa, Homo sapiens
MRKRTEPVALEHERCAAAGSSSSGSAAAALDADCRLKQNLRLTGPAAAEPRCAADAGMKRALGRRKGVWLRLRKILFCVLGLYIAIPFLIKLCPGIQAKLIFLNFVRVPYFIDLKKPQDQGLNHTCNYYLQPEEDVTIGVWHTVPAVWWKNAQGKDQMWYEDALASSHPIILYLHGNAGTRGGDHRVELYKVLSSLGYHVVTFDYRGWGDSVGTPSERGMTYDALHVFDWIKARSGDNPVYIWGHSLGTGVATNLVRRLCERETPPDALILESPFTNIREEAKSHPFSVIYRYFPGFDWFFLDPITSSGIKFANDENVKHISCPLLILHAEDDPVVPFQLGRKLYSIAAPARSFRDFKVQFVPFHSDLGYRHKYIYKSPELPRILRPQQGPGSSPDPSMWSELV

SEQ ID NO: 9792 - protein, 773 aa, Homo sapiens
MIRDLSKMYPQTRHPAPHQPAQPFKFTISESCDRIKEEFQFLQAQYHSLKLECEKLASEKTEMQRHYVMYYEMSYGLNIEMHKQAEIVKRLNAICAQVIPFLSQEHQQQVVQAVERAKQVTMAELNAIIGQQLQAQHLSHGHGLPVPLTPHPSGLQPPAIPPIGSSAGLLALSSALGGQSHLPIKDEKKHHDNDHQRDRDSIKSSSVSPSASFRGAEKHRNSADYSSESKKQKTEEKEIAARYDSDGEKSDDNLVVDVSNEDPSSPRGSPAHSPRENGLDKTRLLKKDAPISPASIASSSSTPSSKSKELSLNEKSTTPVSKSNTPTPRTDAPTPGSNSTPGLRPVPGKPPGVDPLASSLRTPMAVPCPYPTPFGIVPHAGMNGELTSPGAAYAGLHNISPQMSAAAAAAAAAAAYGRSPVVGFDPHHHMRVPAIPPNLTGIPGGKPAYSFHVSADGQMQPVPFPPDALIGPGIPRHARQINTLNHGEVVCAVTISNPTRHVYTGGKGCVKVWDISHPGNKSPVSQLDCLNRDNYIRSCRLLPDGRTLIVGGEASTLSIWDLAAPTPRIKAELTSSAPACYALAISPDSKVCFSCCSDGNIAVWDLHNQTLVRQFQGHTDGASCIDISNDGTKLWTGGLDNTVRSWDLREGRQLQQHDFTSQIFSLGYCPTGEWLAVGMENSNVEVLHVTKPDKYQLHLHESCVLSLKFAHCGKWFVSTGKDNLLNAWRTPYGASIFQSKESSSVLSCDISVDDKYIVTGSGDKKATVYEVIY

SEQ ID NO: 9793 - protein, 167 aa, Homo sapiens
MPKRKKQNHHQPPTQQQPPLPEREETGDEEDGSPIALHRGPPGSRGPLIPPLLSLPPPPWGRGPIRRGLGPRSSPYGRGWWGVNAEPPFPGPGHGGPTRGSFHKEQRNPRRLKSWSLIKNTCPPKDDPQVMEDKSDRPVCRHFAKKGHCRYEDLCAFYHPGVNGPPL

SEQ ID NO: 9794 - protein, 188 aa, Homo sapiens
MPKRKKQNHHQPPTQQQPPLPEREETGDEEDGSPIGPPSLLGPPPMANGKPGDPKSALHRGPPGSRGPLIPPLLSLPPPPWGRGPIRRGLGPRSSPYGRGWWGVNAEPPFPGPGHGGPTRGSFHKEQRNPRRLKSWSLIKNTCPPKDDPQVMEDKSDRPVCRHFAKKGHCRYEDLCAFYHPGVNGPPL

SEQ ID NO: 9795 - protein, 876 aa, Homo sapiens
MGPEALSSLLLLLLVASGDADMKGHFDPAKCRYALGMQDRTIPDSDISASSSWSDSTAARHSRLESSDGDGAWCPAGSVFPKEEEYLQVDLQRLHLVALVGTQGRHAGGLGKEFSRSYRLRYSRDGRRWMGWKDRWGQEVISGNEDPEGVVLKDLGPPMVARLVRFYPRADRVMSVCLRVELYGCLWRDGLLSYTAPVGQTMYLSEAVYLNDSTYDGHTVGGLQYGGLGQLADGVVGLDDFRKSQELRVWPGYDYVGWSNHSFSSGYVEMEFEFDRLRAFQAMQVHCNNMHTLGARLPGGVECRFRRGPAMAWEGEPMRHNLGGNLGDPRARAVSVPLGGRVARFLQCRFLFAGPWLLFSEISFISDVVNNSSPALGGTFPPAPWWPPGPPPTNFSSLELEPRGQQPVAKAEGSPTAILIGCLVAIILLLLLIIALMLWRLHWRRLLSKAERRVLEEELTVHLSVPGDTILINNRPGPREPPPYQEPRPRGNPPHSAPCVPNGSAYSGDYMEPEKPGAPLLPPPPQNSVPHYAEADIVTLQGVTGGNTYAVPALPPGAVGDGPPRVDFPRSRLRFKEKLGEGQFGEVHLCEVDSPQDLVSLDFPLNVRKGHPLLVAVKILRPDATKNARNDFLKEVKIMSRLKDPNIIRLLGVCVQDDPLCMITDYMENGDLNQFLSAHQLEDKAAEGAPGDGQAAQGPTISYPMLLHVAAQIASGMRYLATLNFVHRDLATRNCLVGENFTIKIADFGMSRNLYAGDYYRVQGRAVLPIRWMAWECILMGKFTTASDVWAFGVTLWEVLMLCRAQPFGQLTDEQVIENAGEFFRDQGRQVYLSRPPACPQGLYELMLRCWSRESEQRPPFSQLHRFLAEDALNTV

SEQ ID NO: 9796 - protein, 634 aa, Homo sapiens
MWLQQRLKGLPGLLSSSWARRLLCLLGLLLLLLWFGGSGARRAAGGLHLLPWSRGEPGAAEPSACLEAATRAWRGLRERGEVVPLGPGVPALVANGFLALDVAANRLWVTPGEREPAVAPDFVPFVQLRPLSALAEAGEAVLLLREGLLRRVRCLQLGSPGPGPVAAGPGPASVSGLAAGSGRDCVLLQEDFLAHRGRPHVYLQRIQLNNPTERVAALQTVGPTAGPAPKAFTSTLEKVGDHQFLLYSGRSPPTPTGLVHLVVVAAKKLVNRLQVAPKTQLDETVLWVVHVSGPINPQVLKSKAAKELKALQDLARKEMLELLDMPAAELLQDHQLLWAQLFSPGVEMKKITDTHTPSGLTVNLTLYYMLSCSPAPLLSPSLSHRERDQMESTLNYEDHCFSGHATMHAENLWPGRLSSVQQILQLSDLWRLTLQKRGCKGLVKVGAPGILQGMVLSFGGLQFTENHLQFQADPDVLHNSYALHGIRYKNDHINLAVLADAEGKPYLHVSVESRGQPVKIYACKAGCLDEPVELTSAPTGHTFSVMVTQPITPLLYISTDLTHLQDLRHTLHLKAILAHDEHMAQQDPGLPFLFWFSVASLITLFHLFLFKLIYNEYCGPGAKPLFRSKEDPSV

SEQ ID NO: 9797 - protein, 406 aa, Homo sapiens
MATPGNLGSSVLASKTKTKKKHFVAQKVKLFRASDPLLSVLMWGVNHSINELSHVQIPVMLMPDDFKAYSKIKVDNHLFNKENMPSHFKFKEYCPMVFRNLRERFGIDDQDFQNSLTRSAPLPNDSQARSGARFHTSYDKRYIIKTITSEDVAEMHNILKKYHQYIVECHGITLLPQFLGMYRLNVDGVEIYVIVTRNVFSHRLSVYRKYDLKGSTVAREASDKEKAKELPTLKDNDFINEGQKIYIDDNNKKVFLEKLKKDVEFLAQLKLMDYSLLVGIHDVERAEQEEVECEENDGEEEGESDGTHPVGTPPDSPGNTLNSSPPLAPGEFDPNIDVYGIKCHENSPRKEVYFMAIIDILTHYDAKKKAAHAAKTVKHGAGAEISTVNPEQYSKRFLDFIGHILT

SEQ ID NO: 9798 - protein, 243 aa, Homo sapiens
MGPEALSSLLLLLLVASGDADMKGHFDPAKCRYALGMQDRTIPDSDISASSSWSDSTAARHSRLESSDGDGAWCPAGSVFPKEEEYLQVDLQRLHLVALVGTQGRHAGGLGKEFSRSYRLRYSRDGRRWMGWKDRWGQEVISGNEDPEGVVLKDLGPPMVARLVRFYPRADRVMSVCLRVELYGCLWRDCSMGVWASWQMVWWGWMTLGRVRSCGSGQAMTMWDGATTASPVAMWRWSLSLTG

SEQ ID NO: 9799 - protein, 667 aa, Homo sapiens
MWLQQRLKGLPGLLSSSWARRLLCLLGLLLLLLWFGGSGARRAAGGLHLLPWSRGEPGAAEPSACLEAATRAWRGLRERGEVVPLGPGVPALVANGFLALDVAANRLWVTPGEREPAVAPDFVPFVQLRPLSALAEAGEAVLLLREGLLRRVRCLQLGSPGPGPVAAGPGPASVSGLAAGSGRDCVLLQEDFLAHRGRPHVYLQRIQLNNPTERVAALQTVGPTAGPAPKAFTSTLEKVGDHQFLLYSGRSPPTPTGLVHLVVVAAKKLVNRLQVAPKTQLDETVLWVVHVSGPINPQVLKSKAAKELKALQDLARKEMLELLDMPAAELLQDHQLLWAQLFSPGVEMKKITDTHTPSGLTVNLTLYYMLSCSPAPLLSPSLSHRERDQMESTLNYEDHCFSGHATMHAENLWPGRLSSVQQILQLSDLWRLTLQKRGCKGLVKVGAPGILQGMVLSFGGLQFTENHLQFQADPDVLHNSYALHGIRYKNDHINLAVLADAEGKPYLHVSVESRGQPVKIYACKAGCLDEPVELTSAPTGHTFSVMVTQPITPLLYISTDLTHLQDLRHTLHLKAILAHDEHMAQQDPGLPFLFWFSVASLITLFHLFLFKLIYNEYCGPGAKPLFRSKVGSRHLVETRGLGLALSPVSRKGLAWRGGVRPGQEWVS

SEQ ID NO: 9800 - protein, 172 aa, Homo sapiens
MEEYAREPCPWRIVDDCGGAFTMGVIGGGVFQAIKGFRNAPVGIRHRLRGSANAVRIRAPQIGGSFAVWGGLFSTIDCGLVRLRGKEDPWNSITSGALTGAVLAARSGPLAMVGSAMMGGILLALIEGVGILLTRYTAQQFRNAPPFLEDPSQLPPKDGTPAPGYPSYQQYH

SEQ ID NO: 9801 - protein, 697 aa, Homo sapiens
MDHRKARVLPAGHYCPSLGIWASQVGSVRSSVPPSISRNPAMVNEARGNSSLNPCLEGSASSGSESSKDSSRCSTPGLDPERHERLREKMRRRLESGDKWFSLEFFPPRTAEGAVNLISRFDRMAAGGPLYIDVTWHPAGDPGSDKETSSMMIASTAVNYCGLETILHMTCCRQRLEEITGHLHKAKQLGLKNIMALRGDPIGDQWEEEEGGFNYAVDLVKHIRSEFGDYFDICVAGYPKGHPEAGSFEADLKHLKEKVSAGADFIITQLFFEADTFFRFVKACTDMGITCPIVPGIFPIQGYHSLRQLVKLSKLEVPQEIKDVIEPIKDNDAAIRNYGIELAVSLCQELLASGLVPGLHFYTLNREMATTEVLKRLGMWTEDPRRPLPWALSAHPKRREEDVRPIFWASRPKSYIYRTQEWDEFPNGRWGNSSSPAFGELKDYYLFYLKSKSPKEELLKMWGEELTSEESVFEVFVLYLSGEPNRNGHKVTCLPWNDEPLAAETSLLKEELLRVNRQGILTINSQPNINGKPSSDPIVGWGPSGGYVFQKAYLEFFTSRETAEALLQVLKKYELRVNYHLVNVKGENITNAPELQPNAVTWGIFPGREIIQPTVVDPVSFMFWKDEAFALWIERWGKLYEEESPSRTIIQYIHDNYFLVNLVDNDFPLDNCLWQVVEDTLELLNRPTQNARETEAP

SEQ ID NO: 9802 - protein, 370 aa, Homo sapiens
MDAPRQVVNFGPGPAKLPHSVLLEIQKELLDYKGVGISVLEMSHRSSDFAKIINNTENLVRELLAVPDNYKVIFLQGGGCGQFSAVPLNLIGLKAGRCADYVVTGAWSAKAAEEAKKFGTINIVHPKLGSYTKIPDPSTWNLNPDASYVYYCANETVHGVEFDFIPDVKGAVLVCDMSSNFLSKPVDVSKFGVIFAGAQKNVGSAGVTVVIVRDDLLGFALRECPSVLEYKVQAGNSSLYNTPPCFSIYVMGLVLEWIKNNGGAAAMEKLSSIKSQTIYEIIDNSQGFYVCPVEPQNRSKMNIPFRIGNAKGDDALEKRFLDKALELNMLSLKGHRSVGGIRASLYNAVTIEDVQKLAAFMKKFLEMHQL

SEQ ID NO: 9803 - protein, 756 aa, Homo sapiens
MAEAHQAVAFQFTVTPDGIDLRLSHEALRQIYLSGLHSWKKKFIRFKNGIITGVYPASPSSWLIVVVGVMTTMYAKIDPSLGIIAKINRTLETANCMSSQTKNVVSGVLFGTGLWVALIVTMRYSLKVLLSYHGWMFTEHGKMSRATKIWMGMVKIFSGRKPMLYSFQTSLPRLPVPAVKDTVNRYLQSVRPLMKEEDFKRMTALAQDFAVGLGPRLQWYLKLKSWWATNYVSDWWEEYIYLRGRGPLMVNSNYYAMDLLYILPTHIQAARAGNAIHAILLYRRKLDREEIKPIRLLGSTIPLCSAQWERMFNTSRIPGEETDTIQHMRDSKHIVVYHRGRYFKVWLYHDGRLLKPREMEQQMQRILDNTSEPQPGEARLAALTAGDRVPWARCRQAYFGRGKNKQSLDAVEKAAFFVTLDETEEGYRSEDPDTSMDSYAKSLLHGRCYDRWFDKSFTFVVFKNGKMGLNAEHSWADAPIVAHLWEYVMSIDSLQLGYAEDGHCKGDINPNIPYPTRLQWDIPGECQEVIETSLNTANLLANDVDFHSFPFVAFGKGIIKKCRTSPDAFVQLALQLAHYKDMGKFCLTYEASMTRLFREGRTETVRSCTTESCDFVRAMVDPAQTVEQRLKLFKLASEKHQHMYRLAMTGSGIDRHLFCLYVVSKYLAVESPFLKEVLSEPWRLSTSQTPQQQVELFDLENNPEYVSSGGGFGPVADDGYGVSYILVGENLINFHISSKFSCPETGIISQGPSSDT

SEQ ID NO: 9804 - protein, 607 aa, Homo sapiens
MPRKKPFSVKQKKKQLQDKRERKRGLQDGLRSSSNSRSGSRERREEQTDTSDGESVTHHIRRLNQQPSQGLGPRGYDPNRYRLHFERDSREEVERRKRAAREQVLQPVSAELLELDIREVYQPGSVLDFPRRPPWSYEMSKEQLMSQEERSFQDYLGKIHGAYSSEKLSYFEHNLETWRQLWRVLEMSDIVLLITDIRHPVVNFPPALYEYVTGELGLALVLVLNKVDLAPPALVVAWKHYFHQHYPQLHVVLFTSFPRDPRTPQDPSSVLKKSRRRGRGWTRALGPEQLLRACEAITVGKVDLSSWREKIARDVAGATWGNGSGEEEEEEDGPAVLVEQQTDSAMEPTGPTQERYKDGVVTIGCVGFPNVGKSSLINGLVGRKVVSVSRTPGHTRYFQTYFLTPSVKLCDCPGLIFPSLLPRQLQVLAGIYPIAQIQEPYTAVGYLASRIPVQALLHLRHPEAEDPSAEHPWCAWDICEAWAEKRGYKTAKAARNDVYRAANSLLRLAVDGRLSLCFHPPGYSEQKGTWESHPETTELVVLQGRVGPAGDEEEEEEEELSSSCEEEGEEDRDADEEGEGDEETPTSAPGSSLAGRNPYALLGEDEC

SEQ ID NO: 9805 - protein, 282 aa, Homo sapiens
MALVLILQLLTLWPLCHTDITPSVPPASYHPKPWLGAQPATVVTPGVNVTLRCRAPQPAWRFGLFKPGEIAPLLFRDVSSELAEFFLEEVTPAQGGSYRCCYRRPDWGPGVWSQPSDVLELLVTEELPRPSLVALPGPVVGPGANVSLRCAGRLRNMSFVLYREGVAAPLQYRHSAQPWADFTLLGARAPGTYSCYYHTPSAPYVLSQRSEVLVISWEGEGPEARPASSAPGMQAPGPPPSDPGAQAPSLSSFRPRGLVLQPLLPQTQDSWDPAPPPSDPGV

SEQ ID NO: 9806 - protein, 205 aa, Homo sapiens
MTAEFLSLLCLGLCLGYEDEKKNEKPPKPSLHAWPSSVVEAESNVTLKCQAHSQNVTFVLRKVNDSGYKQEQSSAENEAEFPFTDLKPKDAGRYFCAYKTTASHEWSESSEHLQLVVTDKHDELEAPSMKTGSSSEESTKRTSHSKLPEQEAAEADLSNMERVSLSTADPQGVTYAELSTSALSEAASDTTQEPPGSHEYAALKV

SEQ ID NO: 9807 - protein, 358 aa, Homo sapiens
MVDGTLLLLLSEALALTQTWAGSHSLKYFHTSVSRPGRGEPRFISVGYVDDTQFVRFDNDAASPRMVPRAPWMEQEGSEYWDRETRSARDTAQIFRVNLRTLRGYYNQSEAGSHTLQWMHGCELGPDGRFLRGYEQFAYDGKDYLTLNEDLRSWTAVDTAAQISEQKSNDASEAEHQRAYLEDTCVEWLHKYLEKGKETLLHLEPPKTHVTHHPISDHEATLRCWALGFYPAEITLTWQQDGEGHTQDTELVETRPAGDGTFQKWAAVVVPSGEEQRYTCHVQHEGLPEPVTLRWKPASQPTIPIVGIIAGLVLLGSVVSGAVVAAVIWRKKSSGGKGGSYSKAEWSDSAQGSESHSL

SEQ ID NO: 9808 - protein, 3135 aa, Homo sapiens
MVFESVVVDVLNRFLGDYVVDLDTSQLSLGIWKGAVALKNLQIKENALSQLDVPFKVKVGHIGNLKLIIPWKNLYTQPVEAVLEEIYLLIVPSSRIKYDPLKEEKQLMEAKQQELKRIEEAKQKVVDQEQHLPEKQDTFAEKLVTQIIKNLQVKISSIHIRYEDDITNRDKPLSFGISLQNLSMQTTDQYWVPCLHDETEKLVRKLIRLDNLFAYWNVKSQMFYLSDYDNSLDDLKNGIVNENIVPEGYDFVFRPISANAKLVMNRRSDFDFSAPKINLEIELHNIAIEFNKPQYFSIMELLESVDMMAQNLPYRKFKPDVPLHHHAREWWAYAIHGVLEVNVCPRLWMWSWKHIRKHRQKVKQYKELYKKKLTSKKPPGELLVSLEELEKTLDVFNITIARQTAEVEVKKAGYKIYKEGVKDPEDNKGWFSWLWSWSEQNTNEQQPDVQPETLEEMLTPEEKALLYEAIGYSETAVDPTLLKTFEALKFFVHLKSMSIVLRENHQKPELVDIVIEEFSTLIVQRPGAQAIKFETKIDSFHITGLPDNSEKPRLLSSLDDAMSLFQITFEINPLDETVSQRCIIEAEPLEIIYDARTVNSIVEFFRPPKEVHLAQLTAATLTKLEEFRSKTATGLLYIIETQKVLDLKINLKASYIIVPQDGIFSPTSNLLLLDLGHLKVTSKSRSELPDVKQGEANLKEIMDRAYDSFDIQLTSVQLLYSRVGDNWREARKLSVSTQHILVPMHFNLELSKAMVFMDVRMPKFKIYGKLPLISLRISDKKLQGIMELIESIPKPEPVTEVSAPVKSFQIQTSTSLGTSQISQKIIPLLELPSVSEDDSEEEFFDAPCSPLEEPLQFPTGVKSIRTRKLQKQDCSVNMTTFKIRFEVPKVLIEFYHLVGDCELSVVEILVLGLGAEIEIRTYDLKANAFLKEFCLKCPEYLDENKKPVYLVTTLDNTMEDLLTLEYVKAEKNVPDLKSTYNNVLQLIKVNFSSLDIHLHTEALLNTINYLHNILPQSEEKSAPVSTTETEDKGDVIKKLGLDSEMIMRPSETEINAKLRNIIVLDSDITAIYKKAVYITGKEVFSFKMVSYMDATAGSAYTDMNVVDIQVNLIVGCIEVVFVTKFLYSILAFIDNFQAAKQALAEATVQAAGMAATGVKELAQRSSRMALDINIKAPVVVIPQSPVSENVFVADFGLITMTNTFHMITESQSSPPPVIDLITIKLSEMRLYRSRFINDAYQEVLDLLLPLNLEVVVERNLCWEWYQEVPCFNVNAQLKPMEFILSQEDITTIFKTLHGNIWYEKDGSASPAVTKDQYSATSGVTTNASHHSGGATVVTAAVVEVHSRALLVKTTLNISFKTDDLTMVLYSPGPKQASFTDVRDPSLKLAEFKLENIISTLKMYTDGSTFSSFSLKNCILDDKRPHVKKATPRMIGLTVGFDKKDMMDIKYRKVRDGCVTDAVFQEMYICASVEFLQTVANVFLEAYTTGTAVETSVQTWTAKEEVPTQESVKWEINVIIKNPEIVFVADMTKNDAPALVITTQCEICYKGNLENSTMTAAIKDLQVRACPFLPVKRKGKITTVLQPCDLFYQTTQKGTDPQVIDMSVKSLTLKVSPVIINTMITITSALYTTKETIPEETASSTAHLWEKKDTKTLKMWFLEESNETEKIAPTTELVPKGEMIKMNIDSIFIVLEAGIGHRTVPMLLAKSRFSGEGKNWSSLINLHCQLELEVHYYNEMFGVWEPLLEPLEIDQTEDFRPWNLGIKMKKKAKMAIVESDPEEENYKVPEYKTVISFHSKDQLNITLSKCGLVMLNNLVKAFTEAATGSSADFVKDLAPFMILNSLGLTISVSPSDSFSVLNIPMAKSYVLKNGESLSMDYIRTKDNDHFNAMTSLSSKLFFILLTPVNHSTADKIPLTKVGRRLYTVRHRESGVERSIVCQIDTVEGSKKVTIRSPVQIRNHFSVPLSVYEGDTLLGTASPENEFNIPLGSYRSFIFLKPEDENYQMCEGIDFEEIIKNDGALLKKKCRSKNPSKESFLINIVPEKDNLTSLSVYSEDGWDLPYIMHLWPPILLRNLLPYKIAYYIEGIENSVFTLSEGHSAQICTAQLGKARLHLKLLDYLNHDWKSEYHIKPNQQDISFVSFTCVTEMEKTDLDIAVHMTYNTGQTVVAFHSPYWMVNKTGRMLQYKADGIHRKHPPNYKKPVLFSFQPNHFFNNNKVQLMVTDSELSNQFSIDTVGSHGAVKCKGLKMDYQVGVTIDLSSFNITRIVTFTPFYMIKNKSKYHISVAEEGNDKWLSLDLEQCIPFWPEYASSKLLIQVERSEDPPKRIYFNKQENCILLRLDNELGGIIAEVNLAEHSTVITFLDYHDGAATFLLINHTKNELVQYNQSSLSEIEDSLPPGKAVFYTWADPVGSRRLKWRCRKSHGEVTQKDDMMMPIDLGEKTIYLVSFFEGLQRIILFTEDPRVFKVTYESEKAELAEQEIAVALQDVGISLVNNYTKQEVAYIGITSSDVVWETKPKKKARWKPMSVKHTEKLEREFKEYTESSPSEDKVIQLDTNVPVRLTPTGHNMKILQPHVIALRRNYLPALKVEYNTSAHQSSFRIQIYRIQIQNQIHGAVFPFVFYPVKPPKSVTMDSAPKPFTDVSIVMRSAGHSQISRIKYFKVLIQEMDLRLDLGFIYALTDLMTEAEVTENTEVELFHKDIEAFKEEYKTASLVDQSQVSLYEYFHISPIKLHLSVSLSSGREEAKDSKQNGGLIPVHSLNLLLKSIGATLTDVQDVVFKLAFFELNYQFHTTSDLQSEVIRHYSKQAIKQMYVLILGLDVLGNPFGLIREFSEGVEAFFYEPYQGAIQGPEEFVEGMALGLKALVGGAVGGLAGAASKITGAMAKGVAAMTMDEDYQQKRREAMNKQPAGFREGITRGGKGLVSGFVSGITGIVTKPIKGAQKGGAAGFFKGVGKGLVGAVARPTGGIIDMASSTFQGIKRATETSEVESLRPPRFFNEDGVIRPYRLRDGTGNQMLQVMENGRFAKYKYFTHVMINKTDMLMITRRGVLFVTKGTFGQLTCEWQYSFDEFTKEPFIVHGRRLRIEAKERVKSVFHAREFGKIINFKTPEDARWILTKLQEAREPSPSL

SEQ ID NO: 9809 - protein, 525 aa, Homo sapiens
MEGPAEWGPEAALGPEAVLRFLAERGGRALHAELVQHFRGALGGEPEQRARARAHFKELVNAVATVRVDPADGAKYVHLKKRFCEGPSEPSGDPPRIQVTAEPEAPDGPAGPEARDRLPDAAAPESLPGQGRELGEGEPPAPAHWPPLSAGARRKNSRRDVQPLPRTPAPGPSEDLELPPHGCEEADRGSSLVGATAQRPARQNLRDLVMGSSPQLKRSVCPGGSSPGSSSGGGRGRGGGDSDSASVASSSAEEESSGGGSVTLDPLEHAWMLSASDGKWDSLEGLLTCEPGLLVKRDFITGFTCLHWAAKHGRQELLAMLVNFANKHQLPVNIDARTSGGYTALHLAAMHGHVEVVKLLVGAYDADVDIRDYSGKKASQYLSRSIAEEIKNLVGALDEGDGESAAGSGGGRWRLSKVLPSHLITYKLSHALEDGGDHHHHHHSAEGWVGGKAKDPGRKASGSSSGRIKPRLNKIRFRTQIVHTTPSFRDPEQPLEGRGEEGVGEERPVKGHSPFTLRPKSNVFG

SEQ ID NO: 9810 - protein, 427 aa, Homo sapiens
MGLQLRALLGAFGRWTLRLGPRPSCSPRMAGNAEPPPAGAACPQDRRSCSGRAGGDRVWEDGEHPAKKLKSGGDEERREKPPKRKIVLLMAYSGKGYHGMQRNVGSSQFKTIEDDLVSALVRSGCIPENHGEDMRKMSFQRCARTDKGVSAAGQVVSLKVWLIDDILEKINSHLPSHIRILGLKRVTGGFNSKNRCDARTYCYLLPTFAFAHKDRDVQDETYRLSAETLQQVNRLLACYKGTHNFHNFTSQKGPQDPSACRYILEMYCEEPFVREGLEFAVIRVKGQSFMMHQIRKMVGLVVAIVKGYAPESVLERSWGTEKVDVPKAPGLGLVLERVHFEKYNQRFGNDGLHEPLDWAQEEGKVAAFKEEHIYPTIIGTERDERSMAQWLSTLPIHNFSATALTAGGTGAKVPSPLEGSEGDGDTD

SEQ ID NO: 9811 - protein, 488 aa, Homo sapiens
MAETSLLEAGASAASTAAALENLQVEASCSVCLEYLKEPVIIECGHNFCKACITRWWEDLERDFPCPVCRKTSRYRSLRPNRQLGSMVEIAKQLQAVKRKIRDESLCPQHHEALSLFCYEDQEAVCLICAISHTHRAHTVVPLDDATQEYKEKLQKCLEPLEQKLQEITRCKSSEEKKPGELKRLVESRRQQILREFEELHRRLDEEQQVLLSRLEEEEQDILQRLRENAAHLGDKRRDLAHLAAEVEGKCLQSGFEMLKDVKSTLEKCEKVKTMEVTSVSIELEKNFSNFPRQYFALRKILKQLIADVTLDPETAHPNLVLSEDRKSVKFVETRLRDLPDTPRRFTFYPCVLATEGFTSGRHYWEVEVGDKTHWAVGVCRDSVSRKGELTPLPETGYWRVRLWNGDKYAATTTPFTPLHIKVKPKRVGIFLDYEAGTLSFYNVTDRSHIYTFTDTFTEKLWPLFYPGIRAGRKNAAPLTIRPPTDWE

SEQ ID NO: 9812 - protein, 326 aa, Homo sapiens
MHRTTRIKITELNPHLMCVLCGGYFIDATTIIECLHSFCKTCIVRYLETSKYCPICDVQVHKTRPLLNIRSDKTLQDIVYKLVPGLFKNEMKRRRDFYAAHPSADAANGSNEDRGEVADEDKRIITDDEIISLSIEFFDQNRLDRKVNKDKEKSKEEVNDKRYLRCPAAMTVMHLRKFLRSKMDIPNTFQIDVMYEEEPLKDYYTLMDIAYIYTWRRNGPLPLKYRVRPTCKRMKISHQRDGLTNAGELESDSGSDKANSPAGGIPSTSSCLPSPSTPVQSPHPQFPHISSTMNGTSNSPSGNHQSSFANRPRKSSVNGSSATSSG

SEQ ID NO: 9813 - protein, 224 aa, Homo sapiens
MTTLTRQDLNFGQVVADVLCEFLEVAVHLILYVREVYPVGIFQKRKKYNVPVQMSCHPELNQYIQDTLHCVKPLLEKNDVEKVVVVILDKEHRPVEKFVFEITQPPLLSIRWAAPAPRPLAGISSDSLLSHVEQLLRAFILKISVCDAVLDHNPPGCTFTVLVHTREAATRNMEKIQVIKDFPWILADEQDVHMHDPRLIPLKTMTSDILKMQLYVEERAHKGS

SEQ ID NO: 9814 - protein, 412 aa, Homo sapiens
MAENLKGCSVCCKSSWNQLQDLCRLAKLSCPALGISKRNLYDFEVEYLCDYKKIREQEYYLVKWRGYPDSESTWEPRQNLKCVRILKQFHKDLERELLRRHHRSKTPRHLDPSLANYLVQKAKQRRALRRWEQELNAKRSHLGRITVENEVDLDGPPRAFVYINEYRVGEGITLNQVAVGCECQDCLWAPTGGCCPGASLHKFAYNDQGQVRLRAGLPIYECNSRCRCGYDCPNRVVQKGIRYDLCIFRTDDGRGWGVRTLEKIRKNSFVMEYVGEIITSEEAERRGQIYDRQGATYLFDLDYVEDVYTVDAAYYGNISHFVNHSCDPNLQVYNVFIDNLDERLPRIAFFATRTIRAGEELTFDYNMQVDPVDMESTRMDSNFGLAGLPGSPKKRVRIECKCGTESCRKYLF

SEQ ID NO: 9815 - protein, 236 aa, Homo sapiens
MLPDCLSAEGELRCRRLLAGATARLRARPASAAVLVPLCSVRGVPALLYTLRSSRLTGRHKGDVSFPGGKCDPADQDVVHTALRETREELGLAVPEEHVWGLLRPVYDPQKATVVPVLAGVGPLDPQSLRPNSEEVDEVFALPLAHLLQTQNQGYTHFCRGGHFRYTLPVFLHGPHRVWGLTAVITEFALQLLAPGTYQPRLAGLTCSGAEGLARPKQPLASPCQASSTPGLNKGL

SEQ ID NO: 9816 - protein, 280 aa, Homo sapiens
MAPAKATNVVRLLLGSTALWLSQLGSGTVAASKSVTAHLAAKWPETPLLLEASEFMAEESNEKFWQFLETVQELAIYKQTESDYSYYNLILKKAGQFLDNLHINLLKFAFSIRAYSPAIQMFQQIAADEPPPDGCNAFVVIHKKHTCKINEIKKLLKKAASRTRPYLFKGDHKFPTNKENLPVVILYAEMGTRTFSAFHKVLSEKAQNEEILYVLRHYIQKPSSRKMYLSGYGVELAIKSTEYKALDDTQVKTVTNTTVEDETETNEVQGFLFGKLKLVY

SEQ ID NO: 9817 - protein, 278 aa, Homo sapiens
MAPAKATNVVRLLLGSTALWLSQLGSGTVAASKSVTAHLAAKWPETPLLLEASEFMAEESNEKFWQFLETVQELAIYKQTESDYSYYNLILKKAGQFLDNLHINLLKFAFSIRAYSPAIQMFQQIAADEPPPDGCNAFVVIHKKHTCKINEIKKLLKKAASRTRPYLFKGDHKFPTNKENLPVVILYAEMGTRTFSAFHKVLSEKAQNEEILYVLRHYIQKPSSRKMYLSGYGVELAIKSTEYKALDDTQVKTVTNTTVEDETETNEVQGFLFGKLKS

SEQ ID NO: 9818 - protein, 3088 aa, Homo sapiens
MEEFLQRAKSKLNRSKRLEKVHVVIGPKSCDLDSLISTFTYAYFLDKVSPPGVLCLPVLNIPRTEFNYFTETRFILEELNISESFHIFRDEINLHQLNDEGKLSITLVGSSVLASEDKTLESAVVKVINPVEQSDANVEFRESSSSLVLKEILQEAPELITEQLAHRLRGSILFKWMTMESEKISEKQEEILSILEEKFPNLPPREDIINVLQETQFSAQGLSIEQTMLKDLKELSDGEIKVAISTVSMNLENCLFHSNITSDLKAFTDKFGFDVLILFSSYLSEEQQPRRQIAVYSENMELCSQICCELEECQNPCLELEPFDCGCDEILVYQQEDPSVTCDQVVLVVKEVINRRCPEMVSNSRTSSTEAVAGSAPLSQGSSGIMELYGSDIEPQPSSVNFIENPPDLNDSNQAQVDANVDLVSPDSGLATIRSSRSSKESSVFLSDDSPVGEGAGPHHTLLPGLDSYSPIPEGAVAEEHAWSGEHGEHFDLFNFDPAPMASGQSQQSSHSADYSPADDFFPNSDLSEGQLPAGPEGLDGMGTNMSNYSSSSLLSGAGKDSLVEHDEEFVQRQDSPRDNSERNLSLTDFVGDESPSPERLKNTGKRIPPTPMNSLVESSPSTEEPASLYTEDMTQKATDTGHMGPPQTHARCSSWWGGLEIDSKNIADAWSSSEQESVFQSPESWKEHKPSSIDRRASDSVFQPKSLEFTKSGPWESEFGQPELGSNDIQDKNEESLPFQNLPMEKSPLPNTSPQGTNHLIEDFASLWHSGRSPTAMPEPWGNPTDDGEPAAVAPFPAWSAFGKEDHDEALKNTWNLHPTSSKTPSVRDPNEWAMAKSGFAFSSSELLDNSPSEINNEAAPEIWGKKNNDSRDHIFAPGNPSSDLDHTWTNSKPPKEDQNGLVDPKTRGKVYEKVDSWNLFEENMKKGGSDVLVPWEDSFLSYKCSDYSASNLGEDSVPSPLDTNYSTSDSYTSPTFAGDEKETEHKPFAKEEGFESKDGNSTAEETDIPPQSLQQSSRNRISSGPGNLDMWASPHTDNSSEINTTHNLDENELKTEHTDGKNISMEDDVGESSQSSYDDPSMMQLYNETNRQLTLLHSSTNSRQTAPDSLDLWNRVILEDTQSTATISDMDNDLDWDDCSGGAAIPSDGQTEGYMAEGSEPETRFTVRQLEPWGLEYQEANQVDWELPASDEHTKDSAPSEHHTLNEKSGQLIANSIWDSVMRDKDMSSFMLPGSSHITDSEQRELPPEIPSHSANVKDTHSPDAPAASGTSESEALISHLDKQDTERETLQSDAASLATRLENPGYFPHPDPWKGHGDGQSESEKEAQGATDRGHLDEEEVIASGVENASGISEKGQSDQELSSLVASEHQEICIKSGKISSLAVTFSPQTEEPEEVLEYEEGSYNLDSRDVQTGMSADNLQPKDTHEKHLMSQRNSGETTETSDGMNFTKYVSVPEKDLEKTEECNFLEPENVGGGPPHRVPRSLDFGDVPIDSDVHVSSTCSEITKNLDVKGSENSLPGAGSSGNFDRDTISSEYTHSSASSPELNDSSVALSSWGQQPSSGYQEENQGNWSEQNHQESELITTDGQVEIVTKVKDLEKNRINEFEKSFDRKTPTFLEIWNDSVDGDSFSSLSSPETGKYSEHSGTHQESNLIASYQEKNEHDISATVQPEDARVISTSSGSDDDSVGGEESIEEEIQVANCHVAEDESRAWDSLNESNKFLVTADPKSENIYDYLDSSEPAENENKSNPFCDNQQSSPDPWTFSPLTETEMQITAVEKEKRSSPETGTTGDVAWQISPKASFPKNEDNSQLEMLGFSADSTEWWKASPQEGRLIESPFERELSDSSGVLEINSSVHQNASPWGVPVQGDIEPVETHYTNPFSDNHQSPFLEGNGKNSHEQLWNIQPRQPDPDADKFSQLVKLDQIKEKDSREQTFVSAAGDELTPETPTQEQCQDTMLPVCDHPDTAFTHAEENSCVTSNVSTNEGQETNQWEQEKSYLGEMTNSSIATENFPAVSSPTQLIMKPGSEWDGSTPSEDSRGTFVPDILHGNFQEGGQLASAAPDLWIDAKKPFSLKADGENPDILTHCEHDSNSQASDSPDICHDSEAKQETEKHLSACMGPEVESSELCLTEPEIDEEPIYEPGREFVPSNAELDSENATVLPPIGYQADIKGSSQPASHKGSPEPSEINGDNSTGLQVSEKGASPDMAPILEPVDRRIPRIENVATSIFVTHQEPTPEGDGSWISDSFSPESQPGARALFDGDPHLSTENPALVPDALLASDTCLDISEAAFDHSFSDASGLNTSTGTIDDMSKLTLSEGHPETPVDGDLGKQDICSSEASWGDFEYDVMGQNIDEDLLREPEHFLYGGDPPLEEDSLKQSLAPYTPPFDLSYLTEPAQSAETIEEAGSPEDESLGCRAAEIVLSALPDRRSEGNQAETKNRLPGSQLAVLHIREDPESVYLPVGAGSNILSPSNVDWEVETDNSDLPAGGDIGPPNGASKEISELEEEKTIPTKEPEQIKSEYKEERCTEKNEDRHALHMDYILVNREENSHSKPETCEERESIAELELYVGSKETGLQGTQLASFPDTCQPASLNERKGLSAEKMSSKSDTRSSFESPAQDQSWMFLGHSEVGDPSLDARDSGPGWSGKTVEPFSELGLGEGPQLQILEEMKPLESLALEEASGPVSQSQKSKSRGRAGPDAVTLQAVTHDNEWEMLSPQPVQKNMIPDTEMEEETEFLELGTRISRPNGLLSEDVGMDIPFEEGVLSPSAADMRPEPPNSLDLNDTHPRRIKLTAPNINLSLDQSEGSILSDDNLDSPDEIDINVDELDTPDEADSFEYTGHDPTANKDSGQESESIPEYTAEEEREDNRLWRTVVIGEQEQRIDMKVIEPYRRVISHGGYYGDGLNAIIVFAACFLPDSSRADYHYVMENLFLYVISTLELMVAEDYMIVYLNGATPRRRMPGLGWMKKCYQMIDRRLRKNLKSFIIVHPSWFIRTILAVTRPFISSKFSSKIKYVNSLSELSGLIPMDCIHIPESIIKLDEELREASEAAKTSCLYNDPEMSSMEKDIDLKLKEKP

SEQ ID NO: 9819 - protein, 428 aa, Homo sapiens
MLRTLLRRRLFSYPTKYYFMVLVLSLITFSVLRIHQKPEFVSVRHLELAGENPSSDINCTKVLQGDVNEIQKVKLEILTVKFKKRPRWTPDDYINMTSDCSSFIKRRKYIVEPLSKEEAEFPIAYSIVVHHKIEMLDRLLRAIYMPQNFYCIHVDTKSEDSYLAAVMGIASCFSNVFVASRLESVVYASWSRVQADLNCMKDLYAMSANWKYLINLCGMDFPIKTNLEIVRKLKLLMGENNLETERMPSHKEERWKKRYEVVNGKLTNTGTVKMLPPLETPLFSGSAYFVVSREYVGYVLQNEKIQKLMEWAQDTYSPDEYLWATIQRIPEVPGSLPASHKYDLSDMQAVARFVKWQYFEGDVSKGAPYPPCDGVHVRSVCIFGAGDLNWMLRKHHLFANKFDVDVDLFAIQCLDEHLRHKALETLKH

SEQ ID NO: 9820 - protein, 155 aa, Homo sapiens
MRHLPYFCRGQVVRGFGRGSKQLGIPTANFPEQVVDNLPADISTGIYYGWASVGSGDVHKMVVSIGWNPYYKNTKKSMETHIMHTFKEDFYGEILNVAIVGYLRPEKNFDSLESLISAIQGDIEEAKKRLELPEHLKIKEDNFFQVSKSKIMNGH

SEQ ID NO: 9821 - protein, 613 aa, Homo sapiens
MSDPQTSMAATAAVSPSDYLQPAASTTQDSQPSPLALLAATCSKIGPPAVEAAVTPPAPPQPTPRKLVPIKPAPLPLSPGKNSFGILSSKGNILQIQGSQLSASYPGGQLVFAIQNPTMINKGTRSNANIQYQAVPQIQASNSQTIQVQPNLTNQIQIIPGTNQAIITPSPSSHKPVPIKPAPIQKSSTTTTPVQSGANVVKLTGGGGNVTLTLPVNNLVNASDTGAPTQLLTESPPTPLSKTNKKARKKSLPASQPPVAVAEQVETVLIETTADNIIQAGNNLLIVQSPGGGQPAVVQQVQVVPPKAEQQQVVQIPQQALRVVQAASATLPTVPQKPSQNFQIQAAEPTPTQVYIRTPSGEVQTVLVQDSPPATAAATSNTTCSSPASRAPHLSGTSKKHSAAILRKERPLPKIAPAGSIISLNAAQLAAAAQAMQTININGVQVQGVPVTITNTGGQQQLTVQNVSGNNLTISGLSPTQIQLQMEQALAGETQPGEKRRRMACTCPNCKDGEKRSGEQGKKKHVCHIPDCGKTFRKTSLLRAHVRLHTGERPFVCNWFFCGKRFTRSDELQRHARTHTGDKRFECAQCQKRFMRSDHLTKHYKTHLVTKNL

SEQ ID NO: 9822 - protein, 330 aa, Homo sapiens
MSDSEKLNLDSIIGRLLEVQGSRPGKNVQLTENEIRGLCLKSREIFLSQPILLELEAPLKICGDIHGQYYDLLRLFEYGGFPPESNYLFLGDYVDRGKQSLETICLLLAYKIKYPENFFLLRGNHECASINRIYGFYDECKRRYNIKLWKTFTDCFNCLPIAAIVDEKIFCCHGGLSPDLQSMEQIRRIMRPTDVPDQGLLCDLLWSDPDKDVQGWGENDRGVSFTFGAEVVAKFLHKHDLDLICRAHQVVEDGYEFFAKRQLVTLFSAPNYCGEFDNAGAMMSVDETLMCSFQILKPADKNKGKYGQFSGLNPGGRPITPPRNSAKAKK

SEQ ID NO: 9823 - protein, 1516 aa, Homo sapiens
MAPAKATNVVRLLLGSTALWLSQLGSGTVAASKSVTAHLAAKWPETPLLLEASEFMAEESNEKFWQFLETVQELAIYKQTESDYSYYNLILKKAGQFLDNLHINLLKFAFSIRAYSPAIQMFQQIAADEPPPDGCNAFVVIHKKHTCKINEIKKLLKKAASRTRPYLFKGDHKFPTNKENLPVVILYAEMGTRTFSAFHKVLSEKAQNEEILYVLRHYIQKPSSRKMYLSGYGVELAIKSTEYKALDDTQVKTVTNTTVEDETETNEVQGFLFGKLKEIYSDLRDNLTAFQKYLIESNKQMMPLKVWELQDLSFQAASQIMSAPVYDSIKLMKDISQNFPIKARSLTRIAVNQHMREEIKENQKDLQVRFKIQPGDARLFINGLRVDMDVYDAFSILDMLKLEGKMMNGLRNLGINGEDMSKFLKLNSHIWEYTYVLDIRHSSIMWINDLENDDLYITWPTSCQKLLKPVFPGSVPSIRRNFHNLVLFIDPAQEYTLDFIKLADVFYSHEVPLRIGFVFILNTDDEVDGANDAGVALWRAFNYIAEEFDISEAFISIVHMYQKVKKDQNILTVDNVKSVLQNTFPHANIWDILGIHSKYDEERKAGASFYKMTGLGPLPQALYNGEPFKHEEMNIKELKMAVLQRMMDASVYLQREVFLGTLNDRTNAIDFLMDRNNVVPRINTLILRTNQQYLNLISTSVTADVEDFSTFFFLDSQDKSAVIAKNMYYLTQDDESIISAVTLWIIADFDKPSGRKLLFNALKHMKTSVHSRLGIIYNPTSKINEENTAISRGILAAFLTQKNMFLRSFLGQLAKEEIATAIYSGDKIKTFLIEGMDKNAFEKKYNTVGVNIFRTHQLFCQDVLKLRPGEMGIVSNGRFLGPLDEDFYAEDFYLLEKITFSNLGEKIKGIVENMGINANNMSDFIMKVDALMSSVPKRASRYDVTFLRENHSVIKTNPQENDMFFNVIAIVDPLTREAQKMAQLLVVLGKIINMKIKLFMNCRGRLSEAPLESFYRFVLEPELMSGANDVSSLGPVAKFLDIPESPLLILNMITPEGWLVETVHSNCDLDNIHLKDTEKTVTAEYELEYLLLEGQCFDKVTEQPPRGLQFTLGTKNKPAVVDTIVMAHHGYFQLKANPGAWILRLHQGKSEDIYQIVGHEGTDSQADLEDIIVVLNSFKSKILKVKVKKETDKIKEDILTDEDEKTKGLWDSIKSFTVSLHKENKKEKDVLNIFSVASGHLYERFLRIMMLSVLRNTKTPVKFWLLKNYLSPTFKEVIPHMAKEYGFRYELVQYRWPRWLRQQTERQRIIWGYKILFLDVLFPLAVDKIIFVDADQIVRHDLKELRDFDLDGAPYGYTPFCDSRREMDGYRFWKTGYWASHLLRRKYHISALYVVDLKKFRRIGAGDRLRSQYQALSQDPNSLSNLDQDLPNNMIYQVAIKSLPQDWLWCETWCDDESKQRAKTIDLCNNPKTKESKLKAAARIVPEWVEYDAEIRQLLDHLENKKQDTILTHDEL

SEQ ID NO: 9824 - protein, 913 aa, Homo sapiens
MGWGSRCCCPGRLDLLCVLALLGGCLLPVCRTRVYTNHWAVKIAGGFPEANRIASKYGFINIGQIGALKDYYHFYHSRTIKRSVISSRGTHSFISMEPKVEWIQQQVVKKRTKRDYDFSRAQSTYFNDPKWPSMWYMHCSDNTHPCQSDMNIEGAWKRGYTGKNIVVTILDDGIERTHPDLMQNYDALASCDVNGNDLDPMPRYDASNENKHGTRCAGEVAAAANNSHCTVGIAFNAKIGGVRMLDGDVTDMVEAKSVSFNPQHVHIYSASWGPDDDGKTVDGPAPLTRQAFENGVRMGRRGLGSVFVWASGNGGRSKDHCSCDGYTNSIYTISISSTAESGKKPWYLEECSSTLATTYSSGESYDKKIITTDLRQRCTDNHTGTSASAPMAAGIIALALEANPFLTWRDVQHVIVRTSRAGHLNANDWKTNAAGFKVSHLYGFGLMDAEAMVMEAEKWTTVPRQHVCVESTDRQIKTIRPNSAVRSIYKASGCSDNPNRHVNYLEHVVVRITITHPRRGDLAIYLTSPSGTRSQLLANRLFDHSMEGFKNWEFMTIHCWGERAAGDWVLEVYDTPSQLRNFKTPGKLKEWSLVLYGTSVQPYSPTNEFPKVERFRYSRVEDPTDDYGTEDYAGPCDPECSEVGCDGPGPDHCNDCLHYYYKLKNNTRICVSSCPPGHYHADKKRCRKCAPNCESCFGSHGDQCMSCKYGYFLNEETNSCVTHCPDGSYQDTKKNLCRKCSENCKTCTEFHNCTECRDGLSLQGSRCSVSCEDGRYFNGQDCQPCHRFCATCAGAGADGCINCTEGYFMEDGRCVQSCSISYYFDHSSENGYKSCKKCDISCLTCNGPGFKNCTSCPSGYLLDLGMCQMGAICKDATEESWAEGGFCMLVKKNNLCQRKVLQQLCCKTCTFQG

SEQ ID NO: 9825 - protein, 293 aa, Homo sapiens
MDAPHSKAALDSINELPENILLELFTHVPARQLLLNCRLVCSLWRDLIDLMTLWKRKCLREGFITKDWDQPVADWKIFYFLRSLHRNLLRNPCAEEDMFAWQIDFNGGDRWKVESLPGAHGTDFPDPKVKKYFVTSYEMCLKSQLVDLVAEGYWEELLDTFRPDIVVKDWFAARADCGCTYQLKVQLASADYFVLASFEPPPVTIQQWNNATWTEVSYTFSDYPRGVRYILFQHGGRDTQYWAGWYGPRVTNSSIVVSPKMTRNQASSEAQPGQKHGQEEAAQSPYRAVVQIF

SEQ ID NO: 9826 - protein, 157 aa, Homo sapiens
MSSEEGKLFVGGLNFNTDEQALEDHFSSFGPISEVVVVKDRETQRSRGFGFITFTNPEHASVAMRAMNGESLDGRQIRVDHAGKSARGTRGGGFGAHGRGRSYSRGGGDQGYGSGRYYDSRPGGYGYGYGRSRDYNGRNQGGYDRYSGGNYRDNYDN

SEQ ID NO: 9827 - protein, 74 aa, Homo sapiens
MGRRSSKCCCIYEKPRAFGESSTESDEEEEEGCGHTHCVRGHRKGRRRATLGPTPTTPPQPPDPSQPPPGPMQH

SEQ ID NO: 9828 - protein, 690 aa, Homo sapiens
MGWGSRCCCPGRLDLLCVLALLGGCLLPVCRTRVYTNHWAVKIAGGFPEANRIASKYGFINIGQIGALKDYYHFYHSRTIKRSVISSRGTHSFISMEPKVEWIQQQVVKKRTKRDYDFSRAQSTYFNDPKWPSMWYMHCSDNTHPCQSDMNIEGAWKRGYTGKNIVVTILDDGIERTHPDLMQNYDALASCDVNGNDLDPMPRYDASNENKHGTRCAGEVAAAANNSHCTVGIAFNAKIGGVRMLDGDVTDMVEAKSVSFNPQHVHIYSASWGPDDDGKTVDGPAPLTRQAFENGVRMGRRGLGSVFVWASGNGGRSKDHCSCDGYTNSIYTISISSTAESGKKPWYLEECSSTLATTYSSGESYDKKIITTDLRQRCTDNHTGTSASAPMAAGIIALALEANPFLTWRDVQHVIVRTSRAGHLNANDWKTNAAGFKVSHLYGFGLMDAEAMVMEAEKWTTVPRQHVCVESTDRQIKTIRPNSAVRSIYKASGCSDNPNRHVNYLEHVVVRITITHPRRGDLAIYLTSPSGTRSQLLANRLFDHSMEGFKNWEFMTIHCWGERAAGDWVLEVYDTPSQLRNFKTPGKLKEWSLVLYGTSVQPYSPTNEFPKVERFRYSRVEDPTDDYGTEDYAGELASSGTQAKKRQLMHHPTTWENRMEWNGMKWNGMKWNGMEWNGMEWNRIESNRIE

SEQ ID NO: 9829 - protein, 688 aa, Homo sapiens
MATASGASDLSGSGAPPPGVGAQAAAAAEEEEREVVRVRVKKCESFLPPEFRSFAVDPQITSLDVLQHILIRAFDLSGKKNFGISYLGRDRLGQEVYLSLLSDWDLSTAFATASKPYLQLRVDIRPSEDSPLLEDWDIISPKDVIGSDVLLAEKRSSLTTAALPFTQSILTQVGRTLSKVQQVLSWSYGEDVKPFKPPLSDAEFHTYLNHEGQLSRPEELRLRIYHGGVEPSLRKVVWRYLLNVYPDGLTGRERMDYMKRKSREYEQLKSEWAQRANPEDLEFIRSTVLKDVLRTDRAHPYYAGPEDGPHLRALHDLLTTYAVTHPQVSYCQGMSDLASPILAVMDHEGHAFVCFCGIMKRLAANFHPDGRAMATKFAHLKLLLRHADPDFYQYLQEAGADDLFFCYRWLLLELKREFAFDDALRMLEVTWSSLPPDPPEHEVELVGPPSQVADAGFGGHRGWPVRQRHMLRPAGGGGSTFEDAVDHLATASQGPGGGGRLLRQASLDGLQQLRDNMGSRRDPLVQLPHPAALISSKSLSEPLLNSPDPLLSSFSHPDSPSSSSPPSTQEASPTGDMAVGSPLMQEVGSPKDPGKSLPPVPPMGLPPPQEFGRGNPFMLFLCLAILLEHRDHIMRNGLDYNELAMHFDRLVRKHHLGRVLRRARALFADYLQSEVWDSEEGAEATAAS

SEQ ID NO: 9830 - protein, 453 aa, Homo sapiens
MVAPGSVTSRLGSVFPFLLVLVDLQYEGAECGVNADVEKHLELGKKLLAAGQLADALSQFHAAVDGDPDNYIAYYRRATVFLAMGKSKAALPDLTKVIQLKMDFTAARLQRGHLLLKQGKLDEAEDDFKKVVCVWDAELRELRAECFIKEGEPRKAISDLKAASKLKNDNTEAFYKISTLYYQLGDHELSLSEVRECLKLDQDHKRCFAHYKQVKKLNKLIESAEELIRDGRYTDATSKYESVMKTEPSIAEYTVRSKERICHCFSKDEKPVEAIRVCSEVLQMEPDNVNALKDRAEAYLIEEMYDEAIQDYETAQEHNENDQQIREGLEKAQRLLKQSQKRDYYKILGVKRNAKKQEIIKAYRKLALQWHPDNFQNEEEKKKAEKKFIDIAAAKEVLSDPEMRKKFDDGEDPLDAESQQGGGGNPFHRSWNSWQGFNPFSSGGPFRFKFHFN

SEQ ID NO: 9831 - protein, 299 aa, Homo sapiens
MAVMAPRTLLLLLSGALALTQTWAGSHSMRYFFTSVSRPGRGEPRFIAVGYVDDTQFVRFDSDAASQRMEPRAPWIEQEGPEYWDQETRNVKAQSQTDRVDLGTLRGYYNQSEAGSHTIQIMYGCDVGSDGRFLRGYRQDAYDGKDYIALNEDLRSWTAADMAAQITKRKWEAAHEAEQLRAYLDGTCVEWLRRYLENGKETLQRTDPPKTHMTHHPISDHEATLRCWALGFYPAEITLTWQRDGEDQTQDTELVETRPAGDGTFQKWAAVVVPSGEEQRYTCHVQHEGLPKPLTLRWV

SEQ ID NO: 9832 - protein, 179 aa, Homo sapiens
MAASQVLGEKINILSGETVKAGDRDPLGNDCPEQDRLPQRSWRQKCASYVLALRPWSFSASLTPVALGSALAYRSHGVLDPRLLVGCAVAVLAVHGAGNLVNTYYDFSKGIDHKKSDDRTLVDRILEPQDVVRFGVFLYTLGCVCAACLYYLSPLKLEHLALIYFGGLSGSFLYTGVLI

SEQ ID NO: 9833 - protein, 371 aa, Homo sapiens
MAVMAPRTLLLLLSGALALTQTWAGSHSMRYFFTSVSRPGRGEPRFIAVGYVDDTQFVRFDSDAASQRMEPRAPWIEQEGPEYWDQETRNVKAQSQTDRVDLGTLRGYYNQSEAGSHTIQIMYGCDVGSDGRFLRGYRQDAYDGKDYIALNEDLRSWTAADMAAQITKRKWEAAHEAEQLRAYLDGTCVEWLRRYLENGKETLQRTDPPKTHMTHHPISDHEATLRCWALGFYPAEITLTWQRDGEDQTQDTELVETRPAGDGTFQKWAAVVVPSGEEQRYTCHVQHEGLPKPLTLRWELSSQPTIPIVGIIAGLVLLGAVITGAVVAAVMWRRKSSGGEGVKDRKGGSYTQAASSDSAQGSDVSLTACKV

SEQ ID NO: 9834 - protein, 365 aa, Homo sapiens
MAVMAPRTLLLLLSGALALTQTWAGSHSMRYFFTSVSRPGRGEPRFIAVGYVDDTQFVRFDSDAASQRMEPRAPWIEQEGPEYWDQETRNVKAQSQTDRVDLGTLRGYYNQSEAGSHTIQIMYGCDVGSDGRFLRGYRQDAYDGKDYIALNEDLRSWTAADMAAQITKRKWEAAHEAEQLRAYLDGTCVEWLRRYLENGKETLQRTDPPKTHMTHHPISDHEATLRCWALGFYPAEITLTWQRDGEDQTQDTELVETRPAGDGTFQKWAAVVVPSGEEQRYTCHVQHEGLPKPLTLRWELSSQPTIPIVGIIAGLVLLGAVITGAVVAAVMWRRKSSDRKGGSYTQAASSDSAQGSDVSLTACKV

SEQ ID NO: 9835 - protein, 338 aa, Homo sapiens
MAASQVLGEKINILSGETVKAGDRDPLGNDCPEQDRLPQRSWRQKCASYVLALRPWSFSASLTPVALGSALAYRSHGVLDPRLLVGCAVAVLAVHGAGNLVNTYYDFSKGIDHKKSDDRTLVDRILEPQDVVRFGVFLYTLGCVCAACLYYLSPLKLEHLALIYFGGLSGSFLYTGGIGFKYVALGDLIILITFGPLAVMFAYAIQVGSLAIFPLVYAIPLALSTEAILHSNNTRDMESDREAGIVTLAILIGPTFSYILYNTLLFLPYLVFSILATHCTISLALPLLTIPMAFSLERQFRSQAFNKLPQRTAKLNLLLGLFYVFGIILAPAGSLPKI

SEQ ID NO: 9836 - protein, 203 aa, Homo sapiens
MGKRRHRRGNVISCVTNSGKTTLAKNLQKHLPNCSVISQDDFFKPESEIETDKNGFLQYDVLEALNMEKMMSAISCWMESARHSVVSTDQESAEEIPILIIEGFLLFNYKPLDTIWNRSYFLTIPYEECKRRRSTRVYQPPDSPGYFDGHVWPMYLKYRQEMQDITWEVVYLDGTKSEEDLFLQVYEDLIQELAKQKCLQVTA

SEQ ID NO: 9837 - protein, 154 aa, Homo sapiens
MVVMAPRTLFLLLSGALTLTETWAGSHSMRYFSAAVSRPGRGEPRFIAMGYVDDTQFVRFDSDSACPRMEPRAPWVEQEGPEYWEEETRNTKAHAQTDRMNLQTLRGYYNQSEAKQSSLPTIPIMGIVAGLVVLAAVVTGAAVAAVLWRKKSSD

SEQ ID NO: 9838 - protein, 246 aa, Homo sapiens
MVVMAPRTLFLLLSGALTLTETWAGSHSMRYFSAAVSRPGRGEPRFIAMGYVDDTQFVRFDSDSACPRMEPRAPWVEQEGPEYWEEETRNTKAHAQTDRMNLQTLRGYYNQSEANPPKTHVTHHPVFDYEATLRCWALGFYPAEIILTWQRDGEDQTQDVELVETRPAGDGTFQKWAAVVVPSGEEQRYTCHVQHEGLPEPLMLRWKQSSLPTIPIMGIVAGLVVLAAVVTGAAVAAVLWRKKSSD

SEQ ID NO: 9839 - protein, 343 aa, Homo sapiens
MKTPRMVVMAPRTLFLLLSGALTLTETWAGSHSMRYFSAAVSRPGRGEPRFIAMGYVDDTQFVRFDSDSACPRMEPRAPWVEQEGPEYWEEETRNTKAHAQTDRMNLQTLRGYYNQSEASSHTLQWMIGCDLGSDGRLLRGYEQYAYDGKDYLALNEDLRSWTAADTAAQISKRKCEAANVAEQRRAYLEGTCVEWLHRYLENGKEMLQRADPPKTHVTHHPVFDYEATLRCWALGFYPAEIILTWQRDGEDQTQDVELVETRPAGDGTFQKWAAVVVPSGEEQRYTCHVQHEGLPEPLMLRWKQSSLPTIPIMGIVAGLVVLAAVVTGAAVAAVLWRKKSSD

SEQ ID NO: 9840 - protein, 409 aa, Homo sapiens
MQRRRRPPPPTSRLPEGCGGGGGGSEEVEVQFSAGRWGSAAAVSAAAAAATRSTEEEEERLEREHFWKIINAFRYYGTSMHERVNRTERQFRSLPANQQKLLPQFLLHLDKIRKCIDHNQEILLTIVNDCIHMFENKEYGEDGNGKIMPASTFDMDKLKSTLKQFVRDWSETGKAERDACYQPIIKEILKNFPKERWDPSKVNILVPGAGLGRLAWEIAMLGYACQGNEWSFFMLFSSNFVLNRCSEINKYKLYPWIHQFSNNRRSADQIRPIFFPDVDPHSLPPGSNFSMTAGDFQEIYSECNTWDCIATCFFIDTAHNVIDYIDTIWKILKPGGIWINLGPLLYHFENLANELSIELSYEDIKNVVLQYGFKVEVEKESVLSTYTVNDLSMMKYYYECVLFVVRKPQ

SEQ ID NO: 9841 - protein, 195 aa, Homo sapiens
MELSESVQKGFQMLADPRSFDSNAFTLLLRAAFQSLLDAQADEAVLDHPDLKHIDPVVLKHCHAAAATYILEAGKHRADKSTLSTYLEDCKFDRERIELFCTEYQNNKNSLEILLGSIGRSLPHITDVSWRLEYQIKTNQLHRMYRPAYLVTLSVQNTDSPSYPEISFSCSMEQLQDLVGKLKDASKSLERATQL

SEQ ID NO: 9842 - protein, 1140 aa, Homo sapiens
MWLKPEEVLLKNALKLWVTQKSSCYFILQRRRGHGEGGGRLTGRLVGALDAVLDSNARVAPFRILLQVPGSQVYSPIACGATLEEINQHWDWLEQNLLHTLSVFDNKDDIASFVKGKVKALIAEETSSRLAEQEEEPEKFREALVKFEARFNFPEAEKLVTYYSCCCWKGRVPRQGWLYLSINHLCFYSFFLGKELKLVVPWVDIQKLERTSNVFLTDTIRITTQNKERDFSMFLNLDEVFKVMEQLADVTLRRLLDNEVFDLDPDLQEPSQITKRDLEARAQNEFFRAFFRLPRKEKLHAVVDCSLWTPFSRCHTTGRMFASDSYICFASREDGCCKIILPLREVVSIEKMEDTSLLPHPIIVSIRSKVAFQFIELRDRDSLVEALLARLKQVHANHPVHYDTSADDDMASLVFHSTSMCSDHRFGDLEMMSSQNSEESEKEKSPLMHPDALVTAFQQSGSQSPDSRMSREQIKISLWNDHFVEYGRTVCMFRTEKIRKLVAMGIPESLRGRLWLLFSDAVTDLASHPGYYGNLVEESLGKCCLVTEEIERDLHRSLPEHPAFQNETGIAALRRVLTAYAHRNPKIGYCQSMNILTSVLLLYTKEEEAFWLLVAVCERMLPDYFNHRVIGAQVDQSVFEELIKGHLPELAEHMNDLSALASVSLSWFLTLFLSIMPLESAVNVVDCFFYDGIKAIFQLGLAVLEANAEDLCSSKDDGQALMILSRFLDHIKNEDSPGPPVGSHHAFFSDDQEPYPVTDISDLIRDSYEKFGDQSVEQIEHLRYKHRIRVLQGHEDTTKQNVLRVVIPEVSILPEDLEELYDLFKREHMMSCYWEQPRPMASRHDPSRPYAEQYRIDARQFAHLFQLVSPWTCGAHTEILAERTFRLLDDNMDQLIEFKAFVSCLDIMYNGEMNEKIKLLYRLHIPPALTENDRDSQSPLRNPLLSTSRPLVFGKPNGDAVDYQKQLKQMIKDLAKEKDKTEKELPKMSQREFIQFCKTLYSMFHEDPEENDLYQAIATVTTLLLQIGEVGQRGSSSGSCSQECGEELRASAPSPEDSVFADTGKTPQDSQAFPEAAERDWTVSLEHILASLLTEQSLVNFFEKPLDMKSKLENAKINQYNLKTFEMSHQSQSELKLSNL

SEQ ID NO: 9843 - protein, 194 aa, Homo sapiens
MAKRRAAEPVTFHVPWKRLLLCDFAEQPPPPPLWIRPPGVAHAGQLLGVPEQHRKRKIDAGTMAEPSASPSKRRDSGDNSAPSGQEREDHGLETGDPPLPPPPVLPGPGEELPGARLPGGGGDDGAGRAGPPRGDWGVASRQHNEEFWQYNTFQYWRNPLPPIDLADIEDLSEDTLTEATLQGRNEGAEVDMES

SEQ ID NO: 9844 - protein, 153 aa, Homo sapiens
MKHLRPQFPLILAIYCFCMLQIPSSGFPQPLADPSDGLDIVQLEQLAYCLSQWAPLSRQPKDNQDIYKRFLFHYSRTQEATHPVKTGFPPVHPLMHLAAKLANRRMKRILQRGSGTAAVDFTKKDHTATWGRPFFLFRPRNGRNIEDEAQIQW

SEQ ID NO: 9845 - protein, 403 aa, Homo sapiens
MEEERGSALAAESALEKNVAELTVMDVYDIASLVGHEFERVIDQHGCEAIARLMPKVVRVLEILEVLVSRHHVAPELDELRLELDRLRLERMDRIEKERKHQKELELVEDVWRGEAQDLLSQIAQLQEENKQLMTNLSHKDVNFSEEEFQKHEGMSERERQVMKKLKEVVDKQRDEIRAKDRELGLKNEDVEALQQQQTRLMKINHDLRHRVTVVEAQGKALIEQKVELEADLQTKEQEMGSLRAELGKLRERLQGEHSQNGEEEPETEPVGEESISDAEKVAMDLKDPNRPRFTLQELRDVLHERNELKSKVFLLQEELAYYKSEEMEEENRIPQPPPIAHPRTSPQPESGIKRLFSFFSRDKKRLANTQRNVHIQESFGQWANTHRDDGYTEQGQEALQHL

SEQ ID NO: 9846 - protein, 206 aa, Homo sapiens
MASLSRPSLPSCLCSFLLLLLLQVSSSYAGQFRVIGPRHPIRALVGDEVELPCRISPGKNATGMEVGWYRPPFSRVVHLYRNGKDQDGDQAPEYRGRTELLKDAIGEGKVTLRIRNVRFSDEGGFTCFFRDHSYQEEAAMELKVEDPFYWVSPGVLVLLAVLPVLLLQITVGLIFLCLQYRLRGKLRAEIENLHRTFVFHLEALSG

SEQ ID NO: 9847 - protein, 295 aa, Homo sapiens
MASLSRPSLPSCLCSFLLLLLLQVSSSYAGQFRVIGPRHPIRALVGDEVELPCRISPGKNATGMEVGWYRPPFSRVVHLYRNGKDQDGDQAPEYRGRTELLKDAIGEGKVTLRIRNVRFSDEGGFTCFFRDHSYQEEAAMELKVEDPFYWVSPGVLVLLAVLPVLLLQITVGLIFLCLQYRLRGKLRAEIENLHRTFDPHFLRVPCWKITLFVIVPVLGPLVALIICYNWLHRRLAGQFLEELRKFSSLCYKQRIKSQERETEATRGRGGLLRDHIPRGKEELESLGGGKTPPGR

SEQ ID NO: 9848 - protein, 252 aa, Homo sapiens
MASLSRPSLPSCLCSFLLLLLLQVSSSYAGQFRVIGPRHPIRALVGDEVELPCRISPGKNATGMEVGWYRPPFSRVVHLYRNGKDQDGDQAPEYRGRTELLKDAIGEGKVTLRIRNVRFSDEGGFTCFFRDHSYQEEAAMELKVEDPFYWVSPGVLVLLAVLPVLLLQITVGLIFLCLQYRLRGKLRAEIENLHRTFDPHFLRVPCWKITLFVIVPVLGPLVALIICYNWLHRRLAGQFLEELLFHLEALSG

SEQ ID NO: 9849 - protein, 293 aa, Homo sapiens
MAYHSGYGAHGSKHRARAAPDPPPLFDDTSGGYSSQPGGYPATGADVAFSVNHLLGDPMANVAMAYGSSIASHGKDMVHKELHRFVSVSKLKYFFAVDTAYVAKKLGLLVFPYTHQNWEVQYSRDAPLPPRQDLNAPDLYIPTMAFITYVLLAGMALGIQKRFSPEVLGLCASTALVWVVMEVLALLLGLYLATVRSDLSTFHLLAYSGYKYVGMILSVLTGLLFGSDGYYVALAWTSSALMYFIVRSLRTAALGPDSMGGPVPRQRLQLYLTLGAAAFQPLIIYWLTFHLVR

SEQ ID NO: 9850 - protein, 45 aa, Homo sapiens
MASLSRPSLPSCLCSFLLLLLLQVSSSYAVQSDRTKTPYPGSGRG

SEQ ID NO: 9851 - protein, 247 aa, Homo sapiens
MASLSRPSLPSCLCSFLLLLLLQVSSSYAGQFRVIGPRHPIRALVGDEVELPCRISPGKNATGMEVGWYRPPFSRVVHLYRNGKDQDGDQAPEYRGRTELLKDAIGEGKVTLRIRNVRFSDEGGFTCFFRDHSYQEEAAMELKVEDPFYWVSPGVLVLLAVLPVLLLQITVGLIFLCLQYRLRGKLRAEIENLHRTFDPHFLRVPCWKITLFVIVPVLGPLVALIICYNWLHRRLAGQFLEELRNPF

SEQ ID NO: 9852 - protein, 254 aa, Homo sapiens
MAAASAGATRLLLLLLMAVAAPSRARGSGCRAGTGARGAGAEGREGEACGTVGLLLEHSFEIDDSANFRKRGSLLWNQQDGTLSLSQRQLSEEERGRLRDVAALNGLYRVRIPRRPGALDGLEAGGYVSSFVPACSLVESHLSDQLTLHVDVAGNVVGVSVVTHPGGCRGHEVEDVDLELFNTSVQLQPPTTAPGPETAAFIERLEMEQAQKAKNPQEQKSFFAKYWHIILGGAVLLTALRPAAPGPAPPPQEA

SEQ ID NO: 9853 - protein, 146 aa, Homo sapiens
MAGPLRAPLLLLAILAVALAVSPAAGSSPGKPPRLVGGPMDASVEEEGVRRALDFAVGEYNKASNDMYHSRALQVVRARKQIVAGVNYFLDVELGRTTCTKTQPNLDNCPFHDQPHLKRKAFCSFQIYAVPWQGTMTLSKSTCQDA

SEQ ID NO: 9854 - protein, 288 aa, Homo sapiens
MASLQRSRVLRCCSCRLFQAHQVKKSVKWTCKACGEKQSFLQEKSQPSESRWLKYLEKDSQELELEGTGVCFSKQPSSKMEEPGPRFSQDLPRKRKWSRSTVQPPCSRGVQDSGGSEVAWGPQKGQAGLTWKVKQGSSPCLQENSADCSAGELRGPGKELWSPIQQVTATSSKWAQFVLPPRKSSHVDSEQPRSLQRDPRPAGPAQAKQGTPRAQASREGLSRPTAAVQLPRATHPVTSGSERPCGKTSWDARTPWAEGGPLVLEAQNPRPTRLCDLFITGEDFDDDV

SEQ ID NO: 9855 - protein, 885 aa, Homo sapiens
MAPPSTREPRVLSATSATKSDGEMVLPGFPDADSFVKFALGSVVAVTKASGGLPQFGDEYDFYRSFPGFQAFCETQGDRLLQCMSRVMQYHGCRSNIKDRSKVTELEDKFDLLVDANDVILERVGILLDEASGVNKNQQPVLPAGLQVPKTVVSSWNRKAAEYGKKAKSETFRLLHAKNIIRPQLKFREKIDNSNTPFLPKIFIKPNAQKPLPQALSKERRERPQDRPEDLDVPPALADFIHQQRTQQVEQDMFAHPYQYELNHFTPADAVLQKPQPQLYRPIEETPCHFISSLDELVELNEKLLNCQEFAVDLEHHSYRSFLGLTCLMQISTRTEDFIIDTLELRSDMYILNESLTDPAIVKVFHGADSDIEWLQKDFGLYVVNMFDTHQAARLLNLGRHSLDHLLKLYCNVDSNKQYQLADWRIRPLPEEMLSYARDDTHYLLYIYDKMRLEMWERGNGQPVQLQVVWQRSRDICLKKFIKPIFTDESYLELYRKQKKHLNTQQLTAFQLLFAWRDKTARREDESYGYVLPNHMMLKIAEELPKEPQGIIACCNPVPPLVRQQINEMHLLIQQAREMPLLKSEVAAGVKKSGPLPSAERLENVLFGPHDCSHAPPDGYPIIPTSGSVPVQKQASLFPDEKEDNLLGTTCLIATAVITLFNEPSAEDSKKGPLTVAQKKAQNIMESFENPFRMFLPSLGHRAPVSQAAKFDPSTKIYEISNRWKLAQVQVQKDSKEAVKKKAAEQTAAREQAKEACKAAAEQAISVRQQVVLENAAKKRERATSDPRTTEQKQEKKRLKISKKPKDPEPPEKEFTPYDYSQSDFKAFAGNSKSKVSSQFDPNKQTPSGKKCIAAKKIKQSVGNKSMSFPTGKSDRGFRYNWPQR

SEQ ID NO: 9856 - protein, 302 aa, Homo sapiens
MEPGPDGPAASGPAAIREGWFRETCSLWPGQALSLQVEQLLHHRRSRYQDILVFRSKTYGNVLVLDGVIQCTERDEFSYQEMIANLPLCSHPNPRKVLIIGGGDGGVLREVVKHPSVESVVQCEIDEDVIQVSKKFLPGMAIGYSSSKLTLHVGDGFEFMKQNQDAFDVIITDSSDPMGPAESLFKESYYQLMKTALKEDGVLCCQGECQWLHLDLIKEMRQFCQSLFPVVAYAYCTIPTYPSGQIGFMLCSKNPSTNFQEPVQPLTQQQVAQMQLKYYNSDVHRAAFVLPEFARKALNDVS

SEQ ID NO: 9857 - protein, 440 aa, Homo sapiens
MGGLRLLAVALTCCWWPQGSQGKTLRGSFSSTAAQDAQGQRIGHFEFHGDHALLCVRINNIAVAVGKEAKLYLFQAQEWLKLQQSSHGYSCSEKLSKAQLTMTMNQTEHNLTVSQIPSPQTWHVFYADKYTCQDDKENSQVEDIPFEMVLLNPDAEGNPFDHFSAGESGLHEFFFLLVLVYFVIACIYAQSLWQAIKKGGPMHMILKVLTTALLLQAGSALANYIHFSSYSKDGIGVPFMGSLAEFFDIASQIQMLYLLLSLCMGWTIVRMKKSQSRPLQWDSTPASTGIAVFIVMTQSVLLLWEQFEDISHHSYHSHHNLAGILLIVLRICLALSLGCGLYQIITVERSTLKREFYITFAKGCILWFLCHPVLACISVIFSDYQRDKVITIGVILCQSVSMVILYRLFLSHSLYWEVSSLSSVTLPLTISSGHKSRPHF

SEQ ID NO: 9858 - protein, 1995 aa, Homo sapiens
MAAVTMSVPGRKAPPRPGPVPEAAQPFLFTPRGPSAGGGPGSGTSPQVEWTARRLVWVPSELHGFEAAALRDEGEEEAEVELAESGRRLRLPRDQIQRMNPPKFSKAEDMAELTCLNEASVLHNLRERYYSGLIYTYSGLFCVVINPYKQLPIYTEAIVEMYRGKKRHEVPPHVYAVTEGAYRSMLQDREDQSILCTGESGAGKTENTKKVIQYLAHVASSPKGRKEPGVPGELERQLLQANPILEAFGNAKTVKNDNSSRFGKFIRINFDVAGYIVGANIETYLLEKSRAIRQAKDECSFHIFYQLLGGAGEQLKADLLLEPCSHYRFLTNGPSSSPGQERELFQETLESLRVLGFSHEEIISMLRMVSAVLQFGNIALKRERNTDQATMPDNTAAQKLCRLLGLGVTDFSRALLTPRIKVGRDYVQKAQTKEQADFALEALAKATYERLFRWLVLRLNRALDRSPRQGASFLGILDIAGFEIFQLNSFEQLCINYTNEKLQQLFNHTMFVLEQEEYQREGIPWTFLDFGLDLQPCIDLIERPANPPGLLALLDEECWFPKATDKSFVEKVAQEQGGHPKFQRPRHLRDQADFSVLHYAGKVDYKANEWLMKNMDPLNDNVAALLHQSTDRLTAEIWKDVEGIVGLEQVSSLGDGPPGGRPRRGMFRTVGQLYKESLSRLMATLSNTNPSFVRCIVPNHEKRAGKLEPRLVLDQLRCNGVLEGIRICRQGFPNRILFQEFRQRYEILTPNAIPKGFMDGKQACEKMIQALELDPNLYRVGQSKIFFRAGVLAQLEEERDLKVTDIIVSFQAAARGYLARRAFQKRQQQQSALRVMQRNCAAYLKLRHWQWWRLFTKVKPLLQVTRQDEVLQARAQELQKVQELQQQSAREVGELQGRVAQLEEERARLAEQLRAEAELCAEAEETRGRLAARKQELELVVSELEARVGEEEECSRQMQTEKKRLQQHIQELEAHLEAEEGARQKLQLEKVTTEAKMKKFEEDLLLLEDQNSKLSKERKLLEDRLAEFSSQAAEEEEKVKSLNKLRLKYEATIADMEDRLRKEEKGRQELEKLKRRLDGESSELQEQMVEQQQRAEELRAQLGRKEEELQAALARAEDEGGARAQLLKSLREAQAALAEAQEDLESERVARTKAEKQRRDLGEELEALRGELEDTLDSTNAQQELRSKREQEVTELKKTLEEETRIHEAAVQELRQRHGQALGELAEQLEQARRGKGAWEKTRLALEAEVSELRAELSSLQTARQEGEQRRRRLELQLQEVQGRAGDGERARAEAAEKLQRAQAELENVSGALNEAESKTIRLSKELSSTEAQLHDAQELLQEETRAKLALGSRVRAMEAEAAGLREQLEEEAAARERAGRELQTAQAQLSEWRRRQEEEAGALEAGEEARRRAAREAEALTQRLAEKTETVDRLERGRRRLQQELDDATMDLEQQRQLVSTLEKKQRKFDQLLAEEKAAVLRAVEERERAEAEGREREARALSLTRALEEEQEAREELERQNRALRAELEALLSSKDDVGKSVHELERACRVAEQAANDLRAQVTELEDELTAAEDAKLRLEVTVQALKTQHERDLQGRDEAGEERRRQLAKQLRDAEVERDEERKQRTLAVAARKKLEGELEELKAQMASAGQGKEEAVKQLRKMQAQMKELWREVEETRTSREEIFSQNRESEKRLKGLEAEVLRLQEELAASDRARRQAQQDRDEMADEVANGNLSKAAILEEKRQLEGRLGQLEEELEEEQSNSELLNDRYRKLLLQVESLTTELSAERSFSAKAESGRQQLERQIQELRGRLGEEDAGARARHKMTIAALESKLAQAEEQLEQETRERILSGKLVRRAEKRLKEVVLQVEEERRVADQLRDQLEKGNLRVKQLKRQLEEAEEEASRAQAGRRRLQRELEDVTESAESMNREVTTLRNRLRRGPLTFTTRTVRQVFRLEEGVASDEEAEEAQPGSGPSPEPEGSPPAHPQ

SEQ ID NO: 9859 - protein, 159 aa, Homo sapiens
MSSPQRRKAMPWALSLLLMGFQLLVTYAWCSEEEMGGNNKIVQDPMFLATVEFALNTFNVQSKEEHAYRLLRVLSSWREDSMDRKWRGKMVFSMNLQLRQTVCRKFEDDIDNCPFQESLELNNVRQGISFPQVHSCGCCMGCGVGTGAADKAIPRDKGK

SEQ ID NO: 9860 - protein, 578 aa, Homo sapiens
MLLLLLLAPLFLRPPGAGGAQTPNATSEGCQIIHPPWEGGIRYRGLTRDQVKAINFLPVDYEIEYVCRGEREVVGPKVRKCLANGSWTDMDTPSRCVRICSKSYLTLENGKVFLTGGDLPALDGARVDFRCDPDFHLVGSSRSICSQGQWSTPKPHCQVNRTPHSERRAVYIGALFPMSGGWPGGQACQPAVEMALEDVNSRRDILPDYELKLIHHDSKCDPGQATKYLYELLYNDPIKIILMPGCSSVSTLVAEAARMWNLIVLSYGSSSPALSNRQRFPTFFRTHPSATLHNPTRVKLFEKWGWKKIATIQQTTEVFTSTLDDLEERVKEAGIEITFRQSFFSDPAVPVKNLKRQDARIIVGLFYETEARKVFCEVYKERLFGKKYVWFLIGWYADNWFKIYDPSINCTVDEMTEAVEGHITTEIVMLNPANTRSISNMTSQEFVEKLTKRLKRHPEETGGFQEAPLAYDAIWALALALNKTSGGGGRSGVRLEDFNYNNQTITDQIYRAMNSSSFEGVSGHVVFDASGSRMAWTLIEQLQGGSYKKIGYYDSTKDDLSWSKTDKWIVISRTHSPT

SEQ ID NO: 9861 - protein, 554 aa, Homo sapiens
MTAPCSQPAQLPGRRQLGLVPFPPPPPRTPLLWLLLLLLAAVAPARGWESGDLELFDLVEEVQLNFYQFLGVQQDASSADIRKAYRKLSLTLHPDKNKDENAETQFRQLVAIYEVLKDDERRQRYDDILINGLPDWRQPVFYYRRVRKMSNAELALLLFIILTVGHYAVVWSIYLEKQLDELLSRKKREKKKKTGSKSVDVSKLGASEKNERLLMKPQWHDLLPCKLGIWFCLTLKALPHLIQDAGQFYAKYKETRLKEKEDALTRTELETLQKQKKVKKPKPEFPVYTPLETTYIQSYDHGTSIEEIEEQMDDWLENRNRTQKKQAPEWTEEDLSQLTRSMVKFPGGTPGRWEKIAHELGRSVTDVTTKAKQLKDSVTCSPGMVRLSELKSTVQNSRPIKTATTLPDDMITQREDAEGVAAEEEQEGDSGEQETGATDARPRRRKPARLLEATAKPEPEEKSRAKRQKDFDIAEQNESSDEESLRKERARSAEEPWTQNQQKLLELALQQYPRGSSDRWDKIARCVPSKSKEDCIARYKLLVELVQKKKQAKS

SEQ ID NO: 9862 - protein, 823 aa, Homo sapiens
MWGSPALAWAVWLACVQPTVFPWSLSFRSDTDKPSSAAEVLTEASSCWTDTVECFSDYMTLWIPRSHVEGLRRWLARTLHLPGTWRSPDHLDSSLAKCGYFLHLASDGDFLFRVQYSACFVQKEKANYRLEIRIFQKGVMGLERSDRYIMKCPMLRSRLGQESVHCGPMFIQVSRPLPLWRDNRQTPWLLSLRGELVASLEDASLMGLYVDMNATTVTVQSPRQGLLQRWEVLNTSAELLPLWLVSGHHAYSLEAACPPVSFQPESEVLVHIPKQRLGLVKRGSYIEETLSLRFLRVHQSNIFMVTENKDFVVVSIPAAGVLQVQRCQEVGGTPGTQAFYRVDLSLEFAEMAAPVLWTVESFFQCVGSGTESPASTAALRTTPSPPSPGPETPPAGVPPAASSQVWAAGPAAQEWLSRDLLHRPSDALAKKGLGPFLQTAKPARRGQTSASILPRVVQAQRGPQPPPGEAGIPGHPTPPATLPSEPVEGVQASPWRPRPVLPTHPALTLPVSSDASSPSPPAPRPERPESLLVSGPSVTLTEGLGTVRPEQDPAKSPGSPLLLRGLSSGDVAAPEPIMGEPGQASEEFQPLARPWRATLAAEELVSHRSPGEPQETCSGTEVERPRQTGPGLPREGARGHMDLSSSEPSQDIEGPGLSILPARDATFSTPSVRQPDPSAWLSSGPELTGMPRVRLAAPLAVLPMEPLPPEPVRPAALLTPEASSVGGPDQARYLESAPGWPVGQEEWGVAHTSSPPSTQTLSLWAPTGVLLPSLVELEYPFQAGRGASLQQELTEPTLALSAESHRPPELQDSVEGLSERPSR

SEQ ID NO: 9863 - protein, 415 aa, Homo sapiens
MITEGAQAPRLLLPPLLLLLTLPATGSDPVLCFTQYEESSGKCKGLLGGGVSVEDCCLNTAFAYQKRSGGLCQPCRSPRWSLWSTWAPCSVTCSEGSQLRYRRCVGWNGQCSGKVAPGTLEWQLQACEDQQCCPEMGGWSGWGPWEPCSVTCSKGTRTRRRACNHPAPKCGGHCPGQAQESEACDTQQVCPTHGAWATWGPWTPCSASCHGGPHEPKETRSRKCSAPEPSQKPPGKPCPGLAYEQRRCTGLPPCPVAGGWGPWGPVSPCPVTCGLGQTMEQRTCNHPVPQHGGPFCAGDATRTHICNTAVPCPVDGEWDSWGEWSPCIRRNMKSISCQEIPGQQSRGRTCRGRKFDGHRCAGQQQDIRHCYSIQHCPLKGSWSEWSTWGLCMPPCGPNPTRARQRLCTPLLPKYP

SEQ ID NO: 9864 - protein, 138 aa, Homo sapiens
MMAEPWQALQLLLAILLTLMALPYQARKKTFLSVHEVMAVENYAKDSLQWITDQYNKESDDKYHFRIFRVLKVQRQVTDHLEYHLNVEMQWTTCQKPETTNCVPQERELHKQVNCFFSVFAVPWFEQYKILNKSCSSD

SEQ ID NO: 9865 - protein, 899 aa, Homo sapiens
MLLLLLLAPLFLRPPGAGGAQTPNATSEGCQIIHPPWEGGIRYRGLTRDQVKAINFLPVDYEIEYVCRGEREVVGPKVRKCLANGSWTDMDTPSRCVNRTPHSERRAVYIGALFPMSGGWPGGQACQPAVEMALEDVNSRRDILPDYELKLIHHDSKCDPGQATKYLYELLYNDPIKIILMPGCSSVSTLVAEAARMWNLIVLSYGSSSPALSNRQRFPTFFRTHPSATLHNPTRVKLFEKWGWKKIATIQQTTEVFTSTLDDLEERVKEAGIEITFRQSFFSDPAVPVKNLKRQDARIIVGLFYETEARKVFCEVYKERLFGKKYVWFLIGWYADNWFKIYDPSINCTVDEMTEAVEGHITTEIVMLNPANTRSISNMTSQEFVEKLTKRLKRHPEETGGFQEAPLAYDAIWALALALNKTSGGGGRSGVRLEDFNYNNQTITDQIYRAMNSSSFEGVSGHVVFDASGSRMAWTLIEQLQGGSYKKIGYYDSTKDDLSWSKTDKWIGGSPPADQTLVIKTFRFLSQKLFISVSVLSSLGIVLAVVCLSFNIYNSHVRYIQNSQPNLNNLTAVGCSLALAAVFPLGLDGYHIGRNQFPFVCQARLWLLGLGFSLGYGSMFTKIWWVHTVFTKKEEKKEWRKTLEPWKLYATVGLLVGMDVLTLAIWQIVDPLHRTIETFAKEEPKEDIDVSILPQLEHCSSRKMNTWLGIFYGYKGLLLLLGIFLAYETKSVSTEKINDHRAVGMAIYNVAVLCLITAPVTMILSSQQDAAFAFASLAIVFSSYITLVVLFVPKMRRLITRGEWQSEAQDTMKTGSSTNNNEEEKSRLLEKENRELEKIIAEKEERVSELRHQLQSRQQLRSRRHPPTPPEPSGGLPRGPPEPPDRLSCDGSRVHLLYK

SEQ ID NO: 9866 - protein, 519 aa, Homo sapiens
MSPLWWGFLLSCLGCKILPGAQGQFPRVCMTVDSLVNKECCPRLGAESANVCGSQQGRGQCTEVRADTRPWSGPYILRNQDDRELWPRKFFHRTCKCTGNFAGYNCGDCKFGWTGPNCERKKPPVIRQNIHSLSPQEREQFLGALDLAKKRVHPDYVITTQHWLGLLGPNGTQPQFANCSVYDFFVWLHYYSVRDTLLGPGRPYRAIDFSHQGPAFVTWHRYHLLCLERDLQRLIGNESFALPYWNFATGRNECDVCTDQLFGAARPDDPTLISRNSRFSSWETVCDSLDDYNHLVTLCNGTYEGLLRRNQMGRNSMKLPTLKDIRDCLSLQKFDNPPFFQNSTFSFRNALEGFDKADGTLDSQVMSLHNLVHSFLNGTNALPHSAANDPIFVVLHSFTDAIFDEWMKRFNPPADAWPQELAPIGHNRMYNMVPFFPPVTNEELFLTSDQLGYSYAIDLPVSVEETPGWPTTLLVVMGTLVALVGLFVLLAFLQYRRLRKGYTPLMETHLSSKRYTEEA

SEQ ID NO: 9867 - protein, 961 aa, Homo sapiens
MLLLLLLAPLFLRPPGAGGAQTPNATSEGCQIIHPPWEGGIRYRGLTRDQVKAINFLPVDYEIEYVCRGEREVVGPKVRKCLANGSWTDMDTPSRCVRICSKSYLTLENGKVFLTGGDLPALDGARVDFRCDPDFHLVGSSRSICSQGQWSTPKPHCQVNRTPHSERRAVYIGALFPMSGGWPGGQACQPAVEMALEDVNSRRDILPDYELKLIHHDSKCDPGQATKYLYELLYNDPIKIILMPGCSSVSTLVAEAARMWNLIVLSYGSSSPALSNRQRFPTFFRTHPSATLHNPTRVKLFEKWGWKKIATIQQTTEVFTSTLDDLEERVKEAGIEITFRQSFFSDPAVPVKNLKRQDARIIVGLFYETEARKVFCEVYKERLFGKKYVWFLIGWYADNWFKIYDPSINCTVDEMTEAVEGHITTEIVMLNPANTRSISNMTSQEFVEKLTKRLKRHPEETGGFQEAPLAYDAIWALALALNKTSGGGGRSGVRLEDFNYNNQTITDQIYRAMNSSSFEGVSGHVVFDASGSRMAWTLIEQLQGGSYKKIGYYDSTKDDLSWSKTDKWIGGSPPADQTLVIKTFRFLSQKLFISVSVLSSLGIVLAVVCLSFNIYNSHVRYIQNSQPNLNNLTAVGCSLALAAVFPLGLDGYHIGRNQFPFVCQARLWLLGLGFSLGYGSMFTKIWWVHTVFTKKEEKKEWRKTLEPWKLYATVGLLVGMDVLTLAIWQIVDPLHRTIETFAKEEPKEDIDVSILPQLEHCSSRKMNTWLGIFYGYKGLLLLLGIFLAYETKSVSTEKINDHRAVGMAIYNVAVLCLITAPVTMILSSQQDAAFAFASLAIVFSSYITLVVLFVPKMRRLITRGEWQSEAQDTMKTGSSTNNNEEEKSRLLEKENRELEKIIAEKEERVSELRHQLQSRQQLRSRRHPPTPPEPSGGLPRGPPEPPDRLSCDGSRVHLLYK

SEQ ID NO: 9868 - protein, 268 aa, Homo sapiens
MEVTGDAGVPESGEIRTLKPCLLRRNYSREQHGVAASCLEDLRSKACDILAIDKSLTPVTLVLAEDGTIVDDDDYFLCLPSNTKFVALASNEKWAYNNSDGGTAWISQESFDVDETDSGAGLKWKNVARQLKEDLSSIILLSEEDLQMLVDAPCSDLAQELRQSCATVQRLQHTLQQVLDQREEVRQSKQLLQLYLQALEKEGSLLSKQEESKAAFGEEVDAVDTGISRETSSDVALASHILTALREKQAPELSLSSQDLEVGGNQGH

SEQ ID NO: 9869 - protein, 331 aa, Homo sapiens
MEVTGDAGVPESGEIRTLKPCLLRRNYSREQHGVAASCLEDLRSKACDILAIDKSLTPVTLVLAEDGTIVDDDDYFLCLPSNTKFVALASNEKWAYNNSDGGTAWISQESFDVDETDSGAGLKWKNVARQLKEDLSSIILLSEEDLQMLVDAPCSDLAQELRQSCATVQRLQHTLQQVLDQREEVRQSKQLLQLYLQALEKEGSLLSKQEESKAAFGEEVDAVDTGISRETSSDVALASHILTALREKQAPELSLSSQDLELVTKEDPKALAVALNWDIKKTETVQEACERELALRLQQTQSLHSLRSISASKASPPGDLQNPKRARQDPT

SEQ ID NO: 9870 - protein, 1383 aa, Homo sapiens
MYATDSRGHSPAFLQPQNGNSRHPSGYVPGKVVPLRPPPPPKSQASAKFTSIRREDRATFAFSPEEQQAQRESQKQKRHKNTFICFAITSFSFFIALAIILGISSKYAPDENCPDQNPRLRNWDPGQDSAKQVVIKEGDMLRLTSDATVHSIVIQDGGLLVFGDNKDGSRNITLRTHYILIQDGGALHIGAEKCRYKSKATITLYGKSDEGESMPTFGKKFIGVEAGGTLELHGARKASWTLLARTLNSSGLPFGSYTFEKDFSRGLNVRVIDQDTAKILESERFDTHEYRNESRRLQEFLRFQDPGRIVAIAVGDSAAKSLLQGTIQMIQERLGSELIQGLGYRQAWALVGVIDGGSTSCNESVRNYENHSSGGKALAQREFYTVDGQKFSVTAYSEWIEGVSLSGFRVEVVDGVKLNLLDDVSSWKPGDQIVVASTDYSMYQAEEFTLLPCSECSHFQVKVKETPQFLHMGEIIDGVDMRAEVGILTRNIVIQGEVEDSCYAENQCQFFDYDTFGGHIMIMKNFTSVHLSYVELKHMGQQQMGRYPVHFHLCGDVDYKGGYRHATFVDGLSIHHSFSRCITVHGTNGLLIKDTIGFDTLGHCFFLEDGIEQRNTLFHNLGLLTKPGTLLPTDRNNSMCTTMRDKVFGNYIPVPATDCMAVSTFWIAHPNNNLINNAAAGSQDAGIWYLFHKEPTGESSGLQLLAKPELTPLGIFYNNRVHSNFKAGLFIDKGVKTTNSSAADPREYLCLDNSARFRPHQDANPEKPRVAALIDRLIAFKNNDNGAWVRGGDIIVQNSAFADNGIGLTFASDGSFPSDEGSSQEVSESLFVGESRNYGFQGGQNKYVGTGGIDQKPRTLPRNRTFPIRGFQIYDGPIHLTRSTFKKYVPTPDRYSSAIGFLMKNSWQITPRNNISLVKFGPHVSLNVFFGKPGPWFEDCEMDGDKNSIFHDIDGSVTGYKDAYVGRMDNYLIRHPSCVNVSKWNAVICSGTYAQVYVQTWSTQNLSMTITRDEYPSNPMVLRGINQKAAFPQYQPVVMLEKGYTIHWNGPAPRTTFLYLVNFNKNDWIRVGLCYPSNTSFQVTFGYLQRQNGSLSKIEEYEPVHSLEELQRKQSERKFYFDSSTGLLFLYLKAKSHRHGHSYCSSQGCERVKIQAATDSKDISNCMAKAYPQYYRKPSVVKRMPAMLTGLCQGCGTRQVVFTSDPHKSYLPVQFQSPDKAETQRGDPSVISVNGTDFTFRSAGVLLLVVDPCSVPFRLTEKTVFPLADVSRIEEYLKTGIPPRSIVLLSTRGEIKQLNISHLLVPLGLAKPAHLYDKGSTIFLGFSGNFKPSWTKLFTSPAGQGLGVLEQFIPLQLDEYGCPRATTVRRRDLELLKQASKAH

SEQ ID NO: 9871 - protein, 606 aa, Homo sapiens [sequence omitted]

SEQ ID NO: 9872 - protein, 513 aa, Homo sapiens
MAEVGEIIEGCRLPVLRRNQDNEDEWPLAEILSVKDISGRKLFYVHYIDFNKRLDEWVTHERLDLKKIQFPKKEAKTPTKNGLPGSRPGSPEREVPASAQASGKTLPIPVQITLRFNLPKEREAIPGGEPDQPLSSSSCLQPNHRSTKRKVEVVSPATPVPSETAPASVFPQNGAARRAVAAQPGRKRKSNCLGTDEDSQDSSDGIPSAPRMTGSLVSDRSHDDIVTRMKNIECIELGRHRLKPWYFSPYPQELTTLPVLYLCEFCLKYGRSLKCLQRHLTKCDLRHPPGNEIYRKGTISFFEIDGRKNKSYSQNLCLLAKCFLDHKTLYYDTDPFLFYVMTEYDCKGFHIVGYFSKEKESTEDYNVACILTLPPYQRRGYGKLLIEFSYELSKVEGKTGTPEKPLSDLGLLSYRSYWSQTILEILMGLKSESGERPQITINEISEITSIKKEDVISTLQYLNLINYYKGQYILTLSEDIVDGHERAMLKRLLRIDSKCLHFTPKDWSKRGKW

SEQ ID NO: 9873 - protein, 555 aa, Homo sapiens
MPSWIGAVILPLLGLLLSLPAGADVKARSCGEVRQAYGAKGFSLADIPYQEIAGEHLRICPQEYTCCTTEMEDKLSQQSKLEFENLVEETSHFVRTTFVSRHKKFDEFFRELLENAEKSLNDMFVRTYGMLYMQNSEVFQDLFTELKRYYTGGNVNLEEMLNDFWARLLERMFQLINPQYHFSEDYLECVSKYTDQLKPFGDVPRKLKIQVTRAFIAARTFVQGLTVGREVANRVSKVSPTPGCIRALMKMLYCPYCRGLPTVRPCNNYCLNVMKGCLANQADLDTEWNLFIDAMLLVAERLEGPFNIESVMDPIDVKISEAIMNMQENSMQVSAKVFQGCGQPKPAPALRSARSAPENFNTRFRPYNPEERPTTAAGTSLDRLVTDIKEKLKLSKKVWSALPYTICKDESVTAGTSNEEECWNGHSKARYLPEIMNDGLTNQINNPEVDVDITRPDTFIRQQIMALRVMTNKLKNAYNGNDVNFQDTSDESSGSGSGSGCMDDVCPTEFEFVTTEAPAVDPDRREVDSSAAQRGHSLLSWSLTCIVLALQRLCR

SEQ ID NO: 9874 - protein, 105 aa, Homo sapiens
MPLSPGLLLLLLSGATATAALPLEGGPTGRDSEHMQEAAGIRKSSLLTFLAWWFEWTSQASAGPLIGEEAREVARRQEGAPPQQSARRDRMPCRNFFWKTFSSCK

SEQ ID NO: 9875 - protein, 659 aa, Homo sapiens
MAAAVAAAGRLGWLFAALCLGNAAGEAAPGPRVLGFCLEEDGAAGAGWVRGGAARDTPDATFLLRLFGPGFANSSWSWVAPEGAGCREEAASPAGEWRALLRLRLRAEAVRPHSALLAVRVEPGGGAAEEAAPPWALGLGAAGLLALAALARGLQLSALALAPAEVQVLRESGSEAERAAARRLEPARRWAGCALGALLLLASLAQAALAVLLYRAAGQRAVPAVLGSAGLVFLVGEVVPAAVSGRWTLALAPRALGLSRLAVLLTLPVALPVGQLLELAARPGRLRERVLELARGGGDPYSDLSKGVLRCRTVEDVLTPLEDCFMLDASTVLDFGVLASIMQSGHTRIPVYEEERSNIVDMLYLKDLAFVDPEDCTPLSTITRFYNHPLHFVFNDTKLDAVLEEFKRGDTVVKRKPASLMAPLKRKEEFSLFKVSDDEYKVTISPQLLLATQRFLSREVDVFSPLRISEKVLLHLLKHPSVNQEVRFDESNRLATHHYLYQRSQPVDYFILILQGRVEVEIGKEGLKFENGAFTYYGVSALTVPSSVHQSPVSSLQPIRHDLQPDPGDGTHSSAYCPDYTVRALSDLQLIKVTRLQYLNALLATRAQNLPQSPENTDLQVIPGSQTRLLGEKTTTAAGSSHSRPGVPVEGSPGRNPGV

SEQ ID NO: 9876 - protein, 572 aa, Homo sapiens
MDAQTWPVGFRCLLLLALVGSARSEGVQTCEEVRKLFQWRLLGAVRGLPDSPRAGPDLQVCISKKPTCCTRKMEERYQIAARQDMQQFLQTSSSTLKFLISRNAAAFQETLETLIKQAENYTSILFCSTYRNMALEAAASVQEFFTDVGLYLFGADVNPEEFVNRFFDSLFPLVYNHLINPGVTDSSLEYSECIRMARRDVSPFGNIPQRVMGQMGRSLLPSRTFLQALNLGIEVINTTDYLHFSKECSRALLKMQYCPHCQGLALTKPCMGYCLNVMRGCLAHMAELNPHWHAYIRSLEELSDAMHGTYDIGHVLLNFHLLVNDAVLQAHLNGQKLLEQVNRICGRPVRTPTQSPRCSFDQSKEKHGMKTTTRNSEETLANRRKEFINSLRLYRSFYGGLADQLCANELAAADGLPCWNGEDIVKSYTQRVVGNGIKAQSGNPEVKVKGIDPVINQIIDKLKHVVQLLQGRSPKPDKWELLQLGSGGGMVEQVSGDCDDEDGCGGSGSGEVKRTLKITDWMPDDMNFSDVKQIHQTDTGSTLDTTGAGCAVATESMTFTLISVVMLLPGIW

SEQ ID NO: 9877 - protein, 1265 aa, Homo sapiens
MEAEKDSGRRLRPIDRQRYDENEDLSDVEEIVSVRGFSLEEKLRSQLYQGDFVHAMEGKDFNYEYVQREALRVPLIFREKDGLGIKMPDPDFTVRDVKLLVGSRRLVDVMDVNTQKGTEMSMSQFVRYYETPEAQRDKLYNVISLEFSHTKLEHLVKRPTVVDLVDWVDNMWPQHLKEKQTEATNAIAEMKYPKVKKYCLMSVKGCFTDFHIDFGGTSVWYHVFRGGKIFWLIPPTLHNLALYEEWVLSGKQSDIFLGDRVERCQRIELKQGYTFFIPSGWIHAVYTPVDSLVFGGNILHSFNVPMQLRIYEIEDRTRVQPKFRYPFYYEMCWYVLERYVYCVTQRSHLTQEYQRESMLIDAPRKPSIDGFSSDSWLEMEEEACDQQPQEEEEKDEEGEGRDRAPKPPTDGSTSPTSTPSEDQEALGKKPKAPALRFLKRTLSNESEESVKSTTLAVDYPKTPTGSPATEVSAKWTHLTEFELKGLKALVEKLESLPENKKCVPEGIEDPQALLEGVKNVLKEHADDDPSLAITGVPVVTWPKKTPKNRAVGRPKGKLGPASAVKLAANRTTAGARRRRTRCRKCEACLRTECGECHFCKDMKKFGGPGRMKQSCIMRQCIAPVLPHTAVCLVCGEAGKEDTVEEEEGKFNLMLMECSICNEIIHPGCLKIKESEGVVNDELPNCWECPKCNHAGKTGKQKRGPGFKYASNLPGSLLKEQKMNRDNKEGQEPAKRRSECEEAPRRRSDEHSKKVPPDGLLRRKSDDVHLRKKRKYEKPQELSGRKRLKPGKEDKLFRKKRRSWKNAEDRMALANKPLRRFKQEPEDELPEAPPKTRESDHSRSSSPTAGPSTEGAEGPEEKKKVKMRRKRRLPNKELSRELSKELNHEIQRTENSLANENQQPIKSEPESEGEEPKRPPGICERPHRFSKGLNGTPRELRHQLGPSLRSPPRVISRPPPSVSPPKCIQMERHVIRPPPISPPPDSLPLDDGAAHVMHREVWMAVFSYLSHQDLCVCMRVCRTWNRWCCDKRLWTRIDLNHCKSITPLMLSGIIRRQPVSLDLSWTNISKKQLSWLINRLPGLRDLVLSGCSWIAVSALCSSSCPLLRTLDVQWVEGLKDAQMRDLLSPPTDNRPGQMDNRSKLRNIVELRLAGLDITDASLRLIIRHMPLLSKLHLSYCNHVTDQSINLLTAVGTTTRDSLTEINLSDCNKVTDQCLSFFKRCGNICHIDLRYCKQVTKEGCEQFIAEMSSFQGRSCSTTRLGDE

SEQ ID NO: 9878 - protein, 775 aa, Homo sapiens
MAPVGGGGRPVGGPARGRLLLAAPVLLVLLWALGARGQGSPQQGTIVGMRLASCNKSCGTNPDGIIFVSEGSTVNLRLYGYSLGNISSNLISFTEVDDAETLHKSTSCLELTKDLVVQQLVNVSRGNTSGVLVVLTKFLRRSESMKLYALCTRAQPDGPWLKWTDKDSLLFMVEEPGRFLPLWLHILLITVLLVLSGIFSGLNLGLMALDPMELRIVQNCGTEKERRYARKIEPIRRKGNYLLCSLLLGNVLVNTSLTILLDNLIGSGLMAVASSTIGIVIFGEILPQALCSRHGLAVGANTILLTKFFMLLTFPLSFPISKLLDFFLGQEIRTVYNREKLMEMLKVTEPYNDLVKEELNMIQGALELRTKTVEDIMTQLQDCFMIRSDAILDFNTMSEIMESGYTRIPVFEDEQSNIVDILYVKDLAFVDPDDCTPLKTITRFYNHPVHFVFHDTKLDAMLEEFKKGKSHLAIVQKVNNEGEGDPFYEVLGLVTLEDVIEEIIKSEILDESDMYTDNRSRKRVSEKNKRDFSAFKDADNELKVKISPQLLLAAHRFLATEVSQFSPSLISEKILLRLLKYPDVIQELKFDEHNKYYARHYLYTRNKPADYFILILQGKVEVEAGKENMKFETGAFSYYGTMALTSVPSDRSPAHPTPLSRSASLSYPDRTDVSTAATLAGSSNQFGSSVLGQYISDFSVRALVDLQYIKITRQQYQNGLLASRMENSPQFPIDGCTTHMENLAEKSELPVVDETTTLLNERNSLLHKASHENAI

SEQ ID NO: 9879 - protein, 1153 aa, Homo sapiens
MSGASVKVAVRVRPFNSRETSKESKCIIQMQGNSTSIINPKNPKEAPKSFSFDYSYWSHTSPEDPCFASQNRVYNDIGKEMLLHAFEGYNVCIFAYGQTGAGKSYTMMGKQEESQAGIIPQLCEELFEKINDNCNEEMSYSVEVSYMEIYCERVRDLLNPKNKGNLRVREHPLLGPYVEDLSKLAVTSYTDIADLMDAGNKARTVAATNMNETSSRSHAVFTIVFTQKKHDNETNLSTEKVSKISLVDLAGSERADSTGAKGTRLKEGANINKSLTTLGKVISALAEVSKKKKKTDFIPYRDSVLTWLLRENLGGNSRTAMVAALSPADINYDETLSTLRYADRAKQIKCNAVINEDPNAKLVRELKEEVTRLKDLLRAQGLGDIIDTSMGSLTSSPSSCSLSSQVGLTSVTSIQERIMSTPGGEEAIERLKESEKIIAELNETWEEKLRKTEAIRMEREALLAEMGVAIREDGGTLGVFSPKKTPHLVNLNEDPLMSECLLYYIKDGITRVGQADAERRQDIVLSGAHIKEEHCIFRSERSNSGEVIVTLEPCERSETYVNGKRVSQPVQLRSGNRIIMGKNHVFRFNHPEQARAEREKTPSAETPSEPVDWTFAQRELLEKQGIDMKQEMEKRLQEMEILYKKEKEEADLLLEQQRLDADSDSGDDSDKRSCEESWKLITSLREKLPPSKLQTIVKKCGLPSSGKKREPIKMYQIPQRRRLSKDSKWVTISDLKIQAVKEICYEVALNDFRHSRQEIEALAIVKMKELCAMYGKKDPNERDSWRAVARDVWDTVGVGDEKIEDVMATGKGSTDVDDLKVHIDKLEDILQEVKKQNNMKDEEIKVLRNKMLKMEKVLPLIGSQEQKSPGSHKAKEPVGAGVSSTSENNVSKGDNGELAKEERVSQLMNGDPAFRRGRLRWMRQEQIRFKNLQQQEITKQLRRQNVPHRFIPPENRKPRFPFKSNPKHRNSWSPGTHIIITEDEVIELRIPKDDEARKGNKEESQEKGGKGAFKDPQFPWGSQGMRSQDHIQVSKQHINNQQQPPQLRWRSNSLNNGQPKSTRCQASASAESLNSHSGHPTADVQTFQAKRHIHQHRQSYCNYNTGGQLEGNAATSYQKQTDKPSHCSQFVTPPRMRRQFSAPNLKAGRETTV

SEQ ID NO: 9880 - protein, 696 aa, Homo sapiens
MLLWILLLETSLCFAAGNVTGDVCKEKICSCNEIEGDLHVDCEKKGFTSLQRFTAPTSQFYHLFLHGNSLTRLFPNEFANFYNAVSLHMENNGLHEIVPGAFLGLQLVKRLHINNNKIKSFRKQTFLGLDDLEYLQADFNLLRDIDPGAFQDLNKLEVLILNDNLISTLPANVFQYVPITHLDLRGNRLKTLPYEEVLEQIPGIAEILLEDNPWDCTCDLLSLKEWLENIPKNALIGRVVCEAPTRLQGKDLNETTEQDLCPLKNRVDSSLPAPPAQEETFAPGPLPTPFKTNGQEDHATPGSAPNGGTKIPGNWQIKIRPTAAIATGSSRNKPLANSLPCPGGCSCDHIPGSGLKMNCNNRNVSSLADLKPKLSNVQELFLRDNKIHSIRKSHFVDYKNLILLDLGNNNIATVENNTFKNLLDLRWLYMDSNYLDTLSREKFAGLQNLEYLNVEYNAIQLILPGTFNAMPKLRILILNNNLLRSLPVDVFAGVSLSKLSLHNNYFMYLPVAGVLDQLTSIIQIDLHGNPWECSCTIVPFKQWAERLGSEVLMSDLKCETPVNFFRKDFMLLSNDEICPQLYARISPTLTSHSKNSTGLAETGTHSNSYLDTSRVSISVLVPGLLLVFVTSAFTVVGMLVFILRNRKRSKRRDANSSASEINSLQTVCDSSYWHNGPYNADGAHRVYDCGSHSLSD

SEQ ID NO: 9881 - protein, 315 aa, Homo sapiens
MEARAQSGNGSQPLLQTPRDGGRQRGEPDPRDALTQQVHVLSLDQIRAIRNTNEYTEGPTVVPRPGLKPAPRPSTQHKHERLHGLPEHRQPPRLQHSQVHSSARAPLSRSISTVSSGSRSSTRTSTSSSSSEQRLLGSSFSSGPVADGIIRVQPKSELKPGELKPLSKEDLGLHAYRCEDCGKCKCKECTYPRPLPSDWICDKQCLCSAQNVIDYGTCVCCVKGLFYHCSNDDEDNCADNPCSCSQSHCCTRWSAMGVMSLFLPCLWCYLPAKGCLKLCQGCYDRVNRPGCRCKNSNTVCCKVPTVPPRNFEKPT

SEQ ID NO: 9882 - protein, 575 aa, Homo sapiens
MLGVLVLGALALAGLGFPAPAEPQPGGSQCVEHDCFALYPGPATFLNASQICDGLRGHLMTVRSSVAADVISLLLNGDGGVGRRRLWIGLQLPPGCGDPKRLGPLRGFQWVTGDNNTSYSRWARLDLNGAPLCGPLCVAVSAAEATVPSEPIWEEQQCEVKADGFLCEFHFPATCRPLAVEPGAAAAAVSITYGTPFAARGADFQALPVGSSAAVAPLGLQLMCTAPPGAVQGHWAREAPGAWDCSVENGGCEHACNAIPGAPRCQCPAGAALQADGRSCTASATQSCNDLCEHFCVPNPDQPGSYSCMCETGYRLAADQHRCEDVDDCILEPSPCPQRCVNTQGGFECHCYPNYDLVDGECVEPVDPCFRANCEYQCQPLNQTSYLCVCAEGFAPIPHEPHRCQMFCNQTACPADCDPNTQASCECPEGYILDDGFICTDIDECENGGFCSGVCHNLPGTFECICGPDSALARHIGTDCDSGKVDGGDSGSGEPPPSPTPGSTLTPPAVGLVHSGLLIGISIASLCLVVALLALLCHLRKKQGAARAKMEYKCAAPSKEVVLQHVRTERTPQRL

SEQ ID NO: 9883 - protein, 920 aa, Homo sapiens
MATVAANPAAAAAAVAAAAAVTEDREPQHEELPGLDSQWRQIENGESGRERPLRAGESWFLVEKHWYKQWEAYVQGGDQDSSTFPGCINNATLFQDEINWRLKEGLVEGEDYVLLPAAAWHYLVSWYGLEHGQPPIERKVIELPNIQKVEVYPVELLLVRHNDLGKSHTVQFSHTDSIGLVLRTARERFLVEPQEDTRLWAKNSEGSLDRLYDTHITVLDAALETGQLIIMETRKKDGTWPSAQLHVMNNNMSEEDEDFKGQPGICGLTNLGNTCFMNSALQCLSNVPQLTEYFLNNCYLEELNFRNPLGMKGEIAEAYADLVKQAWSGHHRSIVPHVFKNKVGHFASQFLGYQQHDSQELLSFLLDGLHEDLNRVKKKEYVELCDAAGRPDQEVAQEAWQNHKRRNDSVIVDTFHGLFKSTLVCPDCGNVSVTFDPFCYLSVPLPISHKRVLEVFFIPMDPRRKPEQHRLVVPKKGKISDLCVALSKHTGISPERMMVADVFSHRFYKLYQLEEPLSSILDRDDIFVYEVSGRIEAIEGSREDIVVPVYLRERTPARDYNNSYYGLMLFGHPLLVSVPRDRFTWEGLYNVLMYRLSRYVTKPNSDDEDDGDEKEDDEEDKDDVPGPSTGGSLRDPEPEQAGPSSGVTNRCPFLLDNCLGTSQWPPRRRRKQLFTLQTVNSNGTSDRTTSPEEVHAQPYIAIDWEPEMKKRYYDEVEAEGYVKHDCVGYVMKKAPVRLQECIELFTTVETLEKENPWYCPSCKQHQLATKKLDLWMLPEILIIHLKRFSYTKFSREKLDTLVEFPIRDLDFSEFVIQPQNESNPELYKYDLIAVSNHYGGMRDGHYTTFACNKDSGQWHYFDDNSVSPVNENQIESKAAYVLFYQRQDVARRLLSPAGSSGAPASPACSSPPSSEFMDVN

SEQ ID NO: 9884 - protein, 244 aa, Homo sapiens
MSAAAYMDFVAAQCLVSISNRAAVPEHGVAPDAERLRLPEREVTKEHGDPGDTWKDYCTLVTIAKSLLDLNKYRPIQTPSVCSDSLESPDEDMGSDSDVTTESGSSPSHSPEERQDPGSAPSPLSLLHPGVAAKGKHASEKRHKCPYSGCGKVYGKSSHLKAHYRVHTGERPFPCTWPDCLKKFSRSDELTRHYRTHTGEKQFRCPLCEKRFMRSDHLTKHARRHTEFHPSMIKRSKKALANAL

SEQ ID NO: 9885 - protein, 686 aa, Homo sapiens
MLLRGVLLALQALQLAGALDLPAGSCAFEESTCGFDSVLASLPWILNEEGHYIYVDTSFGKQGEKAVLLSPDLQAEEWSCLRLVYQITTSSESLSDPSQLNLYMRFEDESFDRLLWSAKEPSDSWLIASLDLQNSSKKFKILIEGVLGQGNTASIALFEIKMTTGYCIECDFEENHLCGFVNRWNPNVNWFVGGGSIRNVHSILPQDHTFKSELGHYMYVDSVYVKHFQEVAQLISPLTTAPMAGCLSFYYQIQQGNDNVFSLYTRDVAGLYEEIWKADRPGNAAWNLAEVEFSAPYPMEVIFEVAFNGPKGGYVALDDISFSPVHCQNQTELLFSAVEASCNFEQDLCNFYQDKEGPGWTRVKVKPNMYRAGDHTTGLGYYLLANTKFTSQPGYIGRLYGPSLPGNLQYCLRFHYAIYGFLKMSDTLAVYIFEENHVVQEKIWSVLESPRGVWMQAEITFKKPMPTKVVFMSLCKSFWDCGLVALDDITIQLGSCSSSEKLPPPPGECTFEQDECTFTQEKRNRSSWHRRRGETPTSYTGPKGDHTTGVGYYMYIEASHMVYGQKARLLSRPLRGVSGKHCLTFFYHMYGGGTGLLSVYLKKEEDSEESLLWRRRGEQSISWLRALIEYSCERQHQIIFEAIRGVSIRSDIAIDDVKFQAGPCGEMEDTTQQSSGYSEDLNEIEY

SEQ ID NO: 9886 - protein, 617 aa, Homo sapiens
MFRTAVMMAASLALTGAVVAHAYYLKHQFYPTVVYLTKSSPSMAVLYIQAFVLVFLLGKVMGKVFFGQLRAAEMEHLLERSWYAVTETCLAFTVFRDDFSPRFVALFTLLLFLKCFHWLAEDRVDFMERSPNISWLFHCRIVSLMFLLGILDFLFVSHAYHSILTRGASVQLVFGFEYAILMTMVLTIFIKYVLHSVDLQSENPWDNKAVYMLYTELFTGFIKVLLYMAFMTIMIKVHTFPLFAIRPMYLAMRQFKKAVTDAIMSRRAIRNMNTLYPDATPEELQAMDNVCIICREEMVTGAKRLPCNHIFHTSCLRSWFQRQQTCPTCRMDVLRASLPAQSPPPPEPADQGPPPAPHPPPLLPQPPNFPQGLLPPFPPGMFPLWPPMGPFPPVPPPPSSGEAVAPPSTSAAALSRPSGAATTTAAGTSATAASATASGPGSGSAPEAGPAPGFPFPPPWMGMPLPPPFAFPPMPVPPAGFAGLTPEELRALEGHERQHLEARLQSLRNIHTLLDAAMLQINQYLTVLASLGPPRPATSVNSTEETATTVVAAASSTSIPSSEATTPTPGASPPAPEMERPPAPESVGTEEMPEDGEPDAAELRRRRLQKLESPVAH

SEQ ID NO: 9887 - protein, 950 aa, Homo sapiens
MGVPAFFRWLSRKYPSIIVNCVEEKPKECNGVKIPVDASKPNPNDVEFDNLYLDMNGIIHPCTHPEDKPAPKNEDEMMVAIFEYIDRLFSIVRPRRLLYMAIDGVAPRAKMNQQRSRRFRASKEGMEAAVEKQRVREEILAKGGFLPPEEIKERFDSNCITPGTEFMDNLAKCLRYYIADRLNNDPGWKNLTVILSDASAPGEGEHKIMDYIRRQRAQPNHDPNTHHCLCGADADLIMLGLATHEPNFTIIREEFKPNKPKPCGLCNQFGHEVKDCEGLPREKKGKHDELADSLPCAEGEFIFLRLNVLREYLERELTMASLPFTFDVERSIDDWVFMCFFVGNDFLPHLPSLEIRENAIDRLVNIYKNVVHKTGGYLTESGYVNLQRVQMIMLAVGEVEDSIFKKRKDDEDSFRRRQKEKRKRMKRDQPAFTPSGILTPHALGSRNSPGSQVASNPRQAAYEMRMQNNSSPSISPNTSFTSDGSPSPLGGIKRKAEDSDSEPEPEDNVRLWEAGWKQRYYKNKFDVDAADEKFRRKVVQSYVEGLCWVLRYYYQGCASWKWYYPFHYAPFASDFEGIADMPSDFEKGTKPFKPLEQLMGVFPAASGNFLPPSWRKLMSDPDSSIIDFYPEDFAIDLNGKKYAWQGVALLPFVDERRLRAALEEVYPDLTPEETRRNSLGGDVLFVGKHHPLHDFILELYQTGSTEPVEVPPELCHGIQGKFSLDEEAILPDQIVCSPVPMLRDLTQNTVVSINFKDPQFAEDYIFKAVMLPGARKPAAVLKPSDWEKSSNGRQWKPQLGFNRDRRPVHLDQAAFRTLGHVMPRGSGTGIYSNAAPPPVTYQGNLYRPLLRGQAQIPKLMSNMRPQDSWRGPPPLFQQQRFDRGVGAEPLLPWNRMLQTQNAAFQPNQYQMLAGPGGYPPRRDDRGGRQGYPREGRKYPLPPPSGRYNWN

SEQ ID NO: 9888 - protein, 350 aa, Homo sapiens
MAETSEEVAVLVQRVVKDITNAFRRNPHMKELILSGTLNPIKDLHLGKLALTKFPKSPETWIHRRWVLQQLIQETSLPSFVTKGNLGTIPTERAQRLIQEEMEVCGEAAGRYPSNYNAWSHRIWVLQHLAKLDVKILLDELSSTKHWASMHVSDHSGFHYRQFLLKSLISQTVIDSSVMEQNPLRSEPALVPPKDEEAAVSTEEPRINLPHLLEEEVEFSTDLIDSYPGHETLWCHRRHIFYLQHHLNGRFPHSMTQLSPADSPGGTLSDLHLIPAGSQLSQAMEVDGLNDSSKQGYSQETKRLKRTPVPDSLGLEMEHRFIDQVLSTCRNVEQARFASAYRKWLVTLSQ

SEQ ID NO: 9889 - protein, 273 aa, Homo sapiens
MRLLVLLWGCLLLPGYEALEGPEEISGFEGDTVSLQCTYREELRDHRKYWCRKGGILFSRCSGTIYAEEEGQETMKGRVSIRDSRQELSLIVTLWNLTLQDAGEYWCGVEKRGPDESLLISLFVFPASPGLYPAATTAKQGKTGAEAPPLPGTSQYGHERTSQYTGTSPHPATSPPAGSSRPPMQLDSTSAEDTSPALSSGSSKPRVSIPMVRILAPVLVLLSLLSAAGLIAFCSHLLLWRKEAQQATETQRNEKFCLSRLNSLMFSLSLPWL

SEQ ID NO: 9890 - protein, 279 aa, Homo sapiens
MENSEKTEVVLLACGSFNPITNMHLRLFELAKDYMNGTGRYTVVKGIISPVGDAYKKKGLIPAYHRVIMAELATKNSKWVEVDTWESLQKEWKETLKVLRHHQEKLEASDCDHQQNSPTLERPGRKRKWTETQDSSQKKSLEPKTKAVPKVKLLCGADLLESFAVPNLWKSEDITQIVANYGLICVTRAGNDAQKFIYESDVLWKHRSNIHVVNEWIANDISSTKIRRALRRGQSIRYLVPDLVQEYIEKHNLYSSESEDRNAGVILAPLQRNTAEAKT

SEQ ID NO: 9891 - protein, 190 aa, Homo sapiens
MASRGKTETSKLKQNLEEQLDRLMQQLQDLEECREELDTDEYEETKKETLEQLSEFNDSLKKIMSGNMTLVDELSGMQLAIQAAISQAFKTPEVIRLFAKKQPGQLRTRLAEMDRDLMVGKLERDLYTQQKVEILTALRKLGEKLTADDEAFLSANAGAILSQFEKVSTDLGSGDKILALASFEVEKTKK

SEQ ID NO: 9892 - protein, 450 aa, Homo sapiens
MGEPRAGAALDDGSGWTGSEEGSEEGTGGSEGAGGDGGPDAEGVWSPDIEQSFQEALAIYPPCGRRKIILSDEGKMYGRNELIARYIKLRTGKTRTRKQVSSHIQVLARRKSREIQSKLKDQVSKDKAFQTMATMSSAQLISAPSLQAKLGPTGPQVVQASELFQFWSGGSGPPWNVPDVKPFSQTPFTLSLTPPSTDLPGYEPPQALSPLPPPTPSPPAWQARGLGTARLQLVEFSAFVEPPDAVDSYQRHLFVHISQHCPSPGAPPLESVDVRQIYDKFPEKKGGLRELYDRGPPHAFFLVKFWADLNWGPSGEEAGAGGSISSGGFYGVSSQYESLEHMTLTCSSKVCSFGKQVVEKVETERAQLEDGRFVYRLLRSPMCEYLVNFLHKLRQLPERYMMNSVLENFTILQVVTNRDTQELLLCTAYVFEVSTSERGAQHHIYRLVRD

SEQ ID NO: 9893 - protein, 719 aa, Homo sapiens
MPRRKKKVKEVSESRNLEKKDVETTSSVSVKRKRRLEDAFIVISDSDGEEPKEENGLQKTKTKQSNRAKCLAKRKIAQMTEEEQFALALKMSEQEAREVNSQEEEEEELLRKAIAESLNSCRPSDASATRSRPLATGPSSQSHQEKTTDSGLTEGIWQLVPPSLFKGSHISQGNEAEEREEPWDHTEKTEEEPVSGSSGSWDQSSQPVFENVNVKSFDRCTGHSAEHTQCGKPQESTGRGSAFLKAVQGSGDTSRHCLPTLADAKGLQDTGGTVNYFWGIPFCPDGVDPNQYTKVILCQLEVYQKSLKMAQRQLLNKKGFGEPVLPRPPSLIQNECGQGEQASEKNECISEDMGDEDKEERQESRASDWHSKTKDFQESSIKSLKEKLLLEEEPTTSHGQSSQGIVEETSEEGNSVPASQSVAALTSKRSLVLMPESSAEEITVCPETQLSSSETFDLEREVSPGSRDILDGVRIIMADKEVGNKEDAEKEVAISTFSSSNQVSCPLCDQCFPPTKIERHAMYCNGLMEEDTVLTRRQKEAKTKSDSGTAAQTSLDIDKNEKCYLCKSLVPFREYQCHVDSCLQLAKADQGDGPEGSGRACSTVEGKWQQRLKNPKEKGHSEGRLLSFLEQSEHKTSDADIKSSETGAFRVPSPGMEEAGCSREMQSSFTRRDLNESPVKSFVSISEATDCLVDFKKQVTVQPGSRTRTKAGRGRRRKF

SEQ ID NO: 9894 - protein, 480 aa, Homo sapiens
MARFPKADLAAAGVMLLCHFFTDQFQFADGKPGDQILDWQYGVTQAFPHTEEEVEVDSHAYSHRWKRNLDFLKAVDTNRASVGQDSPEPRSFTDLLLDDGQDNNTQIERVNLSFDFPFYGHFLREITVATGGFIYTGEVVHRMLTATQYIAPLMANFDPSVSRNSTVRYFDNGTALVVQWDHVHLQDNYNLGSFTFQATLLMDGRIIFGYKEIPVLVTQISSTNHPVKVGLSDAFVVVHRIQQIPNVRRRTIYEYHRVELQMSKITNISAVEMTPLPTCLQFNRCGPCVSSQIGFNCSWCSKLQRCSSGFDRHRQDWVDSGCPEESKEKMCENTEPVETSSRTTTTVGATTTQFRVLTTTRRAVTSQFPTSLPTEDDTKIALHLKDNGASTDDSAAEKKGGTLHAGLIIGILILVLIVATAILVTVYMYHHPTSAASIFFIERRPSRWPAMKFRRGSGHPAYAEVEPVGEKEGFIVSEQC

SEQ ID NO: 9895 - protein, 342 aa, Homo sapiens
MSRQAKDDFLRHYTVSDPRTHPKGYTEYKVTAQFISKKDPEDVKEVVVWKRYSDFRKLHGDLAYTHRNLFRRLEEFPAFPRAQVFGRFEASVIEERRKGAEDLLRFTVHIPALNNSPQLKEFFRGGEVTRPLEVSRDLHILPPPLIPTPPPDDPRLSQLLPAERRGLEELEVPVDPPPSSPAQEALDLLFNCESTEEASGSPARGPLTEAELALFDPFSKEEGAAPSPTHVAELATMEVESARLDQEPWEPGGQEEEEDGEGGPTPAYLSQATELITQALRDEKAGAYAAALQGYRDGVHVLLQGVPSDPLPARQEGVKKKAAEYLKRAEEILRLHLSQLPP

SEQ ID NO: 9896 - protein, 1190 aa, Homo sapiens
MPVRGDRGFPPRRELSGWLRAPGMEELIWEQYTVTLQKDSKRGFGIAVSGGRDNPHFENGETSIVISDVLPGGPADGLLQENDRVVMVNGTPMEDVLHSFAVQQLRKSGKVAAIVVKRPRKVQVAALQASPPLDQDDRAFEVMDEFDGRSFRSGYSERSRLNSHGGRSRSWEDSPERGRPHERARSRERDLSRDRSRGRSLERGLDQDHARTRDRSRGRSLERGLDHDFGPSRDRDRDRSRGRSIDQDYERAYHRAYDPDYERAYSPEYRRGARHDARSRGPRSRSREHPHSRSPSPEPRGRPGPIGVLLMKSRANEEYGLRLGSQIFVKEMTRTGLATKDGNLHEGDIILKINGTVTENMSLTDARKLIEKSRGKLQLVVLRDSQQTLINIPSLNDSDSEIEDISEIESNRSFSPEERRHQYSDYDYHSSSEKLKERPSSREDTPSRLSRMGATPTPFKSTGDIAGTVVPETNKEPRYQEDPPAPQPKAAPRTFLRPSPEDEAIYGPNTKMVRFKKGDSVGLRLAGGNDVGIFVAGIQEGTSAEQEGLQEGDQILKVNTQDFRGLVREDAVLYLLEIPKGEMVTILAQSRADVYRDILACGRGDSFFIRSHFECEKETPQSLAFTRGEVFRVVDTLYDGKLGNWLAVRIGNELEKGLIPNKSRAEQMASVQNAQRDNAGDRADFWRMRGQRSGVKKNLRKSREDLTAVVSVSTKFPAYERVLLREAGFKRPVVLFGPIADIAMEKLANELPDWFQTAKTEPKDAGSEKSTGVVRLNTVRQIIEQDKHALLDVTPKAVDLLNYTQWFPIVIFFNPDSRQGVKTMRQRLNPTSNKSSRKLFDQANKLKKTCAHLFTATINLNSANDSWFGSLKDTIQHQQGEAVWVSEGKMEGMDDDPEDRMSYLTAMGADYLSCDSRLISDFEDTDGEGGAYTDNELDEPAEEPLVSSITRSSEPVQHEESIRKPSPEPRAQMRRAASSDQLRDNSPPPAFKPEPPKAKTQNKEESYDFSKSYEYKSNPSAVAGNETPGASTKGYPPPVAAKPTFGRSILKPSTPIPPQEGEEVGESSEEQDNAPKSVLGKVKIFEKMDHKARLQRMQELQEAQNARIEIAQKHPDIYAVPIKTHKPDPGTPQHTSSRPPEPQKAPSRPYQDTRGSYGSDAEEEEYRQQLSEHSKRGYYGQSARYRDTEL

SEQ ID NO: 9897 - protein, 529 aa, Homo sapiens
MARFPKADLAAAGVMLLCHFFTDQFQFADGKPGDQILDWQYGVTQAFPHTEEEVEVDSHAYSHRWKRNLDFLKAVDTNRASVGQDSPEPRSFTDLLLDDGQDNNTQIEEDTDHNYYISRIYGPSDSASRDLWVNIDQMEKDKVKIHGILSNTHRQAARVNLSFDFPFYGHFLREITVATGGFIYTGEVVHRMLTATQYIAPLMANFDPSVSRNSTVRYFDNGTALVVQWDHVHLQDNYNLGSFTFQATLLMDGRIIFGYKEIPVLVTQISSTNHPVKVGLSDAFVVVHRIQQIPNVRRRTIYEYHRVELQMSKITNISAVEMTPLPTCLQFNRCGPCVSSQIGFNCSWCSKLQRCSSGFDRHRQDWVDSGCPEESKEKMCENTEPVETSSRTTTTVGATTTQFRVLTTTRRAVTSQFPTSLPTEDDTKIALHLKDNGASTDDSAAEKKGGTLHAGLIIGILILVLIVATAILVTVYMYHHPTSAASIFFIERRPSRWPAMKFRRGSGHPAYAEVEPVGEKEGFIVSEQC

SEQ ID NO: 9898 - protein, 81 aa, Homo sapiens
MNREGAPGKSPEEMYIQQKVRVLLMLRKMGSNLTASEEEFLRTYAGVVNSQLSQLPPHSIDQGAEDVVMAFSRSETEDRRQ

SEQ ID NO: 9899 - protein, 255 aa, Homo sapiens
MPREDRATWKSNYFLKIIQLLDDYPKCFIVGADNVGSKQMQQIRMSLRGKAVVLMGKNTMMRKAIRGHLENNPALEKLLPHIRGNVGFVFTKEDLTEIRDMLLANKVPAAARAGAIAPCEVTVPAQNTGLGPEKTSFFQALGITTKISRGTIEILGVRNVASVCLQIGYPTVASVPHSIINGYKRVLALSVETDYTFPLAEKVKAFLADPSAFVAAAPVAAATTAAPAAAAAPAKVEAKEESEESDEDMGFGLFD

SEQ ID NO: 9900 - protein, 179 aa, Homo sapiens
MGLIFAKLWSLFCNQEHKVIIVGLDNAGKTTILYQFLMNEVVHTSPTIGSNVEEIVVKNTHFLMWDIGGQESLRSSWNTYYSNTEFIILVVDSIDRERLAITKEELYRMLAHEDLRKAAVLIFANKQDMKGCMTAAEISKYLTLSSIKDHPWHIQSCCALTGEGLCQGLEWMTSRIGVR

SEQ ID NO: 9901 - protein, 165 aa, Homo sapiens
MEMFQGLLLLLLLSMGGTWASREMLRPRCRPINATLAVEKEGCPVCITVNTTICAGYCPTMTRVLQGVLPALPQVVCNYRDVRFESIRLPGCPRGVNPVVSYAVALSCQCALCRRSTTDCGGPKDHPLTCDDPRFQASSSSKAPPPSLPSPSRLPGPSDTPILPQ

SEQ ID NO: 9902 - protein, 981 aa, Homo sapiens
MLRRPAPALAPAARLLLAGLLCGGGVWAARVNKHKPWLEPTYHGIVTENDNTVLLDPPLIALDKDAPLRFAESFEVTVTKEGEICGFKIHGQNVPFDAVVVDKSTGEGVIRSKEKLDCELQKDYSFTIQAYDCGKGPDGTNVKKSHKATVHIQVNDVNEYAPVFKEKSYKATVIEGKQYDSILRVEAVDADCSPQFSQICSYEIITPDVPFTVDKDGYIKNTEKLNYGKEHQYKLTVTAYDCGKKRATEDVLVKISIKPTCTPGWQGWNNRIEYEPGTGALAVFPNIHLETCDEPVASVQATVELETSHIGKGCDRDTYSEKSLHRLCGAAAGTAELLPSPSGSLNWTMGLPTDNGHDSDQVFEFNGTQAVRIPDGVVSVSPKEPFTISVWMRHGPFGRKKETILCSSDKTDMNRHHYSLYVHGCRLIFLFRQDPSEEKKYRPAEFHWKLNQVCDEEWHHYVLNVEFPSVTLYVDGTSHEPFSVTEDYPLHPSKIETQLVVGACWQEFSGVENDNETEPVTVASAGGDLHMTQFFRGNLAGLTLRSGKLADKKVIDCLYTCKEGLDLQVLEDSGRGVQIQAHPSQLVLTLEGEDLGELDKAMQHISYLNSRQFPTPGIRRLKITSTIKCFNEATCISVPPVDGYVMVLQPEEPKISLSGVHHFARAASEFESSEGVFLFPELRIISTITREVEPEGDGAEDPTVQESLVSEEIVHDLDTCEVTVEGEELNHEQESLEVDMARLQQKGIEVSSSELGMTFTGVDTMASYEEVLHLLRYRNWHARSLLDRKFKLICSELNGRYISNEFKVEVNVIHTANPMEHANHMAAQPQFVHPEHRSFVDLSGHNLANPHPFAVVPSTATVVIVVCVSFLVFMIILGVFRIRAAHRRTMRDQDTGKENEMDWDDSALTITVNPMETYEDQHSSEEEEEEEEEEESEDGEEEDDITSAESESSEEEEGEQGDPQNATRQQQLEWDDSTLSY

SEQ ID NO: 9903 - protein, 469 aa, Homo sapiens
MSIFPKISLRPEVENYLKEGFMNKEIVTALGKQEAERKFETLLKHLSHPPSFTTVRVNTHLASVQHVKNLLLDELQKQFNGLSVPILQHPDLQDVLLIPVIGPRKNIKKQQCEAIVGAQCGNAVLRGAHVYAPGIVSASQFMKAGDVISVYSDIKGKCKKGAKEFDGTKVFLGNGISELSRKEIFSGLPELKGMGIRMTEPVYLSPSFDSVLPRYLFLQNLPSALVSHVLNPQPGEKILDLCAAPGGKTTHIAALMHDQGEVIALDKIFNKVEKIKQNALLLGLNSIRAFCFDGTKAVKLDMVEDTEGEPPFLPESFDRILLDAPCSGMGQRPNMACTWSVKEVASYQPLQRKLFTAAVQLLKPEGVLVYSTCTITLAENEEQVAWALTKFPCLQLQPQEPQIGGEGMRGAGLSCEQLKQLQRFDPSAVPLPDTDMDSLREARREDMLRLANKDSIGFFIAKFVKCKST

SEQ ID NO: 9904 - protein, 606 aa, Homo sapiens
MLDRRLIAPQTKYIIPGGSADSYTSRPSDSDVSLEEDREAVRREAERQAQAQLEKAKTKPVAFAVRTNVSYSAAHEDDVPVPGMAISFEAKDFLHVKEKFNNDWWIGRLVKEGCEIGFIPSPVKLENMRLQHEQRAKQGKFYSSKSGGNSSSSLGDIVPSSRKSTPPSSAIDIDATGLDAEENDIPANHRSPKPSANSVTSPHSKEKRMPFFKKTEHTPPYDVVPSMRPVVLVGPSLKGYEVTDMMQKALFDFLKHRFEGRISITRVTADISLAKRSVLNNPSKHAIIERSNTRSSLAEVQSEIERIFELARTLQLVVLDADTINHPAQLSKTSLAPIIVYVKISSPKVLQRLIKSRGKSQAKHLNVQMVAADKLAQCPPELFDVILDENQLEDACEHLADYLEAYWKATHPPSSSLPNPLLSRTLATSSLPLSPTLASNSQGSQGDQRTDRSAPIRSASQAEEEPSVEPVKKSQHRSSSSAPHHNHRSGTSRGLSRQETFDSETQESRDSAYVEPKEDYSHDHVDHYASHRDHNHRDETHGSSDHRHRESRHRSRDVDREQDHNECNKQRSRHKSKDRYCEKDGEVISKKRNEAGEWNRDVYIRQ

SEQ ID NO: 9905 - protein, 1044 aa, Homo sapiens
MPPGVDCPMEFWTKEENQSVVVDFLLPTGVYLNFPVSRNANLSTIKQLLWHRAQYEPLFHMLSGPEAYVFTCINQTAEQQELEDEQRRLCDVQPFLPVLRLVAREGDRVKKLINSQISLLIGKGLHEFDSLCDPEVNDFRAKMCQFCEEAAARRQQLGWEAWLQYSFPLQLEPSAQTWGPGTLRLPNRALLVNVKFEGSEESFTFQVSTKDVPLALMACALRKKATVFRQPLVEQPEDYTLQVNGRHEYLYGSYPLCQFQYICSCLHSGLTPHLTMVHSSSILAMRDEQSNPAPQVQKPRAKPPPIPAKKPSSVSLWSLEQPFRIELIQGSKVNADERMKLVVQAGLFHGNEMLCKTVSSSEVSVCSEPVWKQRLEFDINICDLPRMARLCFALYAVIEKAKKARSTKKKSKKADCPIAWANLMLFDYKDQLKTGERCLYMWPSVPDEKGELLNPTGTVRSNPNTDSAAALLICLPEVAPHPVYYPALEKILELGRHSECVHVTEEEQLQLREILERRGSGELYEHEKDLVWKLRHEVQEHFPEALARLLLVTKWNKHEDVAQMLYLLCSWPELPVLSALELLDFSFPDCHVGSFAIKSLRKLTDDELFQYLLQLVQVLKYESYLDCELTKFLLDRALANRKIGHFLFWHLRSEMHVPSVALRFGLILEAYCRGSTHHMKVLMKQGEALSKLKALNDFVKLSSQKTPKPQTKELMHLCMRQEAYLEALSHLQSPLDPSTLLAEVCVEQCTFMDSKMKPLWIMYSNEEAGSGGSVGIIFKNGDDLRQDMLTLQMIQLMDVLWKQEGLDLRMTPYGCLPTGDRTGLIEVVLRSDTIANIQLNKSNMAATAAFNKDALLNWLKSKNPGEALDRAIEEFTLSCAGYCVATYVLGIGDRHSDNIMIRESGQLFHIDFGHFLGNFKTKFGINRERVPFILTYDFVHVIQQGKTNNSEKFERFRGYCERAYTILRRHGLLFLHLFALMRAAGLPELSCSKDIQYLKDSLALGKTEEEALKHFRVKFNEALRESWKTKVNWLAHNVSKDNRQ

SEQ ID NO: 9906 - protein, 233 aa, Homo sapiens
MFHGIPATPGIGAPGNKPELYEEVKLYKNAREREKYDNMAELFAVVKTMQALEKAYIKDCVSPSEYTAACSRLLVQYKAAFRQVQGSEISSIDEFCRKFRLDCPLAMERIKEDRPITIKDDKGNLNRCIADVVSLFITVMDKLRLEIRAMDEIQPDLRELMETMHRMSHLPPDFEGRQTVSQWWVSLPARQSPAVPETLPARRSPAVPLRPSAPTCPVLHSQAADPERHVGVR

SEQ ID NO: 9907 - protein, 812 aa, Homo sapiens
MALLRDVSLQDPRDRFELLQRVGAGTYGDVYKARDTVTSELAAVKIVKLDPGDDISSLQQEITILRECRHPNVVAYIGSYLRNDRLWICMEFCGGGSLQEIYHATGPLEERQIAYVCREALKGLHHLHSQGKIHRDIKGANLLLTLQGDVKLADFGVSGELTASVAKRRSFIGTPYWMAPEVAAVERKGGYNELCDVWALGITAIELGELQPPLFHLHPMRALMLMSKSSFQPPKLRDKTRWTQNFHHFLKLALTKNPKKRPTAEKLLQHPFTTQQLPRALLTQLLDKASDPHLGTPSPEDCELETYDMFPDTIHSRGQHGPAERTPSEIQFHQVKFGAPRRKETDPLNEPWEEEWTLLGKEELSGSLLQSVQEALEERSLTIRSASEFQELDSPDDTMGTIKRAPFLGPLPTDPPAEEPLSSPPGPNSSPLLPTAWATMKQREDPERSSCHGLPPTPKVHMGACFSKVFNGCPLRIHAAVTWIHPVTRDQFLVVGAEEGIYTLNLHELHEDTLEKLISHRCSWLYCVNNVLLSLSGKSTHIWAHDLPGLFEQRRLQQQVPLSIPTNRLTQRIIPRRFALSTKIPDTKGCLQCRVVRNPYTGATFLLAALPTSLLLLQWYEPLQKFLLLKNFSSPLPSPAGMLEPLVLDGKELPQVCVGAEGPEGPGCRVLFHVLPLEAGLTPDILIPPEGIPGSAQQVIQVDRDTILVSFERCVRIVNMQGEPTATLAPELTFDFPIETVVCLQDSVLAFWSHGMQGRSLDTNEVTQEITDETRIFRVLGAHRDIILESIPTDNPEAHSNLYILTGHQSTY

SEQ ID NO: 9908 - protein, 691 aa, Homo sapiens
MCFRTKLSVSWVPLFLLLSRVFSTETDKPSAQDSRSRGSSGQPADLLQVLSAGDHPPHNHSRSLIKTLLEKTGCPRRRNGMQGDCNLCFEPDALLLIAGGNFEDQLREEVVQRVSLLLLYYIIHQEEICSSKLNMSNKEYKFYLHSLLSLRQDEDSSFLSQNETEDILAFTRQYFDTSQSQCMETKTLQKKSGIVSSEGANESTLPQLAAMIITLSLQGVCLGQGNLPSPDYFTEYIFSSLNRTNTLRLSELDQLLNTLWTRSTCIKNEKIHQFQRKQNNIITHDQDYSNFSSSMEKESEDGPVSWDQTCFSARQLVEIFLQKGLSLISKEDFKQMSPGIIQQLLSCSCHLPKDQQAKLPPTTLEKYGYSTVAVTLLTLGSMLGTALVLFHSCEENYRLILQLFVGLAVGTLSGDALLHLIPQVLGLHKQEAPEFGHFHESKGHIWKLMGLIGGIHGFFLIEKCFILLVSPNDKQGLSLVNGHVGHSHHLALNSELSDQAGRGKSASTIQLKSPEDSQAAEMPIGSMTASNRKCKAISLLAIMILVGDSLHNFADGLAIGAAFSSSSESGVTTTIAILCHEIPHEMGDFAVLLSSGLSMKTAILMNFISSLTAFMGLYIGLSVSADPCVQDWIFTVTAGMFLYLSLVEMLPEMTHVQTQRPWMMFLLQNFGLILGWLSLLLLAIYEQNIKI

SEQ ID NO: 9909 - protein, 690 aa, Homo sapiens
MCFRTKLSVSWVPLFLLLSRVFSTETDKPSAQDSRSRGSSGQPADLLQVLSAGDHPPHNHSRSLIKTLLEKTGCPRRRNGMQGDCNLCFEPDALLLIAGGNFEDQLREEVVQRVSLLLLYYIIHQEEICSSKLNMSNKEYKFYLHSLLSLRQDEDSSFLSQNETEDILAFTRQYFDTSQSQCMETKTLQKKSGIVSSEGANESTLPQLAAMIITLSLQGVCLGQGNLPSPDYFTEYIFSSLNRTNTLRLSELDQLLNTLWTRSTCIKNEKIHQFQRKQNNIITHDQDYSNFSSSMEKESEDGPVSWDQTCFSARQLVEIFLQKGLSLISKEDFKQMSPGIIQQLLSCSCHLPKDQQAKLPPTTLEKYGYSTVAVTLLTLGSMLGTALVLFHSCEENYRLILQLFVGLAVGTLSGDALLHLIPQVLGLHKQEAPEFGHFHESKGHIWKLMGLIGGIHGFFLIEKCFILLVSPNDKGLSLVNGHVGHSHHLALNSELSDQAGRGKSASTIQLKSPEDSQAAEMPIGSMTASNRKCKAISLLAIMILVGDSLHNFADGLAIGAAFSSSSESGVTTTIAILCHEIPHEMGDFAVLLSSGLSMKTAILMNFISSLTAFMGLYIGLSVSADPCVQDWIFTVTAGMFLYLSLVEMLPEMTHVQTQRPWMMFLLQNFGLILGWLSLLLLAIYEQNIKI

SEQ ID NO: 9910 - protein, 654 aa, Homo sapiens
MCFRTKLSVSWVPLFLLLSRVFSTETDKPSAQDSRSRGSSGQPADLLQVLSAGDHPPHNHSRSLIKTLLEKTGCPRRRNGMQGDCNLCFEPDALLLIAGGNFEDQLREEVVQRVSLLLLYYIIHQEEICSSKLNMSNKEYKFYLHSLLSLRQDEDSSFLSQNETEDILAFTRQYFDTSQSQCMETKTLQKKSGIVSSEGANESTLPQLAAMIITLSLQGVCLGQGNLPSPDYFTEYIFSSLNRTNTLRLSELDQLLNTLWTRSTCIKNEKIHQFQRKQNNIITHDQDYSNFSSSMEKESEDGPVSWDQTCFSARQLVEIFLQKGLSLISKEDFKQMSPGIIQQLLSCSCHLPKDQQAKLPPTTLEKYGYSTVAVTLLTLGSMLGTALVLFHSCEENYRLILQLFVGLAVGTLSGDALLHLIPQVLGLHKQEAPEFGHFHESKGHIWKLMGLIGGIHGFFLIEKCFILLVSPNDKKSPEDSQAAEMPIGSMTASNRKCKAISLLAIMILVGDSLHNFADGLAIGAAFSSSSESGVTTTIAILCHEIPHEMGDFAVLLSSGLSMKTAILMNFISSLTAFMGLYIGLSVSADPCVQDWIFTVTAGMFLYLSLVEMLPEMTHVQTQRPWMMFLLQNFGLILGWLSLLLLAIYEQNIKI

SEQ ID NO: 9911 - protein, 437 aa, Homo sapiens
MRFVVALVLLNVAAAGAVPLLATESVKQEEAGVRPSAGNVSTHPSLSQRPGGSTKSHPEPQTPKDSPSKSSAEAQTPEDTPNKSGAEAKTQKDSSNKSGAEAKTQKGSTSKSGSEAQTTKDSTSKSHPELQTPKDSTGKSGAEAQTPEDSPNRSGAEAKTQKDSPSKSGSEAQTTKDVPNKSGADGQTPKDGSSKSGAEDQTPKDVPNKSGAEKQTPKDGSNKSGAEEQGPIDGPSKSGAEEQTSKDSPNKVVPEQPSRKDHSKPISNPSDNKELPKADTNQLADKGKLSPHAFKTESGEETDLISPPQEEVKSSEPTEDVEPKEAEDDDTGPEEGSPPKEEKEKMSGSASSENREGTLSDSTGSEKDDLYPNGSGNGSAESSHFFAYLVTAAILVAVLYIAHHNKRKIIAFVLEGKRSKVTRRPKASDYQRLDQKS

SEQ ID NO: 9912 - protein, 673 aa, Homo sapiens
MATGANATPLGKLGPPGLPPLPGPKGGFEPGPPPAPGPGAGLLAPGPPPPPPVGSMGALTAAFPFAALPPPPPPPPPPPPQQPPPPPPPPSPGASYPPPQPPPPPPLYQRVSPPQPPPPQPPRKDQQPGPAGGGGDFPSKKRKRSRWNQDTMEQKTVIPGMPTVIPPGLTREQERAYIVQLQIEDLTRKLRTGDLGIPPNPEDRSPSPEPIYNSEGKRLNTREFRTRKKLEEERHNLITEMVALNPDFKPPADYKPPATRVSDKVMIPQDEYPEINFVGLLIGPRGNTLKNIEKECNAKIMIRGKGSVKEGKVGRKDGQMLPGEDEPLHALVTANTMENVKKAVEQIRNILKQGIETPEDQNDLRKMQLRELARLNGTLREDDNRILRPWQSSETRSITNTTVCTKCGGAGHIASDCKFQRPGDPQSAQDKARMDKEYLSLMAELGEAPVPASVGSTSGPATTPLASAPRPAAPANNPPPPSLMSTTQSRPPWMNSGPSESRPYHGMHGGGPGGPGGGPHSFPHPLPSLTGGHGGHPMQHNPNGPPPPWMQPPPPPMNQGPHPPGHHGPPPMDQYLGSTPVGSGVYRLHQGKGMMPPPPMGMMPPPPPPPSGQPPPPPSGPLPPWQQQQQQPPPPPPPSSSMASSTPLPWQQRSLPAAAMARAMRVRTFRAHW

SEQ ID NO: 9913 - protein, 639 aa, Homo sapiens
MATGANATPLDFPSKKRKRSRWNQDTMEQKTVIPGMPTVIPPGLTREQERAYIVQLQIEDLTRKLRTGDLGIPPNPEDRSPSPEPIYNSEGKRLNTREFRTRKKLEEERHNLITEMVALNPDFKPPADYKPPATRVSDKVMIPQDEYPEINFVGLLIGPRGNTLKNIEKECNAKIMIRGKGSVKEGKVGRKDGQMLPGEDEPLHALVTANTMENVKKAVEQIRNILKQGIETPEDQNDLRKMQLRELARLNGTLREDDNRILRPWQSSETRSITNTTVCTKCGGAGHIASDCKFQRPGDPQSAQDKARMDKEYLSLMAELGEAPVPASVGSTSGPATTPLASAPRPAAPANNPPPPSLMSTTQSRPPWMNSGPSESRPYHGMHGGGPGGPGGGPHSFPHPLPSLTGGHGGHPMQHNPNGPPPPWMQPPPPPMNQGPHPPGHHGPPPMDQYLGSTPVGSGVYRLHQGKGMMPPPPMGMMPPPPPPPSGQPPPPPSGPLPPWQQQQQQPPPPPPPSSSMASSTPLPWQQNTTTTTTSAGTGSIPPWQQQQAAAAASPGAPQMQGNPTMVPLPPGVQPPLPPGAPPPPPPPPPGSAGMMYAPPPPPPPPMDPSNFVTMMGMGVAGMPPFGMPPAPPPPPPQN

SEQ ID NO: 9914 - protein, 571 aa, Homo sapiens
MATGANATPLDFPSKKRKRSRWNQDTMEQKTVIPGMPTVIPPGLTREQERAYIVQLQIEDLTRKLRTGDLGIPPNPEDRSPSPEPIYNSEGKRLNTREFRTRKKLEEERHNLITEMVALNPDFKPPADYKPPATRVSDKVMIPQDEYPEINFVGLLIGPRGNTLKNIEKECNAKIMIRGKGSVKEGKVGRKDGQMLPGEDEPLHALVTANTMENVKKAVEQIRNILKQGIETPEDQNDLRKMQLRELARLNGTLREDDNRILRPWQSSETRSITNTTVCTKCGGAGHIASDCKFQRPGDPQSAQDKARMDKEYLSLMAELGEAPVPASVGSTSGPATTPLASAPRPAAPANNPPPPSLMSTTQSRPPWMNSGPSESRPYHGMHGGGPGGPGGGPHSFPHPLPSLTGGHGGHPMQHNPNGPPPPWMQPPPPPMNQGPHPPGHHGPPPMGKSVPGKYACGLWGLSPASRKRYDAATTYGHDAAAAAASQWAAPTPSLWSSSPMATTAAAASATPSAQQQYGFQYPLAMAAKIPPRGGDGPSHESEDFPRPLVTLPGRQPQQRPWWTGWFGKAA

SEQ ID NO: 9915 - protein, 791 aa, Homo sapiens
MWNMLIVAMCLALLGCLQAQELQGHVSIILLGATGDLAKKYLWQGLFQLYLDEAGRGHSFSFHGAALTAPKQGQELMAKALESLSCPKDMAPSHCAEHKDQFLQLSQYRQLKTAEDYQALNKDIEAQLQHAGLREAGRIFYFSVPPFAYEDIARNINSSCRPGPGAWLRVVLEKPFGHDHFSAQQLATELGTFFQEEEMYRVDHYLGKQAVAQILPFRDQNRKALDGLWNRHHVERVEIIMKETVDAEGRTSFYEEYGVIRDVLQNHLTEVLTLVAMELPHNVSSAEAVLRHKLQVFQALRGLQRGSAVVGQYQSYSEQVRRELQKPDSFHSLTPTFAAVLVHIDNLRWEGVPFILMSGKALDERVGYARILFKNQACCVQSEKHWAAAQSQCLPRQLVFHIGHGDLGSPAVLVSRNLFRPSLPSSWKEMEGPPGLRLFGSPLSDYYAYSPVRERDAHSVLLSHIFHGRKNFFITTENLLASWNFWTPLLESLAHKAPRLYPGGAENGRLLDFEFSSGRLFFSQQQPEQLVPGPGPAPMPSDFQVLRAKYRESPLVSAWSEELISKLANDIEATAVRAVRRFGQFHLALSGGSSPVALFQQLATAHYGFPWAHTHLWLVDERCVPLSDPESNFQGLQAHLLQHVRIPYYNIHPMPVHLQQRLCAEEDQGAQIYAREISALVANSSFDLVLLGMGADGHTASLFPQSPTGLDGEQLVVLTTSPSQPHRRMSLSLPLINRAKKVAVLVMGRMKREITTLVSRVGHEPKKWPISGVLPHSGQLVWYMDYDAFLG

SEQ ID NO: 9916 - protein, 335 aa, Homo sapiens
MQPSPPPTELVPSERAVVLLSCALSALGSGLLVATHALWPDLRSRARRLLLFLSLADLLSAASYFYGVLQNFAGPSWDCVLQGALSTFANTSSFFWTVAIALYLYLSIVRAARGPRTDRLLWAFHVVSWGVPLVITVAAVALKKIGYDASDVSVGWCWIDLEAKDHVLWMLLTGKLWEMLAYVLLPLLYLLVRKHINRAHTALSEYRPILSQEHRLLRHSSMADKKLVLIPLIFIGLRVWSTVRFVLTLCGSPAVQTPVLVVLHGIGNTFQGGANCIMFVLCTRAVRTRLFSLCCCCCSSQPPTKSPAGTPKAPAPSKPGESQESQGTPGELPST

SEQ ID NO: 9917 - protein, 501 aa, Homo sapiens
MEQQDQSMKEGRLTLVLALATLIAAFGSSFQYGYNVAAVNSPALLMQQFYNETYYGRTGEFMEDFPLTLLWSVTVSMFPFGGFIGSLLVGPLVNKFGRKGALLFNNIFSIVPAILMGCSRVATSFELIIISRLLVGICAGVSSNVVPMYLGELAPKNLRGALGVVPQLFITVGILVAQIFGLRNLLANVDGWPILLGLTGVPAALQLLLLPFFPESPRYLLIQKKDEAAAKKALQTLRGWDSVDREVAEIRQEDEAEKAAGFISVLKLFRMRSLRWQLLSIIVLMGGQQLSGVNAIYYYADQIYLSAGVPEEHVQYVTAGTGAVNVVMTFCAVFVVELLGRRLLLLLGFSICLIACCVLTAALALQDTVSWMPYISIVCVISYVIGHALGPSPIPALLITEIFLQSSRPSAFMVGGSVHWLSNFTVGLIFPFIQEGLGPYSFIVFAVICLLTTIYIFLIVPETKAKTFIEINQIFTKMNKVSEVYPEKEELKELPPVTSEQ

SEQ ID NO: 9918 - protein, 313 aa, Homo sapiens
MRALVLLLSLFLLGGQAQHVSDWTYSEGALDEAHWPQHYPACGGQRQSPINLQRTKVRYNPSLKGLNMTGYETQAGEFPMVNNGHTVQISLPSTMRMTVADGTVYIAQQMHFHWGGASSEISGSEHTVDGIRHVIEIHIVHYNSKYKSYDIAQDAPDGLAVLAAFVEVKNYPENTYYSNFISHLANIKYPGQRTTLTGLDVQDMLPRNLQHYYTYHGSLTTPPCTENVHWFVLADFVKLSRTQVWKLENSLLDHRNKTIHNDYRRTQPLNHRVVESNFPNQGKGHGGHRGRSQNPRVQPTSTRHPLALGSLEA

SEQ ID NO: 9919 - protein, 248 aa, Homo sapiens
MRALVLLLSLFLLGGQAQHVSDWTYSVQISLPSTMRMTVADGTVYIAQQMHFHWGGASSEISGSEHTVDGIRHVIEIHIVHYNSKYKSYDIAQDAPDGLAVLAAFVEVKNYPENTYYSNFISHLANIKYPGQRTTLTGLDVQDMLPRNLQHYYTYHGSLTTPPCTENVHWFVLADFVKLSRTQVWKLENSLLDHRNKTIHNDYRRTQPLNHRVVESNFPNQEYTLGSEFQFYLHKIEEILDYLRRALN

SEQ ID NO: 9920 - protein, 308 aa, Homo sapiens
MRALVLLLSLFLLGGQAQHVSDWTYSEGALDEAHWPQHYPACGGQRQSPINLQRTKVRYNPSLKGLNMTGYETQAGEFPMVNNGHTVQISLPSTMRMTVADGTVYIAQQMHFHWGGASSEISGSEHTVDGIRHVIEIHIVHYNSKYKSYDIAQDAPDGLAVLAAFVEVKNYPENTYYSNFISHLANIKYPGQRTTLTGLDVQDMLPRNLQHYYTYHGSLTTPPCTENVHWFVLADFVKLSRTQVWKLENSLLDHRNKTIHNDYRRTQPLNHRVVESNFPNQEYTLGSEFQFYLHKIEEILDYLRRALN

SEQ ID NO: 9921 - protein, 209 aa, Homo sapiens
MKAVVQRVTRASVTVGGEQISAIGRGICVLLGISLEDTQKELEHMVRKILNLRVFEDESGKHWSKSVMDKQYEILCVSQFTLQCVLKGNKPDFHLAMPTEQAEGFYNSFLEQLRKTYRPELIKDGKFGAYMQVHIQNDGPVTIELESPAPGTATSDPKQLSKLEKQQQRKEKTRAKGPSESSKERNTPRKEDRSASSGAEGDVSSEREP

SEQ ID NO: 9922 - protein, 358 aa, Homo sapiens
MAQEVDTAQGAEMRRGAGAARGRASWCWALALLWLAVVPGWSRVSGIPSRRHWPVPYKRFDFRPKPDPYCQAKYTFCPTGSPIPVMEGDDDIEVFRLQAPVWEFKYGDLLGHLKIMHDAIGFRSTLTGKNYTMEWYELFQLGNCTFPHLRPEMDAPFWCNQGAACFFEGIDDVHWKENGTLVQVATISGNMFNQMAKWVKQDNETGIYYETWNVKASPEKGAETWFDSYDCSKFVLRTFNKLAEFGAEFKNIETNYTRIFLYSGEPTYLGNETSVFGPTGNKTLGLAIKRFYYPFKPHLPTKEFLLSLLQIFDAVIVHKQFYLFYNFEYWFLPMKFPFIKITYEEIPLPIRNKTLSGL

SEQ ID NO: 9923 - protein, 128 aa, Homo sapiens
MSGRGKQGGKARAKAKTRSSRAGLQFPVGRVHRLLRKGNYAERVGAGAPVYLAAVLEYLTAEILELAGNAARDNKKTRIIPRHLQLAIRNDEELNKLLGKVTIAQGGVLPNIQAVLLPKKTESHHKAK

SEQ ID NO: 9924 - protein, 1298 aa, Homo sapiens
MDDPFSPCRRLNSTQGEIRVGPSHQAKLPDLQPFPSPDGDTVTQHEELVWMPGVNDCDLLMYLRAARSMAAFAGMCDGGSTEDGCVAASRDDTTLNALNTLHESGYDAGKALQRLVKKPVPKLIEKCWTEDEVKRFVKGLRQYGKNFFRIRKELLPNKETGELITFYYYWKKTPEAASSRAHRRHRRQAVFRRIKTRTASTPVNTPSRPPSSEFLDLSSASEDDFDSEDSEQELKGYACRHCFTTTSKDWHHGGRENILLCTDCRIHFKKYGELPPIEKPVDPPPFMFKPVKEEDDGLSGKHSMRTRRSRGSMSTLRSGRKKQPASPDGRTSPINEDIRSSGRNSPSAASTSSNDSKAETVKKSAKKVKEEASSPLKSNKRQREKVASDTEEADRTSSKKTKTQEISRPNSPSEGEGESSDSRSVNDEGSSDPKDIDQDNRSTSPSIPSPQDNESDSDSSAQQQMLQAQPPALQAPTGVTPAPSSAPPGTPQLPTPGPTPSATAVPPQGSPTASQAPNQPQAPTAPVPHTHIQQAPALHPQRPPSPHPPPHPSPHPPLQPLTGSAGQPSAPSHAQPPLHGQGPPGPHSLQAGPLLQHPGPPQPFGLPPQASQGQAPLGTSPAAAYPHTSLQLPASQSALQSQQPPREQPLPPAPLAMPHIKPPPTTPIPQLPAPQAHKHPPHLSGPSPFSMNANLPPPPALKPLSSLSTHHPPSAHPPPLQLMPQSQPLPSSPAQPPGLTQSQNLPPPPASHPPTGLHQVAPQPPFAQHPFVPGGPPPITPPTCPSTSTPPAGPGTSAQPPCSGAAASGGSIAGGSSCPLPTVQIKEEALDDAEEPESPPPPPRSPSPEPTVVDTPSHASQSARFYKHLDRGYNSCARTDLYFMPLAGSKLAKKREEAIEKAKREAEQKAREEREREKEKEKEREREREREREAERAAKASSSAHEGRLSDPQLSGPGHMRPSFEPPPTTIAAVPPYIGPDTPALRTLSEYARPHVMSPTNRNHPFYMPLNPTDPLLAYHMPGLYNVDPTIRERELREREIREREIRERELRERMKPGFEVKPPELDPLHPAANPMEHFARHSALTIPPTAGPHPFASFHPGLNPLERERLALAGPQLRPEMSYPDRLAAERIHAERMASLTSDPLARLQMFNVTPHHHQHSHIHSHLHLHQQDPLHQGSAGPVHPLVDPLTAGPHLARFPYPPGTLPNPLLGQPPHEHEMLRHPVFGTPYPRDLPGAIPPPMSAAHQLQAMHAQSAELQRLAMEQQWLHGHPHMHGGHLPSQEDYYSRLKKEGDKQL

SEQ ID NO: 9925 - protein, 325 aa, Homo sapiens
MALADSTRGLPNGGGGGGGSGSSSSSAEPPLFPDIVELNVGGQVYVTRRCTVVSVPDSLLWRMFTQQQPQELARDSKGRFFLDRDGFLFRYILDYLRDLQLVLPDYFPERSRLQREAEYFELPELVRRLGAPQQPGPGPPPSRRGVHKEGSLGDELLPLGYSEPEQQEGASAGAPSPTLELASRSPSGGAAGPLLTPSQSLDGSRRSGYITIGYRGSYTIGRDAQADAKFRRVARITVCGKTSLAKEVFGDTLNESRDPDRPPERYTSRYYLKFNFLEQAFDKLSESGFHMVACSSTGTCAFASSTDQSEDKIWTSYTEYVFCRE

SEQ ID NO: 9926 - protein, 255 aa, Homo sapiens
MGNSCYNIVATLLLVLNFERTRSLQDPCSNCPAGTFCDNNRNQICSPCPPNSFSSAGGQRTCDICRQCKGVFRTRKECSSTSNAECDCTPGFHCLGAGCSMCEQDCKQGQELTKKGCKDCCFGTFNDQKRGICRPWTNCSLDGKSVLVNGTKERDVVCGPSPADLSPGASSVTPPAPAREPGHSPQIISFFLALTSTALLFLLFFLTLRFSVVKRGRKKLLYIFKQPFMRPVQTTQEEDGCSCRFPEEEEGGCEL

SEQ ID NO: 9927 - protein, 139 aa, Homo sapiens
MYKLASCCLLFIGFLNPLLSLPLLDSREISFQLSAPHEDARLTPEELERASLLQILPEMLGAERGDILRKADSSTNIFNPRGNLRKFQDFSGQDPNILLSHLLARIWKPYKKQRRKLRQDLRLWKKEPGLRIFKNYVWV

SEQ ID NO: 9928 - protein, 540 aa, Homo sapiens
MPLFATNPFDQDVEKATSEMNTAEDWGLILDICDKVGQSRTGPKDCLRSIMRRVNHKDPHVAMQALTLLGACVSNCGKIFHLEVCSRDFASEVSNVLNKGHPKVCEKLKALMVEWTDEFKNDPQLSLISAMIKNLKEQGVTFPAIGSQAAEQAKASPALVAKDPGTVANKKEEEDLAKAIELSLKEQRQQSTTLSTLYPSTSSLLTNHQHEGRKVRAIYDFEAAEDNELTFKAGEIITVLDDSDPNWWKGETHQGIGLFPSNFVTADLTAEPEMIKTEKKTVQFSDDVQVETIEPEPEPAFIDEDKMDQLLQMLQSTDPSDDQPDLPELLHLEAMCHQMGPLIDEKLEDIDRKHSELSELNVKVMEALSLYTKLMNEDPMYSMYAKLQNQPYYMQSSGVSGSQVYAGPPPSGAYLVAGNAQMSHLQSYSLPPEQLSSLSQAVVPPSANPALPSQQTQAAYPNTMVSSVQGNTYPSQAPVYSPPPAATAAAATADVTLYQNAGPNMPQVPNYNLTSSTLPQPGGSQQPPQPQQPYSQKALL

SEQ ID NO: 9929 - protein, 410 aa, Homo sapiens
MELPSGPGPERLFDSHRLPGDCFLLLVLLLYAPVGFCLLVLRLFLGIHVFLVSCALPDSVLRRFVVRTMCAVLGLVARQEDSGLRDHSVRVLISNHVTPFDHNIVNLLTTCSTPLLNSPPSFVCWSRGFMEMNGRGELVESLKRFCASTRLPPTPLLLFPEEEATNGREGLLRFSSWPFSIQDVVQPLTLQVQRPLVSVTVSDASWVSELLWSLFVPFTVYQVRWLRPVHRQLGEANEEFALRVQQLVAKELGQTGTRLTPADKAEHMKRQRHPRLRPQSAQSSFPPSPGPSPDVQLATLAQRVKEVLPHVPLGVIQRDLAKTGCVDLTITNLLEGAVAFMPEDITKGTQSLPTASASKFPSSGPVTPQPTALTFAKSSWARQESLQERKQALYEYARRRFTERRAQEAD

SEQ ID NO: 9930 - protein, 1631 aa, Homo sapiens
MEGLEEAEANCSVAFAEAQRWVEAVTEKNFETKDFRASLENGVLLCDLINKLKPGVIKKINRLSTPIAGLDNINVFLKACEQIGLKEAQLFHPGDLQDLSNRVTVKQEETDRRVKNVLITLYWLGRKAQSNPYYNGPHLNLKAFENLLGQALTKALEDSSFLKRSGRDSGYGDIWCPERGEFLAPPRHHKREDSFESLDSLGSRSLTSCSSDITLRGGREGFESDTDSEFTFKMQDYNKDDMSYRRISAVEPKTALPFNRFLPNKSRQPSYVPAPLRKKKPDKHEDNRRSWASPVYTEADGTFSSNQRRIWGTNVENWPTVQGTSKSSCYLEEEKAKTRSIPNIVKDDLYVRKLSPVMPNPGNAFDQFLPKCWTPEDVNWKRIKRETYKPWYKEFQGFSQFLLLQALQTYSDDILSSETHTKIDPTSGPRLITRRKNLSYAPGYRRDDLEMAALDPDLENDDFFVRKTGAFHANPYVLRAFEDFRKFSEQDDSVERDIILQCREGELVLPDLEKDDMIVRRIPAQKKEVPLSGAPDRYHPVPFPEPWTLPPEIQAKFLCVLERTCPSKEKSNSCRILVPSYRQKKDDMLTRKIQSWKLGTTVPPISFTPGPCSEADLKRWEAIREASRLRHKKRLMVERLFQKIYGENGSKSMSDVSAEDVQNLRQLRYEEMQKIKSQLKEQDQKWQDDLAKWKDRRKSYTSDLQKKKEEREEIEKQALEKSKRSSKTFKEMLQDRESQNQKSTVPSRRRMYSFDDVLEEGKRPPTMTVSEASYQSERVEEKGATYPSEIPKEDSTTFAKREDRVTTEIQLPSQSPVEEQSPASLSSLRSRSTQMESTRVSASLPRSYRKTDTVRLTSVVTPRPFGSQTRGISSLPRSYTMDDAWKYNGDVEDIKRTPNNVVSTPAPSPDASQLASSLSSQKEVAATEEDVTRLPSPTSPFSSLSQDQAATSKATLSSTSGLDLMSESGEGEISPQREVSRSQDQFSDMRISINQTPGKSLDFGFTIKWDIPGIFVASVEAGSPAEFSQLQVDDEIIAINNTKFSYNDSKEWEEAMAKAQETGHLVMDVRRYGKAGSPETKWIDATSGIYNSEKSSNLSVTTDFSESLQSSNIESKEINGIHDESNAFESKASESISLKNLKRRSQFFEQGSSDSVVPDLPVPTISAPSRWVWDQEEERKRQERWQKEQDRLLQEKYQREQEKLREEWQRAKQEAERENSKYLDEELMVLSSNSMSLTTREPSLATWEATWSEGSKSSDREGTRAGEEERRQPQEEVVHEDQGKKPQDQLVIERERKWEQQLQEEQEQKRLQAEAEEQKRPAEEQKRQAEIERETSVRIYQYRRPVDSYDIPKTEEASSGFLPGDRNKSRSTTELDDYSTNKNGNNKYLDQIGNMTSSQRRSKKEQVPSGAELERQQILQEMRKRTPLHNDNSWIRQRSASVNKEPVSLPGIMRRGESLDNLDSPRSNSWRQPPWLNQPTGFYASSSVQDFSRPPPQLVSTSNRAYMRNPSSSVPPPSAGSVKTSTTGVATTQSPTPRSHSPSASQSGSQLRNRSVSGKRICSYCNNILGKGAAMIIESLGLCYHLHCFKCVACECDLGGSSSGAEVRIRNHQLYCNDCYLRFKSGRPTAM

SEQ ID NO: 9931 - protein, 1642 aa, Homo sapiens
MASGSRWRPTPPPLLLLLLLALAARADGLEFGGGPGQWARYARWAGAASSGELSFSLRTNATRALLLYLDDGGDCDFLELLLVDGRLRLRFTLSCAEPATLQLDTPVADDRWHMVLLTRDARRTALAVDGEARAAEVRSKRREMQVASDLFVGGIPPDVRLSALTLSTVKYEPPFRGLLANLKLGERPPALLGSQGLRGATADPLCAPARNPCANGGLCTVLAPGEVGCDCSHTGFGGKFCSEEEHPMEGPAHLTLNSEGKEEFVATFKGNEFFCYDLSHNPIQSSTDEITLAFRTLQRNGLMLHTGKSADYVNLSLKSGAVWLVINLGSGAFEALVEPVNGKFNDNAWHDVRVTRNLRQHAGIGHAMVTISVDGILTTTGYTQEDYTMLGSDDFFYIGGSPNTADLPGSPVSNNFMGCLKDVVYKNNDFKLELSRLAKEGDPKMKLQGDLSFRCEDVAALDPVTFESPEAFVALPRWSAKRTGSISLDFRTTEPNGLLLFSQGRRAGGGAGSHSSAQRADYFAMELLDGHLYLLLDMGSGGIKLRASSRKVNDGEWCHVDFQRDGRKGSISVNSRSTPFLATGDSEILDLESELYLGGLPEGGRVDLPLPPEVWTAALRAGYVGCVRDLFIDGRSRDLRGLAEAQGAVGVAPFCSRETLKQCASAPCRNGGVCREGWNRFICDCIGTGFLGRVCEREATVLSYDGSMYMKIMLPNAMHTEAEDVSLRFMSQRAYGLMMATTSRESADTLRLELDGGQMKLTVNLGKGPETLFAGHKLNDNEWHTVRVVRRGKSLQLSVDNVTVEGQMAGAHMRLEFHNIETGIMTERRFISVVPSNFIGHLSGLVFNGQPYMDQCKDGDITYCELNARFGLRAIVADPVTFKSRSSYLALATLQAYASMHLFFQFKTTAPDGLLLFNSGNGNDFIVIELVKGYIHYVFDLGNGPSLMKGNSDKPVNDNQWHNVVVSRDPGNVHTLKIDSRTVTQHSNGARNLDLKGELYIGGLSKNMFSNLPKLVASRDGFQGCLASVDLNGRLPDLIADALHRIGQVERGCDGPSTTCTEESCANQGVCLQQWDGFTCDCTMTSYGGPVCNDPGTTYIFGKGGALITYTWPPNDRPSTRMDRLAVGFSTHQRSAVLVRVDSASGLGDYLQLHIDQGTVGVIFNVGTDDITIDEPNAIVSDGKYHVVRFTRSGGNATLQVDSWPVNERYPAGRQLTIFNSQAAIKIGGRDQGRPFQGQVSGLYYNGLKVLALAAESDPNVRTEGHLRLVGEGPSVLLSAETTATTLLADMATTIMETTTTMATTTTRRGRSPTLRDSTTQNTDDLLVASAECPSDDEDLEECEPSTGGELILPIITEDSLDPPPVATRSPFVPPPPTFYPFLTGVGATQDTLPPPAARRPPSGGPCQAERDDSDCEEPIEASGFASGEVFDSSLPPTDDEDFYTTFPLVTDRTTLLSPRKPAPRPNLRTDGATGAPGVLFAPSAPAPNLPAGKMNHRDPLQPLLENPPLGPGAPTSFEPRRPPPLRPGVTSAPGFPHLPTANPTGPGERGPPGAVEVIRESSSTTGMVVGIVAAAALCILILLYAMYKYRNRDEGSYQVDQSRNYISNSAQSNGAVVKEKAPAAPKTPSKAKKNKDKEYYV

SEQ ID NO: 9932 - protein, 4416 aa, Homo sapiens
MGSSAAAAAAAAAAADSAQWLSVKEETIFLHDGLIRVTDLAELPSEILGAPEAADTDLEILTFETKNPSELAERLRSVCGNQSNAYARLLEYRLNALRGLWNAQRQLALEEQHERESSGDEETLALLKRQGLLQQPEQAPFTSRMGLLLVFPLIQSQSRTDPSLCNITAEVLLNCLRDCQPLSLTKEPADCLNGIETLLCSWLEETSDTGRHIPHKQKENAAAALVALACARGSLKTFVHTVHLLQKQTDLGSLPVADVLYRLLLLEGGPGSPSCLLGGKHIVSWGYEDMLPAPDSNTGSSSENKDADLGRCLTADGLYLYTTNSVGRGVSKLGSGLHGTLRGFVYCRNEELEPGWVAFGSGSLLHRPVSFDNKPHSLFQVIDQNTLQVCQVVPMPANHLPIGSTMSTVHLSSDGTYFYWIWSPASLNEKTPKGHSVFMDIFELVVENGVFVANPLQERTILMRKEGESAKSINEMLLSRLSRYRASPSATLAALTGSTISNTLKEDQAANTSCGLPLKMLRKTPIYTCGTYLVMLVPPPGGSGSSATRSLFGGTSGLSSLKILASSLVYNISDGQFTSRADLIDAAGSSLGRGALVPGLGACYDTVNNMLWTCSNDYIDQWCNPGNQAFHYVCQRLGVSHIITEPKEEAITTNEVINQLLHHVGAMCIHQLNLLATNPNLPITSVLGKQHPIEAHHLSSICDIMEKAMVNGDTCIIRCILVVFQVVFKFFFSPQTERNRDIIRRSGLLLWQLLMAPKDQICPEIQKEVCLAISSGLNILYPGETEINNLLKLVLTEGERNSGLSQLRDVILTNLAEQLQNNRFGSDEDDHYRLNDELLHYILKIVVRESCILITKCQTVSKDDFQKLLSTVPAASSCLRYLMAVQNHLLSNTILIKPDENDDSDSSLQGETLKELKVSILALATQILTGCDEVLEMLQQVTTALINSDIADREQRLKGLEQVTKATMLGHLLPVLLTSLMHPNLQTLIMADALMPQLVQLVLYTSQTALLLKTQCPVFAEVGCSPCGAPDQKCRLFPDERMLEEKEEPGFLTGLKIPAPWAAGKTVETVHPVRDNYKFKETVHIPGARCLYLRFDSRCSSQYDYDKLVIYAGPNTNSRKVAEYGGNTLGYGSRSVLGTGWPKDLVKVEGDTVTFSFEMRSGREHNTPDKAMWGFACTVRAQESSEDVSGGLPFLVDLALGLSVLACSMLRILYNGPEITKEEEACQELLRSKLLQRCQWQVEANGVISPALTPSPSPLPLTIEEDREFTYPSDVLVPPVGNYFDLPRIRLPPGIMIKLREISGRARPQFRPSIKEVIQPDVMEEMVVSCVIKHLNLVDALQSLINFQYQEEHAEEYDLLCKIMGETFKKLNAMERQLQSVAELEQKWQSEVDDAMQGKLENNMPFFYDYHFNENKMKELELLCSMKEVSFDGNDLENMVLSLREKFLQEVNSLIQKPSHPLAKTKTLVKSLMNRAELLLHVTIAAQSGLTRSISGTPAETPACKSASETKVISHAVRQPVFLRSMSAPSDLEMIGNEDLEFTRANQRRRHVTSHRSSSFTLLQSLAIEDSRDKPTYSVLLGQLFAFIGTNPDQAVSSSSFLLAAQTRWRRGNTRKQALVHMRELLTAAVRVGGVTHLVGPVTMVLQGGPRIEELTCGGMVEQVQEAFGETMTSVVSLCARYPIACANSIGLLCTIPYTRSEEKCLVRSGLVQLMDRLCSLSNQTESSSSEKQTKKQKVATMAWAAFQVLANRCVEWEKEEGGSTEAVHSGLARQVSSLLTNHLARATECCGNQAAGNDALQDVLSLLNDLSRSHIGKAILSQPACVSKLLSLLLDQRPSPKLVLIILQLCRAALPLMSVEDCGNVELPPWSYSVPSLNSEQEDPSDPASKIASLLLAKLADYVVPGCQTVLSPTASEPDTTLTKTSPKNSLKGDKDPGEESEAVDGKLSIFIHKREDQSSHEVLQPLLSSSEGRPFRLGTGANMEKVVKMDRDMTKGGCCEVITEEAAAALRKATKWAQSGLIVSIGPPVESINPETVSGLSTGDKKKTAQTSICRERNSELARTDPVRPFISGHVANSMAAEVIALLHSLLMAPESNAAQIWTTTAEKVLSRALMYIPQLGKYAESILENGSSSGRKLAKLQRIARQAVAALCALGGFKETIKIGSEVQVLGRGISGSIGVVASINEQEGIATVRFPPIDCRKTSQASDTLTIPLSRLCVPRSEALPLHKLSITEKVVQAVQSMLLPQEGSLSIHTSLPATGDGSAPVMAVVRLLAEIRTRACLVMAQLLEDSLFCEEFIQQCPAAVEVLNLVAQECSAGERLAVVEVQCERLRMLYRDCARPPPPPLQADRRQPKEITWSPSRVFPPVRACMFSSHLTSVTFLADPSAGGGLPRGTFIYATSPLPVQAPSFYWEIEIVSYGDTDDDTGPIVSFGFTTEAEKRDGAWTNPVGTCLFHNNGRAVHYNGSSLLQWKSVRLDVTLSPGDVAGIGWERTEGTPPPPGQPAKGRVYFTYCGQRLSPYLEDVSGGMWPVVHIQKKNTKTRANFGSRPFAYAEGQAHRNAADLCTDLAEEISANFEALPFAMASDSDNDAGTSIASDPGTHGPPCRIAAVATAQQQYDSDTSCHYKVELSYENFITSGPDPHPPPIADDESDDDDDDDIPQEDHYALLVKAWETKVFPTIRRRFRNEAERKSGLDQIKGALQLGMVDIARQTVEFLYEENGGIPRDLYLPTIEDIKDEANKFTIDKVRKGLTVVTRSPDSNNVASSAVGTALPKFAIRGMLKTFGLHGVVLDVDSVNELVQVETYLRSEGVLVRYWYPIDMLERPPAGYRRTATNGLVTLDNTNLQIHRELLRCEAALARLYCRMALLNIFAPKLPHLFTRLFHIPAIRDITLEHLQLLSNQLLAPPLPDGTISSSSILLAQSLQHCIHSQNCSATDLFYQGNSQTVREWLNVAITRTLHQGEESLLELTKQICSFLQTAPEQFPSEEFPISESKVNMDVNFPGAAFVVVSCKESQSGFRKDSSLYKAPWARVLVYGLGHKVKRNGQLNLIEAACYPRDASPANTGLAPPPTADQYPSVVLSTDRVHIKLGVSPPPGAVLVLHSLPLEFPLAMAFAEQLLSWKSEDSEGKSEDEPDTIPTSVLLQVVELLGNFLWTTDMAACVKELVFHLLAELLRTVHTLEQRRHPAGLSSSIALQLNPCLAMLMALQSELHKLYDEETQNWVSGGACGGSGGAAAGDQGRFSTYFHALMEGCLAVAEVTLPTNMSVTASGVTSATAPNLSDSSSSSSSSPGQTPQSPSLLSKRKKVKMKREKASSSGKRQSSRTVDSDPTVLSIGGSKPEDMLWFHRALTLLIILRHLTRKDPQGLGVTSDAIADACQALVGPTAHSRLLVISGIPTHLDEGVVRGAIRKACNAHGGVFKDEIYIPLQEEDTKKPKDKAEGGDGKVEPEKTLAFPGTDSMEVSTSSSLTPAMSISASASTSQASICSSQGISQTVSDLSVDPLPAGLELPIPPGLLEPHAVSSQESLDISLCSTGSLGSLGSLGEPLDNAETASVSDMGSMYTVTSLDNQPLAARPIKGFAVVEIRSRAKIEKIRASLFNNNDLIGLSSLDGEDELMEMSTEEILTVSVVNQSLFDTQGSPGLEDYFNDKSIKGEKLVPGAREVLTEIFKSCAHSEQTLSLTPAKPIRVSDIYLSKEQINSQTPGNLLHLFFTNVRPPKKVLEDQLTQILRKYGVPKPKFDKSKYSKAGKEQHPVKVVSTKRPITKPPAKDKAVLNSVSRTALSEKKPTVKPKSPEKSKPDEKDPEKSPTKKQEVPEEKYLTLEGFHKFVIDRARQDIRSVWRAILSCGYDLHFERCACIDVRHAQKASRKWTLEMDVALVQYINQLCRHLAITPARLHPHEVYLDPADAADPRVACLLNVPIESLRLRFALLQSLNTTLETFFLPLVELRQTPMYTHSIAALLKEAKGLIFYDTKVTVMNRVLNATVQRTADHAAPEITLDPLEIVGGEIRASENSYFCQAARQLASVPSSQLCVKLASGGDPTYAFNIRFTGEEVHGTSGSFRHFLWQVCKELQSSSLSLLLLCPSSAVNKNKGKYILTPSPITYGEEQLLHFLGQLLGIAIRADVPLPLDLLPSFWKTLVGEPLDPEQDLQEADILTYNYVKKFESINDETELEALCAEIASQHLATESPDSPNKPCCRFTYLTMTGEEVELCSRGRHILVAWENKDIYAAAIRSLRLRELQNVECVTAVRAGLGSIIPLQLLTMLSPLEMELRTCGLPYINLEFLKAHTMYQVGLMETDQHIEFFWGALEMFTQEELCKFIKFACNQERIPFTCPCKDGGPDTAHVPPYPMKIAPPDGTAGSPDSRYIRVETCMFMIKLPQYSSLEIMLEKLRCAIHYREDPLSG

SEQ ID NO: 9933 - protein, 90 aa, Homo sapiens
MPKRKAKGDAKGDKAKVKDEPQRRSARLSAKPAPPKPEPRPKKASAKKGEKLPKGRKGKADAGKDGNNPAKNRDASTLQSQKAEGTGDAK

SEQ ID NO: 9934 - protein, 559 aa, Homo sapiens
MATALSEEELDNEDYYSLLNVRREASSEELKAAYRRLCMLYHPDKHRDPELKSQAERLFNLVHQAYEVLSDPQTRAIYDIYGKRGLEMEGWEVVERRRTPAEIREEFERLQREREERRLQQRTNPKGTISVGVDATDLFDRYDEEYEDVSGSSFPQIEINKMHISQSIEAPLTATDTAILSGSLSTQNGNGGGSINFALRRVTSAKGWGELEFGAGDLQGPLFGLKLFRNLTPRCFVTTNCALQFSSRGIRPGLTTVLARNLDKNTVGYLQWRWGIQSAMNTSIVRDTKTSHFTVALQLGIPHSFALISYQHKFQDDDQTRVKGSLKAGFFGTVVEYGAERKISRHSVLGAAVSVGVPQGVSLKVKLNRASQTYFFPIHLTDQLLPSAMFYATVGPLVVYFAMHRLIIKPYLRAQKEKELEKQRESAATDVLQKKQEAESAVRLMQESVRRIIEAEESRMGLIIVNAWYGKFVNDKSRKSEKVKVIDVTVPLQCLVKDSKLILTEASKAGLPGFYDPCVGEEKNLKVLYQFRGVLHQVMVLDSEALRIPKQSHRIDTDG

SEQ ID NO: 9935 - protein, 230 aa, Homo sapiens
MEGQRWLPLEANPEVTNQFLKQLGLHPNWQFVDVYGMDPELLSMVPRPVCAVLLLFPITEKYEVFRTEEEEKIKSQGQDVTSSVYFMKQTISNACGTIGLIHAIANNKDKMHFESGSTLKKFLEESVSMSPEERARYLENYDAIRVTHETSAHEGQTEAPSIDEKVDLHFIALVHVDGHLYELDGRKPFPINHGETSDETLLEDAIEVCKKFMERDPDELRFNAIALSAA

SEQ ID NO: 9936 - protein, 151 aa, Homo sapiens
MESAAALHFSRPASLLLLLLSLCALVSAQFIVVGPTDPILATVGENTTLRCHLSPEKNAEDMEVRWFRSQFSPAVFVYKGGRERTEEQMEEYRGRTTFVSKDISRGSVALVIHNITAQENGTYRCYFQEGRSYDEAILHLVVAELLEAEVY

SEQ ID NO: 9937 - protein, 398 aa, Homo sapiens
MRPGGALLALLASLLLLLLLRLLWCPADAPGRARILVEESREATHGTPAALRTLRSPATAVPRATNSTYLNEKSLQLTEKCKNLQYGIESFSNKTKGYSENDYLQIITDIQSCPWKRQAEEYANFRAKLASCCDAVQNFVVSQNNTPVGTNMSYEVESKKEIPIKKNIFHMFPVSQPFVDYPYNQCAVVGNGGILNKSLCGTEIDKSDFVFRCNLPPTTGDVSKDVGSKTNLVTINPSIITLKYGNLKEKKALFLEDIATYGDAFFLLPAFSFRANTGTSFKVYYTLEESKARQKVLFFHPKYLKDLALFWRTKGVTAYRLSTGLMITSVAVELCKNVKLYGFWPFSKTVEDIPVSHHYYDNKLPKHGFHQMPKEYSQILQLHMKGILKLQFSKCEVA

SEQ ID NO: 9938 - protein, 316 aa, Homo sapiens
MAEVKVKVQPPDADPVEIENRIIELCHQFPHGITDQVIQNEMPHIEAQQRAVAINRLLSMGQLDLLRSNTGLLYRIKDSQNAGKMKGSDNQEKLVYQIIEDAGNKGIWSRDIRYKSNLPLTEINKILKNLESKKLIKAVKSVAASKKKVYMLYNLQPDRSVTGGAWYSDQDFESEFVEVLNQQCFKFLQSKAETARESKQNPMIQRNSSFASSHEVWKYICELGISKVELSMEDIETILNTLIYDGKVEMTIIAAKEGTVGSVDGHMKLYRAVNPIIPPTGLVRAPCGLCPVFDDCHEGGEISPSNCIYMTEWLEF

SEQ ID NO: 9939 - protein, 930 aa, Homo sapiens
MEYERRGGRGDRTGRYGATDRSQDDGGENRSRDHDYRDMDYRSYPREYGSQEGKHDYDDSSEEQSAEDSYEASPGSETQRRRRRRHRHSPTGPPGFPRDGDYRDQDYRTEQGEEEEEEEDEEEEEKASNIVMLRMLPQAATEDDIRGQLQSHGVQAREVRLMRNKSSGQSRGFAFVEFSHLQDATRWMEANQHSLNILGQKVSMHYSDPKPKINEDWLCNKCGVQNFKRREKCFKCGVPKSEAEQKLPLGTRLDQQTLPLGGRELSQGLLPLPQPYQAQGVLASQALSQGSEPSSENANDTIILRNLNPHSTMDSILGALAPYAVLSSSNVRVIKDKQTQLNRGFAFIQLSTIVEAAQLLQILQALHPPLTIDGKTINVEFAKGSKRDMASNEGSRISAASVASTAIAAAQWAISQASQGGEGTWATSEEPPVDYSYYQQDEGYGNSQGTESSLYAHGYLKGTKGPGITGTKGDPTGAGPEASLEPGADSVSMQAFSRAQPGAAPGIYQQSAEASSSQGTAANSQSYTIMSPAVLKSELQSPTHPSSALPPATSPTAQESYSQYPVPDVSTYQYDETSGYYYDPQTGLYYDPNSQYYYNAQSQQYLYWDGERRTYVPALEQSADGHKETGAPSKEGKEKKEKHKTKTAQQIAKDMERWARSLNKQKENFKNSFQPISSLRDDERRESATADAGYAILEKKGALAERQHTSMDLPKLASDDRPSPPRGLVAAYSGESDSEEEQERGGPEREEKLTDWQKLACLLCRRQFPSKEALIRHQQLSGLHKQNLEIHRRAHLSENELEALEKNDMEQMKYRDRAAERREKYGIPEPPEPKRRKYGGISTASVDFEQPTRDGLGSDNIGSRMLQAMGWKEGSGLGRKKQGIVTPIEAQTRVRGSGLGARGSSYGVTSTESYKETLHKTMVTRFNEAQ

SEQ ID NO: 9940 - protein, 85 aa, Homo sapiens
MEASSEPPLDAKSDVTNQLVDFQWKLGMAVSSDTCRSLKYPYVAVMLKVADHSGQVKTKCFEMTIPQFQNFYRQFKEIAAVIETV

SEQ ID NO: 9941 - protein, 175 aa, Homo sapiens
MPKSCAARQCCNRYSSRRKQLTFHRFPFSRPELLKEWVLNIGRGNFKPKQHTVICSEHFRPECFSAFGNRKNLKHNAVPTVFAFQDPTQQVRENTDPASERGNASSSQKEKTSPCRSQVLPEAGAGEDSPGRNMDTALEELQLPPNAEGHVKQAMLFNVENGTPASREALWLSEE

SEQ ID NO: 9942 - protein, 300 aa, Homo sapiens
MDSDSCAAAFHPEEYSPSCKRRRTVEDFNKFCTFVLAYAGYIPYPKEELPLRSSPSPANSTAGTIDSDGWDAGFSDIASSVPLPVSDRCFSHLQPTLLQRAKPSNFLLDRKKTDKLKKKKKRKRRDSDAPGKEGYRGGLLKLEAADPYVETPTSPTLQDIPQAPSDPCSGWDSDTPSSGSCATVSPDQVKEIKTEGKRTIVRQGKQVVFRDEDSTGNDEDIMVDSDDDSWDLVTCFCMKPFAGRPMIECNECHTWIHLSCAKIRKSNVPEVFVCQKCRDSKFDIRRSNRSRTGSRKLFLD

SEQ ID NO: 9943 - protein, 483 aa, Homo sapiens [sequence omitted]

SEQ ID NO: 9944 - protein, 1207 aa, Homo sapiens
MASVAWAVLKVLLLLPTQTWSPVGAGNPPDCDAPLASALPRSSFSSSSELSSSHGPGFSRLNRRDGAGGWTPLVSNKYQWLQIDLGERMEVTAVATQGGYGSSDWVTSYLLMFSDGGRNWKQYRREESIWGFPGNTNADSVVHYRLQPPFEARFLRFLPLAWNPRGRIGMRIEVYGCAYKSEVVYFDGQSALLYRLDKKPLKPIRDVISLKFKAMQSNGILLHREGQHGNHITLELIKGKLVFFLNSGNAKLPSTIAPVTLTLGSLLDDQHWHSVLIELLDTQVNFTVDKHTHHFQAKGDSSYLDLNFEISFGGIPTPGRSRAFRRKSFHGCLENLYYNGVDVTELAKKHKPQILMMGNVSFSCPQPQTVPVTFLSSRSYLALPGNSGEDKVSVTFQFRTWNRAGHLLFGELRRGSGSFVLFLKDGKLKLSLFQPGQSPRNVTAGAGLNDGQWHSVSFSAKWSHMNVVVDDDTAVQPLVAVLIDSGDTYYFGGCLDNSSGSGCKSPLGGFQGCLRLITIGDKAVDPILVQQGALGSFRDLQIDSCGITDRCLPSYCEHGGECSQSWDTFSCDCLGTGYTGETCHSSLYEQSCEAHKHRGNPSGLYYIDADGSGPLGPFLVYCNMTDAAWTVVQHGGPDAVTLRGAPSGHPRSAVSFAYAAGAGQLRSAVNLAERCEQRLALRCGTARRPDSRDGTPLSWWVGRTNETHTSWGGSLPDAQKCTCGLEGNCIDSQYYCNCDAGRNEWTSDTIVLSQKEHLPVTQIVMTDAGRPHSEAAYTLGPLLCRGDQSFWNSASFNTETSYLHFPAFHGELTADVCFFFKTTVSSGVFMENLGITDFIRIELRAPTEVTFSFDVGNGPCEVTVQSPTPFNDNQWHHVRAERNVKGASLQVDQLPQKMQPAPADGHVRLQLNSQLFIEISAYFATGSSMTYHFQEHYTLSENSSSLVSSLHRDVTLTREMITLSFRTTRTPSLLLYVSSFYEEYLSVILANNGSLQIRYKLDRHQNPDAFTFDFKNMADGQLHQVKINREEAVVMVEVNQSTKKQVILSSGTEFNAVKSLILGKVLEAAGADPDTRRAATSGFTGCLSAVRFGRAAPLKAALRPSGPSRVTVRGHVAPMARCAAGAASGSPARELAPRLAGGAGRSGPADEGEPLVNADRRDSAVIGGVIAVVIFILLCITAIAIRIYQQRKLRKENESKVSKKEEC

SEQ ID NO: 9945 - protein, 597 aa, Homo sapiens
MERPAPLAVLPFSDPAHALSLLRGLSQLRAERKFLDVTLEAAGGRDFPAHRAVLAAASPYFRAMFAGQLRESRAERVRLHGVPPDMLQLLLDFSYTGRVAVSGDNAEPLLRAADLLQFPAVKEACGAFLQQQLDLANCLDMQDFAEAFSCSGLASAAQRFILRHVGELGAEQLERLPLARLLRYLRDDGLCVPKEEAAYQLALRWVRADPPRRAAHWPQLLEAVRLPFVRRFYLLAHVEAEPLVARCPPCLRLLREARDFQAARYDRHDRGPCPRMRPRPSTGLAEILVLVGGCDQDCDELVTVDCYNPQTGQWRYLAEFPDHLGGGYSIVALGNDIYVTGGSDGSRLYDCVWRYNSSVNEWAEVAPMLKAREYHSSSVLDGLLYVVAADSTERYDHTTDSWEALQPMTYPMDNCSTTACRGRLYAIGSLAGKETMVMQCYDPDTDLWSLVDCGQLPPWSFAPKTATLNGLMYFVRDDSAEVDVYNPTRNEWDKIPSMNQVHVGGSLAVLGGKLYVSGGYDNTFELSDVVEAYDPETRAWSVVGRLPEPTFWHGSVSIFRQFMPQTFSGGRGFELDSGSDDMDPGRPRPPRDPDELH

SEQ ID NO: 9946 - protein, 745 aa, Homo sapiens
MASVAWAVLKVLLLLPTQTWSPVGAGNPPDCDAPLASALPRSSFSSSSELSSSHGPGFSRLNRRDGAGGWTPLVSNKYQWLQIDLGERMEVTAVATQGGYGSSDWVTSYLLMFSDGGRNWKQYRREESIWGFPGNTNADSVVHYRLQPPFEARFLRFLPLAWNPRGRIGMRIEVYGCAYKSEVVYFDGQSALLYRLDKKPLKPIRDVISLKFKAMQSNGILLHREGQHGNHITLELIKGKLVFFLNSGNAKLPSTIAPVTLTLGSLLDDQHWHSVLIELLDTQVNFTVDKHTHHFQAKGDSSYLDLNFEISFGGIPTPGRSRAFRRKSFHGCLENLYYNGVDVTELAKKHKPQILMMGNVSFSCPQPQTVPVTFLSSRSYLALPGNSGEDKVSVTFQFRTWNRAGHLLFGELRRGSGSFVLFLKDGKLKLSLFQPGQSPRNVTAGAGLNDGQWHSVSFSAKWSHMNVVVDDDTAVQPLVAVLIDSGDTYYFGGCLDNSSGSGCKSPLGGFQGCLRLITIGDKAVDPILVQQGALGSFRDLQIDSCGITDRCLPSYCEHGGECSQSWDTFSCDCLGTGYTGETCHSSLYEQSCEAHKHRGNPSGLYYIDADGSGPLGPFLVYCNMTDAAWTVVQHGGPDAVTLRGAPSGHPRSAVSFAYAAGAGQLRSAVNLAERCEQRLALRCGTARRPDSRDGTPLSWWVGRTNETHTSWGGSLPDAQKCTCGLEGNCIDSQYYCNCDAGRNEW

SEQ ID NO: 9947 - protein, 541 aa, Homo sapiens
MRRKEKRLLQAVALVLAALVLLPNVGLWALYRERQPDGTPGGSGAAVAPAAGQGSHSRQKKTFFLGDGQKLKDWHDKEAIRRDAQRVGNGEQGRPYPMTDAERVDQAYRENGFNIYVSDKISLNRSLPDIRHPNCNSKRYLETLPNTSIIIPFHNEGWSSLLRTVHSVLNRSPPELVAEIVLVDDFSDRDRIARNRKTIVCPMIDVIDHDDFRYETQAGDAMRGAFDWEMYYKRIPIPPELQKADPSDPFESPVMAGGLFAVDRKWFWELGGYDPGLEIWGGEQYEISFKVWMCGGRMEDIPCSRVGHIYRKYVPYKVPAGVSLARNLKRVAEVWMDEYAEYIYQRRPEYRHLSAGDVAVQKKLRSSLNCKSFKWFMTKIAWDLPKFYPPVEPPAAAWGEIRNVGTGLCADTKHGALGSPLRLEGCVRGRGEAAWNNMQVFTFTWREDIRPGDPQHTKKFCFDAISHTSPVTLYDCHSMKGNQLWKYRKDKTLYHPVSGSCMDCSESDHRIFMNTCNPSSLTQQWLFEHTNSTVLEKFNRN

SEQ ID NO: 9948 - protein, 539 aa, Homo sapiens
MERPAPLAVLPFSDPAHALSLLRGLSQLRAERKFLDVTLEAAGGRDFPAHRAVLAAASPYFRAMFAGQLRESRAERVRLHGVPPDMLQLLLDFSYTGRVAVSGDNAEPLLRAADLLQFPAVKEACGAFLQQQLDLANCLDMQDFAEAFSCSGLASAAQRFILRHVGELGAEQLERLPLARLLRYLRDDGLCVPKEEAAYQLALRWVRADPPRRAAHWPQLLEAVRLPFVRRFYLLAHVEAEPLVARCPPCLRLLREARDFQAARYDRHDRGPCPRMRPRPSTGLAEILVLVGGCDQDCDELVTVDCYNPQTGQWRYLAEFPDHLGGGYSIVALGNDIYVTGGSDGSRLYDCVWRYNSSVNEWAEVAPMLKAREYHSSSVLDGLLYVVAADSTERYDHTTDSWEALQPMTYPMDNCSTTACRGRLYAIGSLAGKETMVMQCYDPDTDLWSLVDCGQLPPWSFAPKTATLNGLMYFVRDDSAEVDVYNPTRNEWDKIPSMNQVNFQAGQHWKHRLVLILQPKCHRDECLGSTAMMGGSHLN

SEQ ID NO: 9949 - protein, 402 aa, Homo sapiens
MNIHMKRKTIKNINTFENRMLMLDGMPAVRVKTELLESEQGSPNVHNYPDMEAVPLLLNNVKGEPPEDSLSVDHFQTQTEPVDLSINKARTSPTAVSSSPVSMTASASSPSSTSTSSSSSSRLASSPTVITSVSSASSSSTVLTPGPLVASASGVGGQQFLHIIHPVPPSSPMNLQSNKLSHVHRIPVVVQSVPVVYTAVRSPGNVNNTIVVPLLEDGRGHGKAQMDPRGLSPRQSKSDSDDDDLPNVTLDSVNETGSTALSIARAVQEVHPSPVSRVRGNRMNNQKFPCSISPFSIESTRRQRRSESPDSRKRRIHRCDFEGCNKVYTKSSHLKAHRRTHTGEKPYKCTWEGCTWKFARSDELTRHYRKHTGVKPFKCADCDRSFSRSDHLALHRRRHMLV

SEQ ID NO: 9950 - protein, 273 aa, Homo sapiens
MLGQLLPHTARGLGAAEMPGQGPGSDWTERSSSAEPPAVAGTEGGGGGSAGYSCYQNSKGSDRIKDGYKVNSHIAKLQELWKTPQNQTIHLSKSMMEASFFKHPDLTTGQKRYLCSIAKIYNANYLKMLMKRQYMHVLQHSSQKPGVLTHHRSRLSSRYSQKQHYPCTTWRHQLEREDSGSSDIAAASAPEMLIQHSLWRPVRNKEGIKTGYASKTRCKSLKIFRRPRKLFMQTVSSDDSESHMSEEKKEEDLLNNFMQSMSIEEQGEHLMLT

SEQ ID NO: 9951 - protein, 688 aa, Homo sapiens
MDGSFVQHSVRVLQELNKQREKGQYCDATLDVGGLVFKAHWSVLACCSHFFQSLYGDGSGGSVVLPAGFAEIFGLLLDFFYTGHLALTSGNRDQVLLAARELRVPEAVELCQSFKPKTSVGQAAGGQSGLGPPASQNVNSHVKEPAGLEEEEVSRTLGLVPRDQEPRGSHSPQRPQLHSPAQSEGPSSLCGKLKQALKPCPLEDKKPEDCKVPPRPLEAEGAQLQGGSNEWEVVVQVEDDGDGDYMSEPEAVLTRRKSNVIRKPCAAEPALSAGSLAAEPAENRKGTAVPVECPTCHKKFLSKYYLKVHNRKHTGEKPFECPKCGKCYFRKENLLEHEARNCMNRSEQVFTCSVCQETFRRRMELRVHMVSHTGEMPYKCSSCSQQFMQKKDLQSHMIKLHGAPKPHACPTCAKCFLSRTELQLHEAFKHRGEKLFVCEECGHRASSRNGLQMHIKAKHRNERPHVCEFCSHAFTQKANLNMHLRTHTGEKPFQCHLCGKTFRTQASLDKHNRTHTGERPFSCEFCEQRFTEKGPLLRHVASRHQEGRPHFCQICGKTFKAVEQLRVHVRRHKGVRKFECTECGYKFTRQAHLRRHMEIHDRVENYNPRQRKLRNLIIEDEKMVVVALQPPAELEVGSAEVIVESLAQGGLASQLPGQRLCAEESFTGPGVLEPSLIITAAVPEDCDT

SEQ ID NO: 9952 - protein, 119 aa, Homo sapiens
MVPRIFAPAYVSVCLLLLCPREVIAPAGSEPWLCQPAPRCGDKIYNPLEQCCYNDAIVSLSETRQCGPPCTFWPCFELCCLDSFGLTNDFVVKLKVQGVNSQCHSSPISSKCESRRRFP

SEQ ID NO: 9953 - protein, 278 aa, Homo sapiens
MPRLSLLLPLLLLLLLPLLPPLSPSLGIRDVGGRRPKCGPCRPEGCPAPAPCPAPGISALDECGCCARCLGAEGASCGGRAGGRCGPGLVCASQAAGAAPEGTGLCVCAQRGTVCGSDGRSYPSVCALRLRARHTPRAHPGHLHKARDGPCEFAPVVVVPPRSVHNVTGAQVGLSCEVRAVPTPVITWRKVTKSPEGTQALEELPGDHVNIAVQVRGGPSDHEATAWILINPLRKEDEGVYQCHAANMVGEAESHSTVTVLDLSKYRSFHFPAPDDRM

SEQ ID NO: 9954 - protein, 517 aa, Homo sapiens [sequence omitted]

SEQ ID NO: 9955 - protein, 702 aa, Homo sapiens
MADSGLLLKRGSCRSTWLRVRKARPQLILSRRPRRRLGSLRWCGRRRLRWRLLQAQASGVDWREGARQVSRAAAARRPNTATPSPIPSPTPASEPESEPELESASSCHRPLLIPPVRPVGPGRALLLLPVEQGFTFSGICRVTCLYGQVQVFGFTISQGQPAQDIFSVYTHSCLSIHALHYSQPEKSKKELKREARNLLKSHLNLDDRRWSMQNFSPQCSIVLLEHLKTATVNFITSYPGSSYIFVQESPTPQIKPEYLALRSVGIRREKKRKGLQLTESTLSALEELVNVSCEEVDGCPVILVCGSQDVGKSTFNRYLINHLLNSLPCVDYLECDLGQTEFTPPGCISLLNITEPVLGPPFTHLRTPQKMVYYGKPSCKNNYENYIDIVKYVFSAYKRESPLIVNTMGWVSDQGLLLLIDLIRLLSPSHVVQFRSDHSKYMPDLTPQYVDDMDGLYTKSKTKMRNRRFRLAAFADALEFADEEKESPVEFTGHKLIGVYTDFAFRITPRNRESHNKILRDLSILSYLSQLQPPMPKPLSPLHSLTPYQVPFNAVALRITHSDVAPTHILYAVNASWVGLCKIQDDVRGYTNGPILLAQTPICDCLGFGICRGIDMEKRLYHILTPVPPEELRTVNCLLVGAIAIPHCVLKCQRGIEGTVPYVTTDYNFKLPGASEKIGAREPEEAHKEKPYRRPKFCRKMK

SEQ ID NO: 9956 - protein, 509 aa, Homo sapiens
MAKWLNKYFSLGNSKTKSPPQPPRPDYREQRRRGERPSQPPQAVPQASSAASASCGPATASCFSASSGSLPDDSGSTSDLIRAYRAQKERDFEDPYNGPGSSLRKLRAMCRLDYCGGSGEPGGVQRAFSASSASGAAGCCCASSGAGAAASSSSSSGSPHLYRSSSERRPATPAEVRYISPKHRLIKVESAAGGGAGDPLGGACAGGRTWSPTACGGKKLLNKCAASAAEESGAGKKDKVTIADDYSDPFDAKNDLKSKAGKGESAGYMEPYEAQRIMTEFQRQESVRSQHKGIQLYDTPYEPEGQSVDSDSESTVSPRLRESKLPQDDDRPADEYDQPWEWNRVTIPALAAQFNGNEKRQSSPSPSRDRRRQLRAPGGGFKPIKHGSPEFCGILGERVDPAVPLEKQIWYHGAISRGDAENLLRLCKECSYLVRNSQTSKHDYSLSLRSNQGFMHMKLAKTKEKYVLGQNSPPFDSVPEVIHYYTTRKLPIKGAEHLSLLYPVAVRTL

SEQ ID NO: 9957 - protein, 930 aa, Homo sapiens
MHYDGHVRFDLPPQGSVLARNVSTRSCPPRTSPAVDLEEEEEESSVDGKGDRKSTGLKLSKKKARRRHTDDPSKECFTLKFDLNVDIETEIVPAMKKKSLGEVLLPVFERKGIALGKVDIYLDQSNTPLSLTFEAYRFGGHYLRVKAPAKPGDEGKVEQGMKDSKSLSLPILRPAGTGPPALERVDAQSRRESLDILAPGRRRKNMSEFLGEASIPGQEPPTPSSCSLPSGSSGSTNTGDSWKNRAASRFSGFFSSGPSTSAFGREVDKMEQLEGKLHTYSLFGLPRLPRGLRFDHDSWEEEYDEDEDEDNACLRLEDSWRELIDGHEKLTRRQCHQQEAVWELLHTEASYIRKLRVIINLFLCCLLNLQESGLLCEVEAERLFSNIPEIAQLHRRLWASVMAPVLEKARRTRALLQPGDFLKGFKMFGSLFKPYIRYCMEEEGCMEYMRGLLRDNDLFRAYITWAEKHPQCQRLKLSDMLAKPHQRLTKYPLLLKSVLRKTEEPRAKEAVVAMIGSVERFIHHVNACMRQRQERQRLAAVVSRIDAYEVVESSSDEVDKLLKEFLHLDLTAPIPGASPEETRQLLLEGSLRMKEGKDSKMDVYCFLFTDLLLVTKAVKKAERTRVIRPPLLVDKIVCRELRDPGSFLLIYLNEFHSAVGAYTFQASGQALCRGWVDTIYNAQNQLQQLRAQEPPGSQQPLQSLEEEEDEQEEEEEEEEEEEEGEDSGTSAASSPTIMRKSSGSPDSQHCASDGSTETLAMVVVEPGDTLSSPEFDSGPFSSQSDETSLSTTASSATPTSELLPLGPVDGRSCSMDSAYGTLSPTSLQDFVAPGPMAELVPRAPESPRVPSPPPSPRLRRRTPVQLLSCPPHLLKSKSEASLLQLLAGAGTHGTPSAPSRSLSELCLAVPAPAQEADPGPALPNQDHPAA

SEQ ID NO: 9958 - protein, 103 aa, Homo sapiens [sequence omitted]

SEQ ID NO: 9959 - protein, 126 aa, Homo sapiens; identical to SEQ ID NO: 5395

SEQ ID NO: 9960 - protein, 103 aa, Homo sapiens [sequence omitted]

SEQ ID NO: 9961 - protein, 404 aa, Homo sapiens
MAAVPELLQQQEEDRSKLRSVSVDLNVDPSLQIDIPDALSERDKVKFTVHTKTTLPTFQSPEFSVTRQHEDFVWLHDTLIETTDYAGLIIPPAPTKPDFDGPREKMQKLGEGEGSMTKEEFAKMKQELEAEYLAVFKKTVSSHEVFLQRLSSHPVLSKDRNFHVFLEYDQDLSVRRKNTKEMFGGFFKSVVKSADEVLFTGVKEVDDFFEQEKNFLINYYNRIKDSCVKADKMTRSHKNVADDYIHTAACLHSLALEEPTVIKKYLLKVAELFEKLRKVEGRVSSDEDLKLTELLRYYMLNIEAAKDLLYRRTKALIDYENSNKALDKARLKSKDVKLAEAHQQECCQKFEQLSESAKEELINFKRKRVAAFRKNLIEMSELEIKHARNNVSLLQSCIDLFKNN

SEQ ID NO: 9962 - protein, 958 aa, Homo sapiens
MLKSKTFLKKTRAGGVMKIVREHYLRDDIGCGAPGCAACGGAHEGPALEPQPQDPASSVCPQPHYLLPDTNVLLHQIDVLEDPAIRNVIVLQTVLQEVRNRSAPVYKRIRDVTNNQEKHFYTFTNEHHRETYVEQEQGENANDRNDRAIRVAAKWYNEHLKKMSADNQLQVIFITNDRRNKEKAIEEGIPAFTCEEYVKSLTANPELIDRLACLSEEGNEIESGKIIFSEHLPLSKLQQGIKSGTYLQGTFRASRENYLEATVWIHGDNEENKEIILQGLKHLNRAVHEDIVAVELLPKSQWVAPSSVVLHDEGQNEEDVEKEEETERMLKTAVSEKMLKPTGRVVGIIKRNWRPYCGMLSKSDIKESRRHLFTPADKRIPRIRIETRQASTLEGRRIIVAIDGWPRNSRYPNGHFVRNLGDVGEKETETEVLLLEHDVPHQPFSQAVLSFLPKMPWSITEKDMKNREDLRHLCICSVDPPGCTDIDDALHCRELENGNLEVGVHIADVSHFIRPGNALDQESARRGTTVYLCEKRIDMVPELLSSNLCSLKCDVDRLAFSCIWEMNHNAEILKTKFTKSVINSKASLTYAEAQLRIDSANMNDDITTSLRGLNKLAKILKKRRIEKGALTLSSPEVRFHMDSETHDPIDLQTKELRETNSMVEEFMLLANISVAKKIHEEFSEHALLRKHPAPPPSNYEILVKAARSRNLEIKTDTAKSLAESLDQAESPTFPYLNTLLRILATRCMMQAVYFCSGMDNDFHHYGLASPIYTHFTSPIRRYADVIVHRLLAVAIGADCTYPELTDKHKLADICKNLNFRHKMAQYAQRASVAFHTQLFFKSKGIVSEEAYILFVRKNAIVVLIPKYGLEGTVFFEEKDKPNPQLIYDDEIPSLKIEDTVFHVFDKVKVKIMLDSSNLQHQKIRMSLVEPQIPGISIPTDTSNMDLNGPKKKKMKLGK

SEQ ID NO: 9963 - protein, 136 aa, Homo sapiens; identical to SEQ ID NO: 7651

SEQ ID NO: 9964 - protein, 928 aa, Homo sapiens
MLKSKTFLKKTRAGGVMKIVREHYLRDDIGCGAPGCAACGGAHEGPALEPQPQDPASSVCPQPHYLLPDTNVLLHQIVSAWRPGTWASVASSLRLPGSLETYVEQEQGENANDRNDRAIRVAAKWYNEHLKKMSADNQLQVIFITNDRRNKEKAIEEGIPAFTCEEYVKSLTANPELIDRLACLSEEGNEIESGKIIFSEHLPLSKLQQGIKSGTYLQGTFRASRENYLEATVWIHGDNEENKEIILQGLKHLNRAVHEDIVAVELLPKSQWVAPSSVVLHDEGQNEEDVEKEEETERMLKTAVSEKMLKPTGRVVGIIKRNWRPYCGMLSKSDIKESRRHLFTPADKRIPRIRIETRQASTLEGRRIIVAIDGWPRNSRYPNGHFVRNLGDVGEKETETEVLLLEHDVPHQPFSQAVLSFLPKMPWSITEKDMKNREDLRHLCICSVDPPGCTDIDDALHCRELENGNLEVGVHIADVSHFIRPGNALDQESARRGTTVYLCEKRIDMVPELLSSNLCSLKCDVDRLAFSCIWEMNHNAEILKTKFTKSVINSKASLTYAEAQLRIDSANMNDDITTSLRGLNKLAKILKKRRIEKGALTLSSPEVRFHMDSETHDPIDLQTKELRETNSMVEEFMLLANISVAKKIHEEFSEHALLRKHPAPPPSNYEILVKAARSRNLEIKTDTAKSLAESLDQAESPTFPYLNTLLRILATRCMMQAVYFCSGMDNDFHHYGLASPIYTHFTSPIRRYADVIVHRLLAVAIGADCTYPELTDKHKLADICKNLNFRHKMAQYAQRASVAFHTQLFFKSKGIVSEEAYILFVRKNAIVVLIPKYGLEGTVFFEEKDKPNPQLIYDDEIPSLKIEDTVFHVFDKVKVKIMLDSSNLQHQKIRMSLVEPQIPGISIPTDTSNMDLNGPKKKKMKLGK

SEQ ID NO: 9965 - protein, 426 aa, Homo sapiens
MEQRPRGCAAVAAALLLVLLGARAQGGTRSPRCDCAGDFHKKIGLFCCRGCPAGHYLKAPCTEPCGNSTCLVCPQDTFLAWENHHNSECARCQACDEQASQVALENCSAVADTRCGCKPGWFVECQVSQCVSSSPFYCQPCLDCGALHRHTRLLCSRRDTDCGTCLPGFYEHGDGCVSCPTPPPSLAGAPWGAVQSAVPLSVAGGRVGVFWVQVLLAGLVVPLLLGATLTYTYRHCWPHKPLVTADEAGMEALTPPPATHLSPLDSAHTLLAPPDSSEKICTVQLVGNSWTPGYPETQEALCPQVTWSWDQLPSRALGPAAAPTLSPESPAGSPAMMLQPGPQLYDVMDAVPARRWKEFVRTLGLREAEIEAVEVEIGRFRDQQYEMLKRWRQQQPAGLGAVYAALERMGLDGCVEDLRSRLQRGP

SEQ ID NO: 9966 - protein, 481 aa, Homo sapiens
MYQASAVSLLPRDIPSCHSPSPGFSHLPTSSSQLAPDLLQFPLGQDPSFLAIPILTLPPSDSLVPPYIVWYIVWPSALISFLGCTLTVQFSNGKLQSPGNMRFTLYENKDSTNPRKRNQRILAAETDRLSYVGNNFGTGALKCNTLCRHFVGILNKTSGQMEVYDAELFNMQPLFSDVSVESELALESQTKTYREKMDSCIEAFGTTKQKRALNTRRMNRVGNESLNRAVAKAAETIIDTKGVTALVSDAIHNDLQDDSLYLPPCYDDAAKPEDVYKFEDLLSPAEYEALQSPSEAFRNVTSEEILKMIEENSHCTFVIEALKSLPSDVESRDRQARCIWFLDTLIKFRAHRVVKRKSALGPGVPHIINTKLLKHFTCLTYNNGRLRNLISDSMKAKITAYVIILALHIHDFQIDLTVLQRDLKLSEKRMMEIAKAMRLKISKRRVSVAAGSEEDHKLGTLSLPLPPAQTSDRLAKRRKIT

SEQ ID NO: 9967 - protein, 1488 aa, Homo sapiens
MAEARKRRELLPLIYHHLLRAGYVRAAREVKEQSGQKCFLAQPVTLLDIYTHWQQTSELGRKRKAEEDAALQAKKTRVSDPISTSESSEEEEEAEAETAKATPRLASTNSSVLGADLPSSMKEKAKAETEKAGKTGNSMPHPATGKTVANLLSGKSPRKSAEPSANTTLVSETEEEGSVPAFGAAAKPGMVSAGQADSSSEDTSSSSDETDVEGKPSVKPAQVKASSVSTKESPARKAAPAPGKVGDVTPQVKGGALPPAKRAKKPEEESESSEEGSESEEEAPAGTRSQVKASEKILQVRAASAPAKGTPGKGATPAPPGKAGAVASQTKAGKPEEDSESSSEESSDSEEETPAAKALLQAKASGKTSQVGAASAPAKESPRKGAAPAPPGKTGPAVAKAQAGKREEDSQSSSEESDSEEEAPAQAKPSGKAPQVRAASAPAKESPRKGAAPAPPRKTGPAAAQVQVGKQEEDSRSSSEESDSDREALAAMNAAQVKPLGKSPQVKPASTMGMGPLGKGAGPVPPGKVGPATPSAQVGKWEEDSESSSEESSDSSDGEVPTAVAPAQEKSLGNILQAKPTSSPAKGPPQKAGPVAVQVKAEKPMDNSESSEESSDSADSEEAPAAMTAAQAKPALKIPQTKACPKKTNTTASAKVAPVRVGTQAPRKAGTATSPAGSSPAVAGGTQRPAEDSSSSEESDSEEEKTGLAVTVGQAKSVGKGLQVKAASVPVKGSLGQGTAPVLPGKTGPTVTQVKAEKQEDSESSEEESDSEEAAASPAQVKTSVKKTQAKANPAAARAPSAKGTISAPGKVVTAAAQAKQRSPSKVKPPVRNPQNSTVLARGPASVPSVGKAVATAAQAQTGPEEDSGSSEEESDSEEEAETLAQVKPSGKTHQIRAALAPAKESPRKGAAPTPPGKTGPSAAQAGKQDDSGSSSEESDSDGEAPAAVTSAQVIKPPLIFVDPNRSPAGPAATPAQAQAASTPRKARASESTARSSSSESEDEDVIPATQCLTPGIRTNVVTMPTAHPRIAPKASMAGASSSKESSRISDGKKQEGPATQVSKKNPASLPLTQAALKVLAQKASEAQPPVARTQPSSGVDSAVGTLPATSPQSTSVQAKGTNKLRKPKLPEVQQATKAPESSDDSEDSSDSSSGSEEDGEGPQGAKSAHTLGPTPSRTETLVEETAAESSEDDVVAPSQSLLSGYMTPGLTPANSQASKATPKLDSSPSVSSTLAAKDDPDGKQEAKPQQAAGMLSPKTGGKEAASGTTPQKSRKPKKGAGNPQASTLALQSNITQCLLGQPWPLNEAQVQASVVKVLTELLEQERKKVVDTTKESSRKGWESRKRKLSGDQPAARTPRSKKKKKLGAGEGGEASVSPEKTSTTSKGKAKRDKASGDVKEKKGKGSLGSQGAKDEPEEELQKGMGTVEGGDQSNPKSKKEKKKSDKRKKDKEKKEKKKKAKKASTKDSESPSQKKKKKKKKTAEQTV

SEQ ID NO: 9968 - protein, 419 aa, Homo sapiens
MAAEVLPSARWQYCGAPDGSQRAVLVQFSNGKLQSPGNMRFTLYENKDSTNPRKRNQRILAAETDRLSYVGNNFGTGALKCNTLCRHFVGILNKTSGQMEVYDAELFNMQPLFSDVSVESELALESQTKTYREKMDSCIEAFGTTKQKRALNTRRMNRVGNESLNRAVAKAAETIIDTKGVTALVSDAIHNDLQDDSLYLPPCYDDAAKPEDVYKFEDLLSPAEYEALQSPSEAFRNVTSEEILKMIEENSHCTFVIEALKSLPSDVESRDRQARCIWFLDTLIKFRAHRVVKRKSALGPGVPHIINTKLLKHFTCLTYNNGRLRNLISDSMKAKITAYVIILALHIHDFQIDLTVLQRDLKLSEKRMMEIAKAMRLKISKRRVSVAAGSEEDHKLGTLSLPLPPAQTSDRLAKRRKIT

SEQ ID NO: 9969 - protein, 103 aa, Homo sapiens [sequence omitted]

SEQ ID NO: 9970 - protein, 153 aa, Homo sapiens
MAAGLFGLSARRLLAAAATRGLPAARVRWESSFSRTVVAPSAVAGKRPPEPTTPWQEDPEPEDENLYEKNPDSHGYDKDPVLDVWNMRLVFFFGVSIILVLGSTFVAYLPDYRMKEWSRREAERLVKYREANGLPIMESNCFDPSKIQLPEDE

SEQ ID NO: 9971 - protein, 82 aa, Homo sapiens
MASSSGAGAAAAAAAANLNAVRETMDVLLEISRILNTGLDMETLSICVRLCEQGINPEALSSVIKELRKATEALKAAENMTS

SEQ ID NO: 9972 - protein, 3623 aa, Homo sapiens
MMNMSLPFLWSLLTLLIFAEVNGEAGELELQRQKRSINLQQPRMATERGNLVFLTGSAQNIEFRTGSLGKIKLNDEDLSECLHQIQKNKEDIIELKGSAIGLPQNISSQIYQLNSKLVDLERKFQGLQQTVDKKVCSSNPCQNGGTCLNLHDSFFCICPPQWKGPLCSADVNECEIYSGTPLSCQNGGTCVNTMGSYSCHCPPETYGPQCASKYDDCEGGSVARCVHGICEDLMREQAGEPKYSCVCDAGWMFSPNSPACTLDRDECSFQPGPCSTLVQCFNTQGSFYCGACPTGWQGNGYICEDINECEINNGGCSVAPPVECVNTPGSSHCQACPPGYQGDGRVCTLTDICSVSNGGCHPDASCSSTLGSLPLCTCLPGYTGNGYGPNGCVQLSNICLSHPCLNGQCIDTVSGYFCKCDSGWTGVNCTENINECLSNPCLNGGTCVDGVDSFSCECTRLWTGALCQVPQQVCGESLSGINGSFSYRSPDVGYVHDVNCFWVIKTEMGKVLRITFTFFRLESMDNCPHEFLQVYDGDSSSAFQLGRFCGSSLPHELLSSDNALYFHLYSEHLRNGRGFTVRWETQQPECGGILTGPYGSIKSPGYPGNYPPGRDCVWIVVTSPDLLVTFTFGTLSLEHHDDCNKDYLEIRDGPLYQDPLLGKFCTTFSVPPLQTTGPFARIHFHSDSQISDQGFHITYLTSPSDLRCGGNYTDPEGELFLPELSGPFTHTRQCVYMMKQPQGEQIQINFTHVELQCQSDSSQNYIEVRDGETLLGKVCGNGTISHIKSITNSVWIRFKIDASVEKASFRAVYQVACGDELTGEGVIRSPFFPNVYPGERTCRWTIHQPQSQVILLNFTVFEIGSSAHCETDYVEIGSSSILGSPENKKYCGTDIPSFITSVYNFLYVTFVKSSSTENHGFMAKFSAEDLACGEILTESTGTIQSPGHPNVYPHGINCTWHILVQPNHLIHLMFETFHLEFHYNCTNDYLEVYDTDSETSLGRYCGKSIPPSLTSSGNSLMLVFVTDSDLAYEGFLINYEAISAATACLQDYTDDLGTFTSPNFPNNYPNNWECIYRITVRTGQLIAVHFTNFSLEEAIGNYYTDFLEIRDGGYEKSPLLGIFYGSNLPPTIISHSNKLWLKFKSDQIDTRSGFSAYWDGSSTGCGGNLTTSSGTFISPNYPMPYYHSSECYWWLKSSHGSAFELEFKDFHLEHHPNCTLDYLAVYDGPSSNSHLLTQLCGDEKPPLIRSSGDSMFIKLRTDEGQQGRGFKAEYRQTCENVVIVNQTYGILESIGYPNPYSENQHCNWTIRATTGNTVNYTFLAFDLEHHINCSTDYLELYDGPRQMGRYCGVDLPPPGSTTSSKLQVLLLTDGVGRREKGFQMQWFVYGCGGELSGATGSFSSPGFPNRYPPNKECIWYIRTDPGSSIQLTIHDFDVEYHSRCNFDVLEIYGGPDFHSPRIAQLCTQRSPENPMQVSSTGNELAIRFKTDLSINGRGFNASWQAVTGGCGGIFQAPSGEIHSPNYPSPYRSNTDCSWVIRVDRNHRVLLNFTDFDLEPQDSCIMAYDGLSSTMSRLARTCGREQLANPIVSSGNSLFLRFQSGPSRQNRGFRAQFRQACGGHILTSSFDTVSSPRFPANYPNNQNCSWIIQAQPPLNHITLSFTHFELERSTTCARDFVEILDGGHEDAPLRGRYCGTDMPHPITSFSSALTLRFVSDSSISAGGFHTTVTASVSACGGTFYMAEGIFNSPGYPDIYPPNVECVWNIVSSPGNRLQLSFISFQLEDSQDCSRDFVEIREGNATGHLVGRYCGNSFPLNYSSIVGHTLWVRFISDGSGSGTGFQATFMKIFGNDNIVGTHGKVASPFWPENYPHNSNYQWTVNVNASHVVHGRILEMDIEEIQNCYYDKLRIYDGPSIHARLIGAYCGTQTESFSSTGNSLTFHFYSDSSISGKGFLLEWFAVDAPDGVLPTIAPGACGGFLRTGDAPVFLFSPGWPDSYSNRVDCTWLIQAPDSTVELNILSLDIESHRTCAYDSLVIRDGDNNLAQQLAVLCGREIPGPIRSTGEYMFIRFTSDSSVTRAGFNASFHKSCGGYLHADRGIITSPKYPETYPSNLNCSWHVLVQSGLTIAVHFEQPFQIPNGDSSCNQGDYLVLRNGPDICSPPLGPPGGNGHFCGSHASSTLFTSDNQMFVQFISDHSNEGQGFKIKYEAKSLACGGNVYIHDADSAGYVTSPNHPHNYPPHADCIWILAAPPETRIQLQFEDRFDIEVTPNCTSNYLELRDGVDSDAPILSKFCGTSLPSSQWSSGEVMYLRFRSDNSPTHVGFKAKYSIAQCGGRVPGQSGVVESIGHPTLPYRDNLFCEWHLQGLSGHYLTISFEDFNLQNSSGCEKDFVEIWDNHTSGNILGRYCGNTIPDSIDTSSNTAVVRFVTDGSVTASGFRLRFESSMEECGGDLQGSIGTFTSPNYPNPNPHGRICEWRITAPEGRRITLMFNNLRLATHPSCNNEHVIVFNGIRSNSPQLEKLCSSVNVSNEIKSSGNTMKVIFFTDGSRPYGGFTASYTSSEDAVCGGSLPNTPEGNFTSPGYDGVRNYSRNLNCEWTLSNPNQGNSSISIHFEDFYLESHQDCQFDVLEFRVGDADGPLMWRLCGPSKPTLPLVIPYSQVWIHFVTNERVEHIGFHAKYSFTDCGGIQIGDSGVITSPNYPNAYDSLTHCSSLLEAPQGHTITLTFSDFDIEPHTTCAWDSVTVRNGGSPESPIIGQYCGNSNPRTIQSGSNQLVVTFNSDHSLQGGGFYATWNTQTLGCGGIFHSDNGTIRSPHWPQNFPENSRCSWTAITHKSKHLEISFDNNFLIPSGDGQCQNSFVKVWAGTEEVDKALLATGCGNVAPGPVITPSNTFTAVFQSQEAPAQGFSASFVSRCGSNFTGPSGYIISPNYPKQYDNNMNCTYVIEANPLSVVLLTFVSFHLEARSAVTGSCVNDGVHIIRGYSVMSTPFATVCGDEMPAPLTIAGPVLLNFYSNEQITDFGFKFSYRIISCGGVFNFSSGIITSPAYSYADYPNDMHCLYTITVSDDKVIELKFSDFDVVPSTSCSHDYLAIYDGANTSDPLLGKFCGSKRPPNVKSSNNSMLLVFKTDSFQTAKGWKMSFRQTLGPQQGCGGYLTGSNNTFASPDSDSNGMYDKNLNCVWIIIAPVNKVIHLTFNTFALEAASTRQRCLYDYVKLYDGDSENANLAGTFCGSTVPAPFISSGNFLTVQFISDLTLEREGFNATYTIMDMPCGGTYNATWTPQNISSPNSSDPDVPFSICTWVIDSPPHQQVKITVWALQLTSQDCTQNYLQLQDSPQGHGNSRFQFCGRNASAVPVFYSSMSTAMVIFKSGVVNRNSRMSFTYQIADCNRDYHKAFGNLRSPGWPDNYDNDKDCTVTLTAPQNHTISLFFHSLGIENSVECRNDFLEVRNGSNSNSPLLGKYCGTLLPNPVFSQNNELYLRFKSDSVTSDRGYEIIWTSSPSGCGGTLYGDRGSFTSPGYPGTYPNNTYCEWVLVAPAGRLVTINFYFISIDDPGDCVQNYLTLYDGPNASSPSSGPYCGGDTSIAPFVASSNQVFIKFHADYARRPSAFRLTWDS

SEQ ID NO: 9973 - protein, 1243 aa, Homo sapiens
METRAAENTAIFMCKCCNLFSPNQSELLSHVSEKHMEEGVNVDEIIIPLRPLSTPEPPNSSKTGDEFLVMKRKRGRPKGSTKKSSTEEELAENIVSPTEDSPLAPEEGNSLPPSSLECSKCCRKFSNTRQLRKHICIIVLNLGEEEGEAGNESDLELEKKCKEDDREKASKRPRSQKTEKVQKISGKEARQLSGAKKPIISVVLTAHEAIPGATKIVPVEAGPPETGATNSETTSADLVPRRGYQEYAIQQTPYEQPMKSSRLGPTQLKIFTCEYCNKVFKFKHSLQAHLRIHTNEKPYKCPQCSYASAIKANLNVHLRKHTGEKFACDYCSFTCLSKGHLKVHIERVHKKIKQHCRFCKKKYSDVKNLIKHIRDAHDPQDKKVKEALDELCLMTREGKRQLLYDCHICERKFKNELDRDRHMLVHGDKWPFACELCGHGATKYQALELHVRKHPFVYVCAVCRKKFVSSIRLRTHIKEVHGAAQEALVFTSSINQSFCLLEPGGDIQQEALGDQLQLVEEEFALQGVNALKEEACPGDTQLEEGRKEPEAPGEMPAPAVHLASPQAESTALPPCELETTVVSSSDLHSQEVVSDDFLLKNDTSSAEAHAAPEKPPDMQHRSSVQTQGEVITLLLSKAQSAGSDQESHGAQSPLGEGQNMAVLSAGDPDPSRCLRSNPAEASDLLPPVAGGGDTITHQPDSCKAAPEHRSGITAFMKVLNSLQKKQMNTSLCERIRKVYGDLECEYCGKLFWYQVHFDMHVRTHTREHLYYCSQCHYSSITKNCLKRHVIQKHSNILLKCPTDGCDYSTPDKYKLQAHLKVHTALDKRSYSCPVCEKSFSEDRLIKSHIKTNHPEVSMSTISEVLGRRVQLKGLIGKRAMKCPYCDFYFMKNGSDLQRHIWAHEGVKPFKCSLCEYATRSKSNLKAHMNRHSTEKTHLCDMCGKKFKSKGTLKSHKLLHTADGKQFKCTVCDYTAAQKPQLLRHMEQHVSFKPFRCAHCHYSCNISGSLKRHYNRKHPNEEYANVGTGELAAEVLIQQGGLKCPVCSFVYGTKWEFNRHLKNKHGLKVVEIDGDPKWETATEAPEEPSTQYLHITEAEEDVQGTQAAVAALQDLRYTSESGDRLDPTAVNILQQIIELGAETHDATALASVVAMAPGTVTVVKQVTEEEPSSNHTVMIQETVQQASVELAEQHHLVVSSDDVEGIETVTVYTQGGEASEFIVYVQEAMQPVEEQAVEQPAQEL

SEQ ID NO: 9974 - protein, 337 aa, Homo sapiens
MASSSGSKAEFIVGGKYKLVRKIGSGSFGDIYLAINITNGEEVAVKLESQKARHPQLLYESKLYKILQGGVGIPHIRWYGQEKDYNVLVMDLLGPSLEDLFNFCSRRFTMKTVLMLADQMISRIEYVHTKNFIHRDIKPDNFLMGIGRHCNKLFLIDFGLAKKYRDNRTRQHIPYREDKNLTGTARYASINAHLGIEQSRRDDMESLGYVLMYFNRTSLPWQGLKAATKKQKYEKISEKKMSTPVEVLCKGFPAEFAMYLNYCRGLRFEEAPDYMYLRQLFRILFRTLNHQYDYTFDWTMLKQKAAQQAASSSGQGQQAQTPTGKQTDKTKSNMKGF

SEQ ID NO: 9975 - protein, 380 aa, Homo sapiens
MKLLARALRLCEFGRQASSRRLVAGQGCVGPRRGCCAPVQVVGPRADLPPCGACITGRIMRPDDANVAGNVHGGTILKMIEEAGAIISTRHCNSQNGERCVAALARVERTDFLSPMCIGEVAHVSAEITYTSKHSVEVQVNVMSENILTGAKKLTNKATLWYVPLSLKNVDKVLEVPPVVYSRQEQEEEGRKRYEAQKLERMETKWRNGDIVQPVLNPEPNTVSYSQSSLIHLVGPSDCTLHGFVHGGVTMKLMDEVAGIVAARHCKTNIVTASVDAINFHDKIRKGCVITISGRMTFTSNKSMEIEVLVDADPVVDSSQKRYRAASAFFTYVSLSQEGRSLPVPQLVPETEDEKKRFEEGKGRYLQMKAKRQGHAEPQP

SEQ ID NO: 9976 - protein, 1032 aa, Homo sapiens
MDLRDFYLLAALIACLRLDSAIAQELIYTIREELPENVPIGNIPKDLNISHINAATGTSASLVYRLVSKAGDAPLVKVSSSTGEIFTTSNRIDREKLCAGASYAEENECFFELEVVILPNDFFRLIKIKIIVKDTNDNAPMFPSPVINISIPENTLINSRFPIPSATDPDTGFNGVQHYELLNGQSVFGLDIVETPEGEKWPQLIVQQNLDREQKDTYVMKIKVEDGGTPQKSSTAILQVTVSDVNDNRPVFKEGQVEVHIPENAPVGTSVIQLHATDADIGSNAEIRYIFGAQVAPATKRLFALNNTTGLITVQRSLDREETAIHKVTVLASDGSSTPARATVTINVTDVNDNPPNIDLRYIISPINGTVYLSEKDPVNTKIALITVSDKDTDVNGKVICFIEREVPFHLKAVYDNQYLLETSSLLDYEGTKEFSFKIVASDSGKPSLNQTALVRVKLEDENDNPPIFNQPVIELSVSENNRRGLYLTTISATDEDSGKNADIVYQLGPNASFFDLDRKTGVLTASRVFDREEQERFIFTVTARDNGTPPLQSQAAVIVTVLDENDNSPKFTHNHFQFFVSENLPKYSTVGVITVTDADAGENKAVTLSILNDNDNFVLDPYSGVIKSNVSFDREQQSSYTFDVKATDGGQPPRSSTAKVTINVMDVNDNSPVVISPPSNTSFKLVPLSAIPGSVVAEVFAVDVDTGMNAELKYTIVSGNNKGLFRIDPVTGNITLEEKPAPTDVGLHRLVVNISDLGYPKSLHTLVLVFLYVNDTAGNASYIYDLIRRTMETPLDRNIGDSSQPYQNEDYLTIMIAIIAGAMVVIVVIFVTVLVRCRHASRFKAAQRSKQGAEWMSPNQENKQNKKKKRKKRKSPKSSLLNFVTIEESKPDDAVHEPINGTISLPAELEEQSIGRFDWGPAPPTTFKPNSPDLAKHYKSASPQPAFHLKPDTPVSVKKHHVIQELPLDNTFVGGCDTLSKRSSTSSDHFSASECSSQGGFKTKGPLHTRQVNEHFYWSISTAYKCPVNQY

SEQ ID NO: 9977 - protein, 1237 aa, Homo sapiens
MDLRDFYLLAALIACLRLDSAIAQELIYTIREELPENVPIGNIPKDLNISHINAATGTSASLVYRLVSKAGDAPLVKVSSSTGEIFTTSNRIDREKLCAGASYAEENECFFELEVVILPNDFFRLIKIKIIVKDTNDNAPMFPSPVINISIPENTLINSRFPIPSATDPDTGFNGVQHYELLNGQSVFGLDIVETPEGEKWPQLIVQQNLDREQKDTYVMKIKVEDGGTPQKSSTAILQVTVSDVNDNRPVFKEGQVEVHIPENAPVGTSVIQLHATDADIGSNAEIRYIFGAQVAPATKRLFALNNTTGLITVQRSLDREETAIHKVTVLASDGSSTPARATVTINVTDVNDNPPNIDLRYIISPINGTVYLSEKDPVNTKIALITVSDKDTDVNGKVICFIEREVPFHLKAVYDNQYLLETSSLLDYEGTKEFSFKIVASDSGKPSLNQTALVRVKLEDENDNPPIFNQPVIELSVSENNRRGLYLTTISATDEDSGKNADIVYQLGPNASFFDLDRKTGVLTASRVFDREEQERFIFTVTARDNGTPPLQSQAAVIVTVLDENDNSPKFTHNHFQFFVSENLPKYSTVGVITVTDADAGENKAVTLSILNDNDNFVLDPYSGVIKSNVSFDREQQSSYTFDVKATDGGQPPRSSTAKVTINVMDVNDNSPVVISPPSNTSFKLVPLSAIPGSVVAEVFAVDVDTGMNAELKYTIVSGNNKGLFRIDPVTGNITLEEKPAPTDVGLHRLVVNISDLGYPKSLHTLVLVFLYVNDTAGNASYIYDLIRRTMETPLDRNIGDSSQPYQNEDYLTIMIAIIAGAMVVIVVIFVTVLVRCRHASRFKAAQRSKQGAEWMSPNQENKQNKKKKRKKRKSPKSSLLNFVTIEESKPDDAVHEPINGTISLPAELEEQSIGRFDWGPAPPTTFKPNSPDLAKHYKSASPQPAFHLKPDTPVSVKKHHVIQELPLDNTFVGGCDTLSKRSSTSSDHFSASECSSQGGFKTKGPLHTRQCNSHSKSDNIPVTPQKCPSSTGFHIQENEESHYESQRRVTFHLPDGSQESCSDSGLGDHEPVGSGTLISHPLPLVQPQDEFYDQASPDKRTEADGNSDPNSDGPLGPRGLAEATEMCTQECLVLGHSDNCWMPPGLGPYQHPKSPLSTFAPQKEWVKKDKLVNGHTLTRAWKEDSNRNQFNDRKQYGSNEGHFNNGSHMTDIPLANLKSYKQAGGATESPKEHQL

SEQ ID NO: 9978 - protein, 609 aa, Homo sapiens
MSDERRLPGSAVGWLVCGGLSLLANAWGILSVGAKQKKWKPLEFLLCTLAATHMLNVAVPIATYSVVQLRRQRPDFEWNEGLCKVFVSTFYTLTLATCFSVTSLSYHRMWMVCWPVNYRLSNAKKQAVHTVMGIWMVSFILSALPAVGWHDTSERFYTHGCRFIVAEIGLGFGVCFLLLVGGSVAMGVICTAIALFQTLAVQVGRQADRRAFTVPTIVVEDAQGKRRSSIDGSEPAKTSLQTTGLVTTIVFIYDCLMGFPVLVVSFSSLRADASAPWMALCVLWCSVAQALLLPVFLWACDRYRADLKAVREKCMALMANDEESDDETSLEGGISPDLVLERSLDYGYGGDFVALDRMAKYEISALEGGLPQLYPLRPLQEDKMQYLQVPPTRRFSHDDADVWAAVPLPAFLPRWGSGEDLAALAHLVLPAGPERRRASLLAFAEDAPPSRARRRSAESLLSLRPSALDSGPRGARDSPPGSPRRRPGPGPRSASASLLPDAFALTAFECEPQALRRPPGPFPAAPAAPDGADPGEAPTPPSSAQRSPGPRPSAHSHAGSLRPGLSASWGEPGGLRAAGGGGSTSSFLSSPSESSGYATLHSDSLGSAS

SEQ ID NO: 9979 - protein, 86 aa, Homo sapiens
MRATAIVLLLALTLATMFSIECAKQTKQMVDCSHYKKLPPGQQRFCHHMYDPICGSDGKTYKNDCFFCSKVKKTDGTLKFVHFGKC

SEQ ID NO: 9980 - protein, 1159 aa, Homo sapiens
MYLSICCCFLLWAPALTLKNLNYSVPEEQGAGTVIGNIGRDARLQPGLPPAERGGGGRSKSGSYRVLENSAPHLLDVDADSGLLYTKQRIDRESLCRHNAKCQLSLEVFANDKEICMIKVEIQDINDNAPSFSSDQIEMDISENAAPGTRFPLTSAHDPDAGENGLRTYLLTRDDHGLFGLDVKSRGDGTKFPELVIQKALDREQQNHHTLVLTALDGGEPPRSATVQINVKVIDSNDNSPVFEAPSYLVELPENAPLGTVVIDLNATDADEGPNGEVLYSFSSYVPDRVRELFSIDPKTGLIRVKGNLDYEENGMLEIDVQARDLGPNPIPAHCKVTVKLIDRNDNAPSIGFVSVRQGALSEAAPPGTVIALVRVTDRDSGKNGQLQCRVLGGGGTGGGGGLGGPGGSVPFKLEENYDNFYTVVTDRPLDRETQDEYNVTIVARDGGSPPLNSTKSFAIKILDENDNPPRFTKGLYVLQVHENNIPGEYLGSVLAQDPDLGQNGTVSYSILPSHIGDVSIYTYVSVNPTNGAIYALRSFNFEQTKAFEFKVLAKDSGAPAHLESNATVRVTVLDVNDNAPVIVLPTLQNDTAELQVPRNAGLGYLVSTVRALDSDFGESGRLTYEIVDGNDDHLFEIDPSSGEIRTLHPFWEDVTPVVELVVKVTDHGKPTLSAVAKLIIRSVSGSLPEGVPRVNGEQHHWDMSLPLIVTLSTISIILLAAMITIAVKCKRENKEIRTYNCRIAEYSHPQLGGGKGKKKKINKNDIMLVQSEVEERNAMNVMNVVSSPSLATSPMYFDYQTRLPLSSPRSEVMYLKPASNNLTVPQGHAGCHTSFTGQGTNASETPATRMSIIQTDNFPAEPNYMGSRQQFVQSSSTFKDPERASLRDSGHGDSDQADSDQDTNKGSCCDMSVREALKMKTTSTKSQPLEQEPEECVNCTDECRVLGHSDRCWMPQFPAANQAENADYRTNLFVPTVEANVETETYETVNPTGKKTFCTFGKDKREHTILIANVKPYLKAKRALSPLLQEVPSASSSPTKACIEPCTSTKGSLDGCEAKPGALAEASSQYLPTDSQYLSPSKQPRDPPFMASDQMARVFADVHSRASRDSSEMGAVLEQLDHPNRDLGRESVDAEEVVREIDKLLQDCRGNDPVAVRK

SEQ ID NO: 9981 - protein, 185 aa, Homo sapiens
MKFTIVFAGLLGVFLAPALANYNINVNDDNNNAGSGQQSVSVNNEHNVANVDNNNGWDSWNSIWDYGNGFAATRLFQKKTCIVHKMNKEVMPSIQSLDALVKEKKLQGKGPGGPPPKGLMYSVNPNKVDDLSKFGKNIANMCRGIPTYMAEEMQEASLFFYSGTCYTTSVLWIVDISFCGDTVEN

SEQ ID NO: 9982 - protein, 316 aa, Homo sapiens
MMRTCVLLSAVLWCLTGDKIYVELHQNSPVLICMDFKLSKKEIVDPTYLWIGPNEKTLTGNNRINITETGQLMVKDFLEPLSGLYTCTLSYKTVKAETQEEKTVKKRYDFMVFAYREPDYSYQMAVRFTTRSCIGRYNDVFFRVLKKILDSLISDLSCHVIEPSYKCHSVEIPEHGLIHELFIAFQVNPFAPGWKGACNGSVDCEDTTNHNILQARDRIEDFFRSQAYIFYHNFNKTLPAMHFVDHSLQVVRLDSCRPGFGKNERLHSNCASCCVVCSPATFSPDVNVTCQTCVSVLTYGAKSCPQTSNKNQQYED

SEQ ID NO: 9983 - protein, 1070 aa, Homo sapiens
MSPVRRWGSPCLFPLQLFSLCWVLSVAQSKTVRYSTFEEDAPGTVIGTLAEDLHMKVSGDTSFRLMKQFNSSLLRVREGDGQLTVGDAGLDRERLCGQAPQCVLAFDVVSFSQEQFRLVHVEVEVRDVNDHAPRFPRAQIPVEVSEGAAVGTRIPLEVPVDEDVGANGLQTVRLAEPHSPFRVELQTRADGAQCADLVLLQELDRESQAAYSLELVAQDGGRPPRSATAALSVRVLDANDHSPAFPQGAVAEVELAEDAPVGSLLLDLDAADPDEGPNGDVVFAFGARTPPEARRLFRLDPRSGRLTLAGPVDYERQDTYELDVRAQDRGPGPRAATCKVIVRIRDVNDNAPDIAITPLAAPGAPATSPFAAAAAAAALGGADASSPAGAGTPEAGATSLVPEGAARESLVALVSTSDRDSGANGQVRCALYGHEHFRLQPAYAGSYLVVTAASLDRERIAEYNLTLVAEDRGAPPLRTVRPYTVRVGDENDNAPLFTRPVYEVSVRENNPPGAYLATVAARDRDLGRNGQVTYRLLEAEVGRAGGAVSTYVSVDPATGAIYALRSFDYETLRQLDVRIQASDGGSPQLSSSALVQVRVLDQNDHAPVLVHPAPANGSLEVAVPGRTAKDTVVARVQARDADEGANGELAFELQQQEPREAFAIGRRTGEILLTGDLSQEPPGRVFRALLVISDGGRPPLTTTATVSFVVTAGGGRGPAAPASAGSPERSRPPGSRLGVSGSVLQWDTPLIVIIVLAGSCTLLLAAIIAIATTCNRRKKEVRKGGALREERPGAAGGGASAPGSPEEAARGAGPRPNMFDVLTFPGTGKAPFGSPAADAPPPAVAAAEVPGSEGGSATGESACHFEGQQRLRGAHAEPYGASPGFGKEPAPPVAVWKGHSFNTISGREAEKFSGKDSGKGDSDFNDSDSDISGDALKKDLINHMQSGLWACTAECKILGHSDRCWSPSCSGPNAHPSPHPPAQMSTFCKSTSLPRDPLRRDNYYQAQLPKTVGLQSVYEKVLHRDYDRTVTLLSPPRPGRLPDLQEIGVPLYQSPPGRYLSPKKGANENV

SEQ ID NO: 9984 - protein, 251 aa, Homo sapiens
MAMGVPRVILLCLFGAALCLTGSQALQCYSFEHTYFGPFDLRAMKLPSISCPHECFEAILSLDTGYRAPVTLVRKGCWTGPPAGQTQSNADALPPDYSVVRGCTTDKCNAHLMTHDALPNLSQAPDPPTLSGAECYACIGVHQDDCAIGRSRRVQCHQDQTACFQGNGRMTVGNFSVPVYIRTCHRPSCTTEGTTSPWTAIDLQGSCCEGYLCNRKSMTQPFTSASATTPPRALQVLALLLPVLLLVGLSA

SEQ ID NO: 9985 - protein, 155 aa, Homo sapiens
MHKNSKRNNNLRVSHTEANSVDAEKEKNESQNNFFELLPAEITFKIFSQLDIRSLCRASLTCRSWNDTIRNSDSLWKPHCMTVRAVCRREIDDDLESGYSWRVILLRNYQKSKVKHEWLSGRYSNICSPISLPEKIMYPMDADTWGEILEAELER

SEQ ID NO: 9986 - protein, 154 aa, Homo sapiens
MGKSASKQFHNEVLKAHNEYRQKHGVPPLKLCKNLNREAQQYSEALASTRILKHSPESSRGQCGENLAWASYDQTGKEVADRWYSEIKNYNFQQPGFTSGTGHFTAMVWKNTKKMGVGKASASDGSSFVVARYFPAGNVVNEGFFEENVLPPKK

SEQ ID NO: 9987 - protein, 971 aa, Homo sapiens
MATVRASLRGALLLLLAVAGVAEVAGGLAPGSAGALCCNHSKDNQMCRDVCEQIFSSKSESRLKHLLQRAPDYCPETMVEIWNCMNSSLPGVFKKSDGWVGLGCCELAIALECRQACKQASSKNDISKVCRKEYENALFSCISRNEMGSVCCSYAGHHTNCREYCQAIFRTDSSPGPSQIKAVENYCASISPQLIHCVNNYTQSYPMRNPTDSLYCCDRAEDHACQNACKRILMSKKTEMEIVDGLIEGCKTQPLPQDPLWQCFLESSQSVHPGVTVHPPPSTGLDGAKLHCCSKANTSTCRELCTKLYSMSWGNTQSWQEFDRFCEYNPVEVSMLTCLADVREPCQLGCRNLTYCTNFNNRPTELFRSCNAQSDQGAMNDMKLWEKGSIKMPFINIPVLDIKKCQPEMWKAIACSLQIKPCHSKSRGSIICKSDCVEILKKCGDQNKFPEDHTAESICELLSPTDDLKNCIPLDTYLRPSTLGNIVEEVTHPCNPNPCPANELCEVNRKGCPSGDPCLPYFCVQGCKLGEASDFIVRQGTLIQVPSSAGEVGCYKICSCGQSGLLENCMEMHCIDLQKSCIVGGKRKSHGTSFSIDCNVCSCFAGNLVCSTRLCLSEHSSEDDRRTFTGLPCNCADQFVPVCGQNGRTYPSACIARCVGLQDHQFEFGSCMSKDPCNPNPCQKNQRCIPKPQVCLTTFDKFGCSQYECVPRQLACDQVQDPVCDTDHMEHNNLCTLYQRGKSLSYKGPCQPFCRATEPVCGHNGETYSSVCAAYSDRVAVDYYGDCQAVGVLSEHSSVAECASVKCPSLLAAGCKPIIPPGACCPLCAGMLRVLFDKEKLDTIAKVTNKKPITVLEILQKIRMHVSVPQCDVFGYFSIESEIVILIIPVDHYPKALQIEACNKEAEKIESLINSDSPTLASHVPLSALIISQVQVSSSVPSAGVRARPSCHSLLLPLSLGLALHLLWTYN

SEQ ID NO: 9988 - protein, 439 aa, Homo sapiens
MPLNVSFTNRNYDLDYDSVQPYFYCDEEENFYQQQQQSELQPPAPSEDIWKKFELLPTPPLSPSRRSGLCSPSYVAVTPFSLRGDNDGGGGSFSTADQLEMVTELLGGDMVNQSFICDPDDETFIKNIIIQDCMWSGFSAAAKLVSEKLASYQAARKDSGSPNPARGHSVCSTSSLYLQDLSAAASECIDPSVVFPYPLNDSSSPKSCASQDSSAFSPSSDSLLSSTESSPQGSPEPLVLHEETPPTTSSDSEEEQEDEEEIDVVSVEKRQAPGKRSESGSPSAGGHSKPPHSPLVLKRCHVSTHQHNYAAPPSTRKDYPAAKRVKLDSVRVLRQISNNRKCTSPRSSDTEENVKRRTHNVLERQRRNELKRSFFALRDQIPELENNEKAPKVVILKKATAYILSVQAEEQKLISEEDLLRKRREQLKHKLEQLRNSCA

SEQ ID NO: 9989 - protein, 365 aa, Homo sapiens
MAAAAAGTATSQRFFQSFSDALIDEDPQAALEELTKALEQKPDDAQYYCQRAYCHILLGNYCVAVADAKKSLELNPNNSTAMLRKGICEYHEKNYAAALETFTEGQKLDIETGFHRVGQAGLQLLTSSDPPALDSQSAGITGADANFSVWIKRCQEAQNGSESEVWTHQSKIKYDWYQTESQVVITLMIKNVQKNDVNVEFSEKELSALVKLPSGEDYNLKLELLHPIIPEQSTFKVLSTKIEIKLKKPEAVRWEKLEGQGDVPTPKQFVADVKNLYPSSSPYTRNWDKLVGEIKEEEKNEKLEGDAALNRLFQQIYSDGSDEVKRAMNKSFMESGGTVLSTNWSDVGKRKVEINPPDDMEWKKY

SEQ ID NO: 9990 - protein, 757 aa, Homo sapiens
MALGEEKAEAEASEDTKAQSYGRGSCRERELDIPGPMSGEQPPRLEAEGGLISPVWGAEGIPAPTCWIGTDPGGPSRAHQPQASDANREPVAERSEPALSGLPPATMGSGDLLLSGESQVEKTKLSSSEEFPQTLSLPRTTTICSGHDADTEDDPSLADLPQALDLSQQPHSSGLSCLSQWKSVLSPGSAAQPSSCSISASSTGSSLQGHQERAEPRGGSLAKVSSSLEPVVPQEPSSVVGLGPRPQWSPQPVFSGGDASGLGRRRLSFQAEYWACVLPDSLPPSPDRHSPLWNPNKEYEDLLDYTYPLRPGPQLPKHLDSRVPADPVLQDSGVDLDSFSVSPASTLKSPTNVSPNCPPAEATALPFSGPREPSLKQWPSRVPQKQGGMGLASWSQLASTPRAPGSRDARWERREPALRGAKDRLTIGKHLDMGSPQLRTRDRGWPSPRPEREKRTSQSARRPTCTESRWKSEEEVESDDEYLALPARLTQVSSLVSYLGSISTLVTLPTGDIKGQSPLEVSDSDGPASFPSSSSQSQLPPGAALQGSGDPEGQNPCFLRSFVRAHDSAGEGSLGSSQALGVSSGLLKTRPSLPARLDRWPFSDPDVEGQLPRKGGEQGKESLVQCVKTFCCQLEELICWLYNVADVTDHGTAARSNLTSLKSSLQLYRQFKKDIDEHQSLTESVLQKGEILLQCLLENTPVLEDVLGRIAKQSGELESHADRLYDSILASLDMLAGCTLIPDKKPMAAMEHPCEGV

SEQ ID NO: 9991 - protein, 349 aa, Homo sapiens
MSSLSGKVQTVLGLVEPSKLGRTLTHEHLAMTFDCCYCPPPPCQEAISKEPIVMKNLYWIQKNAYSHKENLQLNQETEAIKEELLYFKANGGGALVENTTTGISRDTQTLKRLAEETGVHIISGAGFYVDATHSSETRAMSVEQLTDVLMNEILHGADGTSIKCGIIGEIGCSWPLTESERKVLQATAHAQAQLGCPVIIHPGRSSRAPFQIIRILQEAGADISKTVMSHLDRTILDKKELLEFAQLGCYLEYDLFGTELLHYQLGPDIDMPDDNKRIRRVRLLVEEGCEDRILVAHDIHTKTRLMKYGGHGYSHILTNVVPKMLLRGITENVLDKILIENPKQWLTFK

SEQ ID NO: 9992 - protein, 269 aa, Homo sapiens
MAGLAARLVLLAGAAALASGSQGDREPVYRDCVLQCEEQNCSGGALNHFRSRQPIYMSLAGWTCRDDCKYECMWVTVGLYLQEGHKVPQFHGKVSLNAWFWSTVFHTRDTDLTEKMDYFCASTVILHSIYLCCVRTVGLQHPAVVSAFRALLLLMLTVHVSYLSLIRFDYGYNLVANVAIGLVNVVWWLAWCLWNQRRLPHVRKCVVVVLLLQGLSLLELLDFPPLFWVLDAHAIWHISTIPVHVLFFSFLEDDSLYLLKESEDKFKLD

SEQ ID NO: 9993 - protein, 145 aa, Homo sapiens
MSAVLLLALLGFILPLPGVQALLCQFGTVQHVWKVSDLPRQWTPKNTSCDSGLGCQDTLMLIESGPQVSLVLSKGCTEAKDQEPRVTEHRMGPGLSLISYTFVCRQEDFCNNLVNSLPLWAPQPPADPMMGAAEGPFGKAEQVDS

SEQ ID NO: 9994 - protein, 591 aa, Homo sapiens
MLVGSQSFSPGGPNGIIRSQSFAGFSGLQERRSRCNSFIENSSALKKPQAKLKKMHNLGHKNNNPPKEPQPKRVEEVYRALKNGLDEYLEVHQTELDKLTAQLKDMKRNSRLGVLYDLDKQIKTIERYMRRLEFHISKVDELYEAYCIQRRLQDGASKMKQAFATSPASKAARESLTEINRSFKEYTENMCTIEVELENLLGEFSIKMKGLAGFARLCPGDQYEIFMKYGRQRWKLKGKIEVNGKQSWDGEETVFLPLIVGFISIKVTELKGLATHILVGSVTCETKELFAARPQVVAVDINDLGTIKLNLEITWYPFDVEDMTASSGAGNKAAALQRRMSMYSQGTPETPTFKDHSFFSNLPDDIFENGKAAEEKMPLSLSFSDLPNGDCALTSHSTGSPSNSTNPEITITPAEFNLSSLASQNEGMDDTSSASSRNSLGEGQEPKSHLKEEDPEEPRKPASAPSEACRRQSSGAGAEHLFLENDVAEALLQESEEASELKPVELDTSEGNITKQLVKRLTSAEVPMATDRLLSEGSVGGESEGCRSFLDGSLEDAFNGLLLALEPHKEQYKEFQDLNQEVMNLDDILKK

SEQ ID NO: 9995 - protein, 5890 aa, Homo sapiens
MEKEETTRELLLPNWQGSGSHGLTIAQRDDGVFVQEVTQNSPAARTGVVKEGDQIVGATIYFDNLQSGEVTQLLNTMGHHTVGLKLHRKGDRSPEPGQTWTREVFSSCSSEVVLSGDDEEYQRIYTTKIKPRLKSEDGVEGDLGETQSRTITVTRRVTAYTVDVTGREGAKDIDISSPEFKIKIPRHELTEISNVDVETQSGKTVIRLPSGSGAASPTGSAVDIRAGAISASGPELQGAGHSKLQVTMPGIKVGGSGVNVNAKGLDLGGRGGVQVPAVDISSSLGGRAVEVQGPSLESGDHGKIKFPTMKVPKFGVSTGREGQTPKAGLRVSAPEVSVGHKGGKPGLTIQAPQLEVSVPSANIEGLEGKLKGPQITGPSLEGDLGLKGAKPQGHIGVDASAPQIGGSITGPSVEVQAPDIDVQGPGSKLNVPKMKVPKFSVSGAKGEETGIDVTLPTGEVTVPGVSGDVSLPEIATGGLEGKMKGTKVKTPEMIIQKPKISMQDVDLSLGSPKLKGDIKVSAPGVQGDVKGPQVALKGSRVDIETPNLEGTLTGPRLGSPSGKTGTCRISMSEVDLNVAAPKVKGGVDVTLPRVEGKVKVPEVDVRGPKVDVSAPDVEAHGPEWNLKMPKMKMPTFSTPGAKGEGPDVHMTLPKGDISISGPKVNVEAPDVNLEGLGGKLKGPDVKLPDMSVKTPKISMPDVDLHVKGTKVKGEYDVTVPKLEGELKGPKVDIDAPDVDVHGPDWHLKMPKMKMPKFSVPGFKAEGPEVDVNLPKADVDISGPKIDVTAPDVSIEEPEGKLKGPKFKMPEMNIKVPKISMPDVDLHLKGPNVKGEYDVTMPKVESEIKVPDVELKSAKMDIDVPDVEVQGPDWHLKMPKMKMPKFSMPGFKAEGPEVDVNLPKADVDISGPKVGVEVPDVNIEGPEGKLKGPKFKMPEMNIKAPKISMPDVDLHMKGPKVKGEYDMTVPKLEGDLKGPKVDVSAPDVEMQGPDWNLKMPKIKMPKFSMPSLKGEGPEFDVNLSKANVDISAPKVDTNAPDLSLEGPEGKLKGPKFKMPEMHFRAPKMSLPDVDLDLKGPKMKGNVDISAPKIEGEMQVPDVDIRGPKVDIKAPDVEGQGLDWSLKIPKMKMPKFSMPSLKGEGPEVDVNLPKADVVVSGPKVDIEAPDVSLEGPEGKLKGPKFKMPEMHFKTPKISMPDVDLHLKGPKVKGDVDVSVPKVEGEMKVPDVEIKGPKMDIDAPDVEVQGPDWHLKMPKMKMPKFSMPGFKGEGREVDVNLPKADIDVSGPKVDVEVPDVSLEGPEGKLKGPKFKMPEMHFKAPKISMPDVDLNLKGPKLKGDVDVSLPEVEGEMKVPDVDIKGPKVDISAPDVDVHGPDWHLKMPKVKMPKFSMPGFKGEGPEVDVKLPKADVDVSGPKMDAEVPDVNIEGPDAKLKGPKFKMPEMSIKPQKISIPDVGLHLKGPKMKGDYDVTVPKVEGEIKAPDVDIKGPKVDINAPDVEVHGPDWHLKMPKVKMPKFSMPGFKGEGPEVDMNLPKADLGVSGPKVDIDVPDVNLEAPEGKLKGPKFKMPSMNIQTHKISMPDVGLNLKAPKLKTDVDVSLPKVEGDLKGPEIDVKAPKMDVNVGDIDIEGPEGKLKGPKFKMPEMHFKAPKISMPDVDLHLKGPKVKGDMDVSVPKVEGEMKVPDVDIKGPKVDIDAPDVEVHDPDWHLKMPKMKMPKFSMPGFKAEGPEVDVNLPKADIDVSGPSVDTDAPDLDIEGPEGKLKGSKFKMPKLNIKAPKVSMPDVDLNLKGPKLKGEIDASVPELEGDLRGPQVDVKGPFVEAEVPDVDLECPDAKLKGPKFKMPEMHFKAPKISMPDVDLHLKGPKVKGDADVSVPKLEGDLTGPSVGVEVPDVELECPDAKLKGPKFKMPDMHFKAPKISMPDVDLHLKGPKVKGDVDVSVPKLEGDLTGPSVGVEVPDVELECPDAKLKGPKFKMPEMHFKTPKISMPDVDLHLKGPKVKGDMDVSVPKVEGEMKVPDVDIKGPKMDIDAPDVDVHGPDWHLKMPKMKMPKFSMPGFKAEGPEVDVNLPKADVVVSGPKVDVEVPDVSLEGPEGKLKGPKLKMPEMHFKAPKISMPDVDLHLKGPKVKGDVDVSLPKLEGDLTGPSVDVEVPDVELECPDAKLKGPKFKMPEMHFKTPKISMPDVNLNLKGPKVKGDMDVSVPKVEGEMKVPDVDIRGPKVDIDAPDVDVHGPDWHLKMPKMKMPKFSMPGFKGEGPEVDVNLPKADVDVSGPKVDVEVPDVSLEGPEGKLKGPKFKMPEMHFKTPKISMPDVDFNLKGPKIKGDVDVSAPKLEGELKGPELDVKGPKLDADMPEVAVEGPNGKWKTPKFKMPDMHFKAPKISMPDLDLHLKSPKAKGEVDVDVPKLEGDLKGPHVDVSGPDIDIEGPEGKLKGPKFKMPDMHFKAPNISMPDVDLNLKGPKIKGDVDVSVPEVEGKLEVPDMNIRGPKVDVNAPDVQAPDWHLKMPKMKMPKFSMPGFKAEGPEVDVNLPKADVDISGPKVDIEGPDVNIEGPEGKLKGPKLKMPEMNIKAPKISMPDFDLHLKGPKVKGDVDVSLPKVEGDLKGPEVDIKGPKVDINAPDVGVQGPDWHLKMPKVKMPKFSMPGFKGEGPDGDVKLPKADIDVSGPKVDIEGPDVNIEGPEGKLKGPKFKMPEMNIKAPKISMPDIDLNLKGPKVKGDVDVSLPKVEGDLKGPEVDIKGPKVDIDAPDVDVHGPDWHLKMPKIKMPKISMPGFKGEGPDVDVNLPKADIDVSGPKVDVECPDVNIEGPEGKWKSPKFKMPEMHFKTPKISMPDIDLNLTGPKIKGDVDVTGPKVEGDLKGPEVDLKGPKVDIDVPDVNVQGPDWHLKMPKMKMPKFSMPGFKAEGPEVDVNLPKADVDVSGPKVDVEGPDVNIEGPEGKLKGPKFKMPEMNIKAPKIPMPDFDLHLKGPKVKGDVDISLPKVEGDLKGPEVDIRGPQVDIDVPDVGVQGPDWHLKMPKVKMPKFSMPGFKGEGPDVDVNLPKADLDVSGPKVDIDVPDVNIEGPEGKLKGPKFKMPEMNIKAPKISMPDIDLNLKGPKVKGDMDVSLPKVEGDMKVPDVDIKGPKVDINAPDVDVQGPDWHLKMPKIKMPKISMPGFKGEGPEVDVNLPKADLDVSGPKVDVDVPDVNIEGPDAKLKGPKFKMPEMNIKAPKISMPDLDLNLKGPKMKGEVDVSLANVEGDLKGPALDIKGPKIDVDAPDIDIHGPDAKLKGPKLKMPDMHVNMPKISMPEIDLNLKGSKLKGDVDVSGPKLEGDIKAPSLDIKGPEVDVSGPKLNIEGKSKKSRFKLPKFNFSGSKVQTPEVDVKGKKPDIDITGPKVDINAPDVEVQGKVKGSKFKMPFLSISSPKVSMPDVELNLKSPKVKGDLDIAGPNLEGDFKGPKVDIKAPEVNLNAPDVDVHGPDWNLKMPKMKMPKFSVSGLKAEGPDVAVDLPKGDINIEGPSMNIEGPDLNVEGPEGGLKGPKFKMPDMNIKAPKISMPDIDLNLKGPKVKGDVDISLPKLEGDLKGPEVDIKGPKVDINAPDVDVHGPDWHLKMPKVKMPKFSMPGFKGEGPEVDVTLPKADIDISGPNVDVDVPDVNIEGPDAKLKGPKFKMPEMNIKAPKISMPDFDLNLKGPKMKGDVVVSLPKVEGDLKGPEVDIKGPKVDIDTPDINIEGSEGKFKGPKFKIPEMHLKAPKISMPDIDLNLKGPKVKGDVDVSLPKMEGDLKGPEVDIKGPKVDINAPDVDVQGPDWHLKMPKVKMPKFSMPGFKGEGPDVDVNLPKADLDVSGPKVDIDVPDVNIEGPEGKLKGPKFKMPEMNIKAPKISMPDIDLNLKGPKVKGDMDVSLPKVEGDMQVPDLDIKGPKVDINAPDVDVRGPDWHLKMPKIKMPKISMPGFKGEGPEVDVNLPKADLDVSGPKVDVDVPDVNIEGPDAKLKGPKFKMPEMNIKAPKISMPDFDLHLKGPKVKGDVDVSLPKMEGDLKAPEVDIKGPKVDIDAPDVDVHGPDWHLKMPKVKMPKFSMPGFKGEGPEVDVNLPKADIDVSGPKVDIDTPDIDIHGPEGKLKGPKFKMPDLHLKAPKISMPEVDLNLKGPKMKGDVDVSLPKVEGDLKGPEVDIKGPKVDIDVPDVDVQGPDWHLKMPKVKMPKFSMPGFKGEGPDVDVNLPKADLDVSGPKVDIDVPDVNIEGPDAKLKGPKFKMPEMNIKAPKISMPDFDLHLKGPKVKGDVDVSLPKVEGDLKGPEVDIKGPKVDIDAPDVDVHGPDWHLKMPKVKMPKFSMPGFKGEGPDVDVTLPKADIEISGPKVDIDAPDVSIEGPDAKLKGPKFKMPEMNIKAPKISMPDIDFNLKGPKVKGDVDVSLPKVEGDLKGPEIDIKGPSLDIDTPDVNIEGPEGKLKGPKFKMPEMNIKAPKISMPDFDLHLKGPKVKGDVDVSLPKVESDLKGPEVDIEGPEGKLKGPKFKMPDVHFKSPQISMSDIDLNLKGPKIKGDMDISVPKLEGDLKGPKVDVKGPKVGIDTPDIDIHGPEGKLKGPKFKMPDLHLKAPKISMPEVDLNLKGPKVKGDMDISLPKVEGDLKGPEVDIRDPKVDIDVPDVDVQGPDWHLKMPKVKMPKFSMPGFKGEGPDVDVNLPKADIDVSGPKVDVDVPDVNIEGPDAKLKGPKFKMPEMSIKAPKISMPDIDLNLKGPKVKGDVDVTLPKVEGDLKGPEADIKGPKVDINTPDVDVHGPDWHLKMPKVKMPKFSMPGFKGEGPDVDVSLPKADIDVSGPKVDVDIPDVNIEGPDAKLKGPKFKMPEINIKAPKISIPDVDLDLKGPKVKGDFDVSVPKVEGTLKGPEVDLKGPRLDFEGPDAKLSGPSLKMPSLEISAPKVTAPDVDLHLKAPKIGFSGPKLEGGEVDLKGPKVEAPSLDVHMDSPDINIEGPDVKIPKFKKPKFGFGAKSPKADIKSPSLDVTVPEAELNLETPEISVGGKGKKSKFKMPKIHMSGPKIKAKKQGFDLNVPGGEIDASLKAPDVDVNIAGPDAALKVDVKSPKTKKTMFGKMYFPDVEFDIKSPKFKAEAPLPSPKLEGELQAPDLELSLPAIHVEGLDIKAKAPKVKMPDVDISVPKIEGDLKGPKVQANLGAPDINIEGLDAKVKTPSFGISAPQVSIPDVNVNLKGPKIKGDVPSVGLEGPDVDLQGPEAKIKFPKFSMPKIGIPGVKMEGGGAEVHAQLPSLEGDLRGPDVKLEGPDVSLKGPGVDLPSVNLSMPKVSGPDLDLNLKGPSLKGDLDASVPSMKVHAPGLNLSGVGGKMQVGGDGVKVPGIDATTKLNVGAPDVTLRGPSLQGDLAVSGDIKCPKVSVGAPDLSLEASEGSIKLPKMKLPQFGISTPGSDLHVNAKGPQVSGELKGPGVDVNLKGPRISAPNVDFNLEGPKVKGSLGATGEIKGPTVGGGLPGIGVQGLEGNLQMPGIKSSGCDVNLPGVNVKLPTGQISGPEIKGGLKGSEVGFHGAAPDISVKGPAFNMASPESDFGINLKGPKIKGGADVSGGVSAPDISLGEGHLSVKGSGGEWKGPQVSSALNLDTSKFAGGLHFSGPKVEGGVKGGQIGLQAPGLSVSGPQGHLESGSGKVTFPKMKIPKFTFSGRELVGREMGVDVHFPKAEASIQAGAGDGEWEESEVKLKKSKIKMPKFNFSKPKGKGGVTGSPEASISGSKGDLKSSKASLGSLEGEAEAEASSPKGKFSLFKSKKPRHRSNSFSDEREFSGPSTPTGTLEFEGGEVSLEGGKVKGKHGKLKFGTFGGLGSKSKGHYEVTGSDDETGKLQGSGVSLASKKSRLSSSSSNDSGNKVGIQLPEVELSVSTKKE

SEQ ID NO: 9996 - protein, 602 aa, Homo sapiens
MPSAKQRGSKGGHGAASPSEKGAHPSGGADDVAKKPPPAPQQPPPPPAPHPQQHPQQHPQNQAHGKGGHRGGGGGGGKSSSSSSASAAAAAAAASSSASCSRRLGRALNFLFYLALVAAAAFSGWCVHHVLEEVQQVRRSHQDFSRQREELGQGLQGVEQKVQSLQATFGTFESILRSSQHKQDLTEKAVKQGESEVSRISEVLQKLQNEILKDLSDGIHVVKDARERDFTSLENTVEERLTELTKSINDNIAIFTEVQKRSQKEINDMKAKVASLEESEGNKQDLKALKEAVKEIQTSAKSREWDMEALRSTLQTMESDIYTEVRELVSLKQEQQAFKEAADTERLALQALTEKLLRSEESVSRLPEEIRRLEEELRQLKSDSHGPKEDGGFRHSEAFEALQQKSQGLDSRLQHVEDGVLSMQVASARQTESLESLLSKSQEHEQRLAALQGRLEGLGSSEADQDGLASTVRSLGETQLVLYGDVEELKRSVGELPSTVESLQKVQEQVHTLLSQDQAQAARLPPQDFLDRLSSLDNLKASVSQVEADLKMLRTAVDSLVAYSVKIETNENNLESAKGLLDDLRNDLDRLFVKVEKIHEKV

SEQ ID NO: 9997 - protein, 386 aa, Homo sapiens
MDRFVWTSGLLEINETLVIQQRGVRIYDGEEKIKFDAGTLLLSTHRLIWRDQKNHECCMAILLSQIVFIEEQAAGIGKSAKIVVHLHPAPPNKEPGPFQSSKNSYIKLSFKEHGQIEFYRRLSEEMTQRRWENMPVSQSLQTNRGPQPGRIRAVGIVGIERKLEEKRKETDKNISEAFEDLSKLMIKAKEMVELSKSIANKIKDKQGDITEDETIRFKSYLLSMGIANPVTRETYGSGTQYHMQLAKQLAGILQVPLEERGGIMSLTEVYCLVNRARGMELLSPEDLVNACKMLEALKLPLRLRVFDSGVMVIELQSHKEEEMVASALETVSEKGSLTSEEFAKLVGMSVLLAKERLLLAEKMGHLCRDDSVEGLRFYPNLFMTQS

SEQ ID NO: 9998 - protein, 520 aa, Homo sapiens
MSNKCDVVVVGGGISGMAAAKLLHDSGLNVVVLEARDRVGGRTYTLRNQKVKYVDLGGSYVGPTQNRILRLAKELGLETYKVNEVERLIHHVKGKSYPFRGPFPPVWNPITYLDHNNFWRTMDDMGREIPSDAPWKAPLAEEWDNMTMKELLDKLCWTESAKQLATLFVNLCVTAETHEVSALWFLWYVKQCGGTTRIISTTNGGQERKFVGGSGQVSERIMDLLGDRVKLERPVIYIDQTRENVLVETLNHEMYEAKYVISAIPPTLGMKIHFNPPLPMMRNQMITRVPLGSVIKCIVYYKEPFWRKKDYCGTMIIDGEEAPVAYTLDDTKPEGNYAAIMGFILAHKARKLARLTKEERLKKLCELYAKVLGSLEALEPVHYEEKNWCEEQYSGGCYTTYFPPGILTQYGRVLRQPVDRIYFAGTETATHWSGYMEGAVEAGERAAREILHAMGKIPEDEIWQSEPESVDVPAQPITTTFLERHLPSVPGLLRLIGLTTIFSATALGFLAHKRGLLVRV

SEQ ID NO: 9999 - protein, 575 aa, Homo sapiens
MKPLSLLIEILIILGVTIKTIKAEEHNKRQKERNVTTQVSVNEIKQYLSHILEQRTSSNVINKRENLLEKKKNQRKIRIKGIQNKDILKRNKNHLQKQAEKNFTDEGDQLFKMGIKVLQQSKSQKQKEEAYLLFAKAADMGNLKAMEKMADALLFGNFGVQNITAAIQLYESLAKEGSCKAQNALGFLSSYGIGMEYDQAKALIYYTFGSAGGNMMSQMILGYRYLSGINVLQNCEVALSYYKKVADYIADTFEKSEGVPVEKVRLTERPENLSSNSEILDWDIYQYYKFLAERGDVQIQVSLGQLHLIGRKGLDQDYYKALHYFLKAAKAGSANAMAFIGKMYLEGNAAVPQNNATAFKYFSMAASKGNAIGLHGLGLLYFHGKGVPLNYAEALKYFQKAAEKGWPDAQFQLGFMYYSGSGIWKDYKLAFKYFYLASQSGQPLAIYYLAKMYATGTGVVRSCRTAVEKRLTFLKKRRCIQWRFSYGIELPFKDIHLARRLYDMAAQTSPDAHIPVLFAVMKLETTHLLRDILFFNFTTRWNWLKLDNTIGPHWDLFVIGLIVPGLILLLRNHHG

SEQ ID NO: 10000 - protein, 439 aa, Homo sapiens
MRELPAGLLPPGREVHQCAKCRESFHGSPLGGQQCYRLISVEQECCLDPTSQTNCFHEPKRRALGPGRTVLFGVQPKFTNVDIRLTLDVTFGAVDLYVSTSYDTFVVRVAPDTGVHTVHIQPPPAPPPPPPPADGGPRGAGDPGGAGASSGPGAPAEPRVREVWPRGLITYVTVTEPSAVLVVRGVRDRLVITYPHEHHALKSSRFYLLLLGVGDPSGPGANGSADSQGLLFFRQDQAHIDLFVFFSVFFSCFFLFLSLCVLLWKAKQALDQRQEQRRHLQEMTKMASRPFAKVTVCFPPDPTAPASAWKPAGLPPPAFRRSEPFLAPLLLTGAGGPWGPMGGGCCPPAIPATTAGLRAGPITLEPTEDGMAGVATLLLQLPGGPHAPNGACLGSALVTLRHRLHEYCGGGGGAGGSGHGTGAGRKGLLSQDNLTSMSL

SEQ ID NO: 10001 - protein, 1063 aa, Homo sapiens
MSPGASRGPRGSQAPLIAPLCCAAAALGMLLWSPACQAFNLDVEKLTVYSGPKGSYFGYAVDFHIPDARTASVLVGAPKANTSQPDIVEGGAVYYCPWPAEGSAQCRQIPFDTTNNRKIRVNGTKEPIEFKSNQWFGATVKAHKGKVVACAPLYHWRTLKPTPEKDPVGTCYVAIQNFSAYAEFSPCRNSNADPEGQGYCQAGFSLDFYKNGDLIVGGPGSFYWQGQVITASVADIIANYSFKDILRKLAGEKQTEVAPASYDDSYLGYSVAAGEFTGDSQQELVAGIPRGAQNFGYVSIINSTDMTFIQNFTGEQMASYFGYTVVVSDVNSDGLDDVLVGAPLFMEREFESNPREVGQIYLYLQVSSLLFRDPQILTGTETFGRFGSAMAHLGDLNQDGYNDIAIGVPFAGKDQRGKVLIYNGNKDGLNTKPSQVLQGVWASHAVPSGFGFTLRGDSDIDKNDYPDLIVGAFGTGKVAVYRARPVVTVDAQLLLHPMIINLENKTCQVPDSMTSAACFSLRVCASVTGQSIANTIVLMAEVQLDSLKQKGAIKRTLFLDNHQAHRVFPLVIKRQKSHQCQDFIVYLRDETEFRDKLSPINISLNYSLDESTFKEGLEVKPILNYYRENIVSEQAHILVDCGEDNLCVPDLKLSARPDKHQVIIGDENHLMLIINARNEGEGAYEAELFVMIPEEADYVGIERNNKGFRPLSCEYKMENVTRMVVCDLGNPMVSGTNYSLGLRFAVPRLEKTNMSINFDLQIRSSNKDNPDSNFVSLQINITAVAQVEIRGVSHPPQIVLPIHNWEPEEEPHKEEEVGPLVEHIYELHNIGPSTISDTILEVGWPFSARDEFLLYIFHIQTLGPLQCQPNPNINPQDIKPAASPEDTPELSAFLRNSTIPHLVRKRDVHVVEFHRQSPAKILNCTNIECLQISCAVGRLEGGESAVLKVRSRLWAHTFLQRKNDPYALASLVSFEVKKMPYTDQPAKLPEGSIVIKTSVIWATPNVSFSIPLWVIILAILLGLLVLAILTLALWKCGFFDRARPPQEDMTDREQLTNDKTPEA

SEQ ID NO: 10002 - protein, 71 aa, Homo sapiens
MPAGVPMSTYLKMFAASLLAMCAGAEVVHRYYRPDLTIPEIPPKRGELKTELLGLKERKHKPQVSQQEELK

SEQ ID NO: 10003 - protein, 200 aa, Homo sapiens
MSENLSDPVSPVVRKKKSALFEVSEVIPVMTNNYEENILKGVRDSSYSLESSLELLQKDVVQLHAPRYQSMRRDVIGCTQEMDFILWPRNDIEKIVCLLFSRWKESDEPFRPVQAKFEFHHGDYEKQFLHVLSRKDKTGIVVNNPNQSVFLFIDRQHLQTPKNKATIFKLCSICLYLPQEQLTHWAVGTIEDHLRPYMPE

SEQ ID NO: 10004 - protein, 927 aa, Homo sapiens
MGTQDPGNMGTGVPASEQISCAKEDPQVYCPEETGGTKDVQVTDCKSPEDSRPPKETDCCNPEDSGQLMVSYEGKAMGYQVPPFGWRICLAHEFTEKRKPFQANNVSLSNMIKHIGMGLRYLQWWYRKTHVEKKTPFIDMINSVPLRQIYGCPLGGIGGGTITRGWRGQFCRWQLNPGMYQHRTVIADQFTVCLRREGQTVYQQVLSLERPSVLRSWNWGLCGYFAFYHALYPRAWTVYQLPGQNVTLTCRQITPILPHDYQDSSLPVGVFVWDVENEGDEALDVSIMFSMRNGLGGGDDAPGGLWNEPFCLERSGETVRGLLLHHPTLPNPYTMAVAARVTAATTVTHITAFDPDSTGQQVWQDLLQDGQLDSPTGQSTPTQKGVGIAGAVCVSSKLRPRGQCRLEFSLAWDMPRIMFGAKGQVHYRRYTRFFGQDGDAAPALSHYALCRYAEWEERISAWQSPVLDDRSLPAWYKSALFNELYFLADGGTVWLEVLEDSLPEELGRNMCHLRPTLRDYGRFGYLEGQEYRMYNTYDVHFYASFALIMLWPKLELSLQYDMALATLREDLTRRRYLMSGVMAPVKRRNVIPHDIGDPDDEPWLRVNAYLIHDTADWKDLNLKFVLQVYRDYYLTGDQNFLKDMWPVCLAVMESEMKFDKDHDGLIENGGYADQTYDGWVTTGPSAYCGGLWLAAVAVMVQMAALCGAQDIQDKFSSILSRGQEAYERLLWNGRYYNYDSSSRPQSRSVMSDQCAGQWFLKACGLGEGDTEVFPTQHVVRALQTIFELNVQAFAGGAMGAVNGMQPHGVPDKSSVQSDEVWVGVVYGLAATMIQEGLTWEGFQTAEGCYRTVWERLGLAFQTPEAYCQQRVFRSLAYMRPLSIWAMQLALQQQQHKKASWPKVKQGTGLRTGPMFGPKEAMANLSPE

SEQ ID NO: 10005 - protein, 823 aa, Homo sapiens
MKIQKKLTGCSRLMLLCLSLELLLEAGAGNIHYSVPEETDKGSFVGNIAKDLGLQPQELADGGVRIVSRGRMPLFALNPRSGSLITARRIDREELCAQSMPCLVSFNILVEDKMKLFPVEVEIIDINDNTPQFQLEELEFKMNEITTPGTRVSLPFGQDLDVGMNSLQSYQLSSNPHFSLDVQQGADGPQHPEMVLQSPLDREEEAVHHLILTASDGGEPVRSGTLRIYIQVVDANDNPPAFTQAQYHINVPENVPLGTQLLMVNATDPDEGANGEVTYSFHNVDHRVAQIFRLDSYTGEISNKEPLDFEEYKMYSMEVQAQDGAGLMAKVKVLIKVLDVNDNAPEVTITSVTTAVPENFPPGTIIALISVHDQDSGDNGYTTCFIPGNLPFKLEKLVDNYYRLVTERTLDRELISGYNITITAIDQGTPALSTETHISLLVTDINDNSPVFHQDSYSAYIPENNPRGASIFSVRAHDLDSNENAQITYSLIEDTIQGAPLSAYLSINSDTGVLYALRSFDYEQFRDMQLKVMARDSGDPPLSSNVSLSLFLLDQNDNAPEILYPALPTDGSTGVELAPLSAEPGYLVTKVVAVDRDSGQNAWLSYRLLKASEPGLFSVGLHTGEVRTARALLDRDALKQSLVVAVQDHGQPPLSATVTLTVAVADRISDILADLGSLEPSAKPNDSDLTLYLVVAAAAVSCVFLAFVIVLLAHRLRRWHKSRLLQASGGGLASMPGSHFVGVDGVRAFLQTYSHEVSLTADSRKSHLIFPQPNYADTLISQESCEKKGFLSAPQSLLEDKKEPFSQVNFCDECISYLEKNNS

SEQ ID NO: 10006 - protein, 345 aa, Homo sapiens
MLRPAGLWRLCRRPWAARVPAENLGRREVTSGVSPRGSTSPRTLNIFDRDLKRKQKNWAARQPEPTKFDYLKEEVGSRIADRVYDIPRNFPLALDLGCGRGYIAQYLNKETIGKFFQADIAENALKNSSETEIPTVSVLADEEFLPFKENTFDLVVSSLSLHWVNDLPRALEQIHYILKPDGVFIGAMFGGDTLYELRCSLQLAETEREGGFSPHISPFTAVNDLGHLLGRAGFNTLTVDTDEIQVNYPGMFELMEDLQGMGESNCAWNRKALLHRDTMLAAAAVYREMYRNEDGSVPATYQIYYMIGWKYHESQARPAERGSATVSFGELGKINNLMPPGKKSQ

SEQ ID NO: 10007 - protein, 890 aa, Homo sapiens
MSRSATLLLCLLGCHVWKAVTKTLREPGAGAQEVTLKVHISDASTHQPVADALIEIFTNQASIASGTSGTDGVAFIKFQYKLGSQLIVTASKHAYVPNSAPWKPIRLPVFSSLSLGLLPERSATLMVYEDVVQIVSGFQGARPQPRVHFQRRALRLPENTSYSDLTAFLTAASSPSEVDSFPYLRGLDGNGTGNSTRHDLTPVTAVSVHLLSSNGTPVLVDGPIYVTVPLATQSSLRHNAYVAAWRFDQKLGTWLKSGLGLVHQEGSQLTWTYIAPQLGYWVAAMSPPIPGPVVTQDITTYHTVFLLAILGGMAFILLVLLCLLLYYCRRKCLKPRQHHRKLQLPAGLESSKRDQSTSMSHINLLFSRRASEFPGPLSVTSHGRPEAPGTKELMSGVHLEMMSPGGEGDLHTPMLKLSYSTSQEFSSREELLSCKEEDKSQISFDNLTPSGTLGKDYHKSVEVFPLKARKSMEREGYESSGNDDYRGSYNTVLSQPLFEKQDREGPASTGSKLTIQEHLYPAPSSPEKEQLLDRRPTECMMSRSVDHLERPTSFPRPGQLICCSSVDQVNDSVYRKVLPALVIPAHYMKLPGDHSYVSQPLVVPADQQLEIERLQAELSNPHAGIFPHPSSQIQPQPLSSQAISQQHLQDAGTREWSPQNASMSESLSIPASLNDAALAQMNSEVQLLTEKALMELGGGKPLPHPRAWFVSLDGRSNAHVRHSYIDLQRAGRNGSNDASLDSGVDMNEPKSARKGRGDALSLQQNYPPVQEHQQKEPRAPDSTAYTQLVYLDDVEQSGSECGTTVCTPEDSALRCLLEGSSRRSGGQLPSLQEETTRRTADAPSEPAASPHQRRSAHEEEEDDDDDDQGEDKKSPWQKREERPLMAFNIK

SEQ ID NO: 10008 - protein, 229 aa, Homo sapiens
MGDPNSRKKQALNRLRAQLRKKKESLADQFDFKMYIAFVFKEKKKKSALFEVSEVIPVMTNNYEENILKGVRDSSYSLESSLELLQKDVVQLHAPRYQSMRRDVIGCTQEMDFILWPRNDIEKIVCLLFSRWKESDEPFRPVQAKFEFHHGDYEKQFLHVLSRKDKTGIVVNNPNQSVFLFIDRQHLQTPKNKATIFKLCSICLYLPQEQLTHWAVGTIEDHLRPYMPE

SEQ ID NO: 10009 - protein, 842 aa, Homo sapiens
MLYSSRGDPEGQPLLLSLLILAMWVVGSGQLHYSVPEEAEHGTFVGRIAQDLGLELAELVPRLFQLDSKGRGDLLEVNLQNGILFVNSRIDREELCGRSAECSIHLEVIVDRPLQVFHVDVEVKDINDNPPVFPATQKNLFIAESRPLDSRFPLEGASDADIGENALLTYRLSPNEYFFLDVPTSNQQVKPLGLVLRKLLDREETPELHLLLTATDGGKPELTGTVQLLITVLDNNDNAPVFDRTLYTVKLPENVSIGTLVIHPNASDLDEGLNGDIIYSFSSDVSPDIKSKFHMDPLSGAITVIGHMDFEESRAHKIPVEAVDKGFPPLAGHCTLLVEVVDVNDNAPQLTIKTLSVPVKEDAQLGTVIALISVIDLDADANGQVTCSLTPHVPFKLVSTYKNYYSLVLDRALDRESVSAYELVVTARDGGSPSLWATARVSVEVADVNDNAPAFAQSEYTVFVKENNPPGCHIFTVSARDADAQENALVSYSLVERRLGERSLSSYVSVHAESGKVYALQPLDHEELELLQFQVSARDAGVPPLGSNVTLQVFVLDENDNAPALLTPRMRGTDGAVSEMVLRSVGAGVVVGKVRAVDADSGYNAWLSYELQPETASASIPFRVGLYTGEISTTRALDETDAPRQRLLVLVKDHGEPALTATATVLVSLVESGQAPKSSSRASVGATGPEVTLVDVNVYLIIAICAVSSLLVLTLLLYTVLRCSAMPTEGECAPGKPTLVCSSAVGSWSYSQQRRQRVCSGEGKQKTDLMAFSPGLSPCAGSTERTGEPSASSDSTGKVGFSSILFIYIIFFLERYYRLLPGAVQIVLFIFLEIQQIFFLIK

SEQ ID NO: 10010 - protein, 814 aa, Homo sapiens
MDYHWRGELGSWRLLLLLLLLAAWKVGSGQLHYSVPEEAKHGTFVGRIAQDLGLELAELVPRLFRVASKRHRDLLEVSLQNGILFVNSRIDREELCGRSAECSIHLEVIVDRPLQVFHVDVEVKDVNDNPPVFRVKDQKLFVSESRMPDSRFPLEGASDADVGANSVLTYRLSSHDYFMLDVNSKNDENKLVELVLRKSLDREDAPAHHLFLTATDGGKPELTGTVQLLVTVLDVNDNAPTFEQSEYEVRIFENADNGTTVIKLNASDPDEGANGAISYSFNSLVETMVIDHFSIDRNTGEIVIRGNLDFEQENLYKILIDATDKGHPPMAGHCTVLVRILDKNDNVPEIALTSLSLPVREDAQFGTVIALISVNDLDSGANGQVTCSLMPHVPFKLVSTFKNYYSLVLDSALDRERVSAYELVVTARDGGSPSLWATASLSVEVADVNDNAPAFAQPEYTVFVKENNPPGCHIFTVSARDADAQENALVSYSLVERRVGERSLSSYISVHTESGKVYALQPLDHEELELLQFQVSARDAGVPPLGSNVTLQVFVLDENDNAPALLEPRVGGTGGAASKLVPRSVGAGHVVAKVRAVDADSGYNAWLSYELQPAASSPRIPFRVGLYTGEISTTRVLDEADSPRHRLLVLVKDHGEPALTATATVLVSLVESGQAPKASSRQSAGVLGPEAALVDVNVYLIIAICAVSSLLVLTLLLYTALRCSALPTEGGCRAGKPTLVCSSAVGSWSYSQQQPQRVCSGEGPPKTDLMAFSPCLPPDLGSVDVGEEQDLNVDHGLKVSPFKFRTHKFYLWKL

SEQ ID NO: 10011 - protein, 776 aa, Homo sapiens
VVYSRVGQESRRLLLLLLLLAAWEAGNGQLHYSVSEEAKHGTFVGRIAQDLGLELAELVPRLFRVASKGRGGLLEVNLQNGILFVNSRIDREELCRRSAECSIHLEVIVDRPLQVFHVDVEVRDINDNPPVFPATQKNLSIAESRPLDSRFPLEGASDADIGENALLTYRLSPNEYFSLEKPPDDELVKGLGLILRKSLDREEAPEIFLVLTATDGGKPELTGTVQLLITVLDANDNAPAFDRTIYKVRLLENVPNGTLVIKLNASDLDEGLNGDIVYSFSNDISPNVKSKFHIDPITGQIIVKGYIDFEESKSYEIIVEGIDKGQLPLSGHCRVIVEVEDNNDNVPDLEFKSLSLPIREDAPLGTVIALISVSDKDMGVNGLVTCSLTSHVPFKLVSTFKNYYSLVLDSALDRESVSAYELVVTARDGGSPSLWATASVSVEVADVNDNAPAFAQPEYTVFVKENNPPGCHIFTVSAWDADAQENALVSYSLVERRVGERALSSYVSVHAESGKVYALQPLDHEELELLQFQVTARDAGVPPLGSNVTLQVFVLDENDNAPALLAPRAGGTGGAVSELVPWSVGVGHVVAKVRAVDADSGYNAWLSYELQPGTGGARIPFRVGLYTGEISTTRALDETDAPRHRLLVLVKDHGEPALTATATVLVSLVESGQAPKASSRALVGAVGPDAALVDVNVYLIIAICAVSSLLVLTLLLYTALRCSALPTEGACAPGKPTLVCSSAVGSWSYSQQRRPRVCSGEGPPKTDLMAFSPSLP

SEQ ID NO: 10012 - protein, 803 aa, Homo sapiens
MVFTPEDRLGKQCLLLPLLLLAAWKVGSGQLHYSVPEEAKHGTFVGRIAQDLGLELAELVPRLFRMASKDREDLLEVNLQNGILFVNSRIDREELCGRSAECSIHLEVIVDRPLQVFHVDVEVRDINDNPPLFPVEEQRVLIYESRLPDSVFPLEGASDADVGSNSILTYKLSSSEYFGLDVKINSDDNKQIGLLLKKSLDREEAPAHNLFLTATDGGKPELTGTVQLLVTVLDVNDNAPTFEQSEYEVRIFENADNGTTVIRLNASDRDEGANGAISYSFNSLVAAMVIDHFSIDRNTGEIVIRGNLDFEQENLYKILIDATDKGHPPMAGHCTVLVRILDKNDNVPEIALTSLSLPVREDAQFGTVIALISVNDLDSGANGQVNCSLTPHVPFKLVSTFKNYYSLVLDSALDRESVSAYELVVTARDGGSPSLWATASLSVEVADMNDNAPAFAQPEYTVFVKENNPPGCHIFTVSARDADAQENALVSYSLVERRVGERALSSYISVHAESGKVYALQPLDHEELELLQFQVSARDAGVPPLGSNVTLQVFVLDENDNAPALLAPRVGGTGGAVSELVPRSLGAGQVVAKVRAVDADSGYNAWLSYELQPPASSARFPFRVGLYTGEISTTRVLDEADSPRHRLLVLVKDHGEPALTATATVLVSLVESGQAPKASSRASVGAAGPEAALVDVNVYLIIAICAVSSLLVLTLLLYTALRCSAPPTEGACTADKPTLVCSSAVGSWSYSQQRRQRVCSGEGPPKMDLMAFSPSLSPCPIMMGKAENQDLNEDHDAKVSEFS

SEQ ID NO: 10013 - protein, 824 aa, Homo sapiens
MASSIRRGRGAWTRLLSLLLLAAWEVGSGQLRYSVPEEAKHGTFVGRIAQDLGLELEELVPRLFRVASKRHGDLLEVNLQNGILFVNSRIDREELCGRSAECSIHVEVIVDRPLQVFHVEVEVKDINDNPPIFPMTVKTIRFPESRLLDSRFPLEGASDADIGVNALLSYKLSSSEFFFLDIQANDELSESLSLVLGKSLDREETAEVNLLLVATDGGKPELTGTVQILIKVLDVNDNEPTFAQSVYKVKLLENTANGTLVVKLNASDADEGPNSEIVYSLGSDVSSTIQTKFTIDPISGEIRTKGKLDYEEAKSYEIQVTATDKGTPSMSGHCKISLKLVDINDNTPEVSITSLSLPISENASLGTVIALITVSDRDSGTNGHVTCSLTPHVPFKLVSTFKNYYSLVLDSALDRESVSAYELVVTARDGGSPSLWATTSVSIEVADVNDNAPAFAQPEYTVFVKENNPPGCHIFTVSAWDADAQENALVSYSLVERRVGERALSSYVSVHAESGKVYALQPLDHEEVELLQFQVSARDAGVPPLGSNVTLQVFVLDENDNAPALLAPRAGTAAGAVSELVPWSVGAGHVVAKVRAVDADSGYNAWLSYELQLGTGSARIPFRVGLYTGEISTTRALDEADSPRHRLLVLVKDHGEPALTATATVLVSLVESGQAPKASSRAWVGAAGSEATLVDVNVYLIIAICAVSSLLVLTVLLYTALRCSVPPTEGARAPGKPTLVCSSAVGSWSYSQQRRQRVCSGEDPPKTDLMAFSPSLSQGPDSAEEKQLSESEYVGKVSLLLFLANSKIVLFKKFYMISTSYLDS

SEQ ID NO: 10014 - protein, 807 aa, Homo sapiens
MVFSRRGGLGARDLLLWLLLLAAWEVGSGQLHYSIPEEAKHGTFVGRVAQDLGLELAELVPRLFRVASKTHRDLLEVNLQNGILFVNSRIDREELCQWSAECSIHLELIADRPLQVFHVEVKVKDINDNPPVFRGREQIIFIPESRLLNSRFPIEGAADADIGANALLTYTLSPSDYFSLDVEASDELSKSLWLELRKYLDREETPELHLLLTATDGGKPELQGTVELLITVLDVNDNAPLFDQAVYRVHLLETTANGTLVTTLNASDADEGVNGEVVFSFDSGISRDIQEKFKVDSSSGEIRLIDKLDYEETKSYEIQVKAVDKGSPPMSNHCKVLVKVLDVNDNAPELAVTSLYLPIREDAPLSTVIALITVSDRDSGANGQVTCSLMPHVPFKLVSTFKNYYSLVLDSALDRESLSVYELVVTARDGGSPSLWATARVSVEVADVNDNAPAFAQPEYTVFVKENNPPGCHIFTVSARDADAQENALVSYSLVERRVGERALSNYVSVHAESGKVYALQPLDHEELELLQFQVSARDAGVPPLGSNVTLQVFVLDENDNAPALLAPRVGGTIGAVSELVPRLVGAGHVVAKVRAVDADSGYNAWLSYELQPAAGGARIPFRVGLYTGEISTTRVLDEADLSRYRLLVLVKDHGEPALTATATVLVSLVESGQAPKASSRASVGVAGPEAALVDVNVYLIIAICAVSSLLVLTLLLYTALRCSVPPTEGAYVPGKPTLVCSSALGSWSNSQQRRQRVCSSEGPPKTDLMAFSPGLSPSLNTSERNEQPEANLDLSGNVSPTFEFWL

SEQ ID NO: 10015 - protein, 388 aa, Homo sapiens
MKWLLLLGLVALSECIMYKVPLIRKKSLRRTLSERGLLKDFLKKHNLNPARKYFPQWEAPTLVDEQPLENYLDMEYFGTIGIGTPAQDFTVVFDTGSSNLWVPSVYCSSLACTNHNRFNPEDSSTYQSTSETVSITYGTGSMTGILGYDTVQVGGISDTNQIFGLSETEPGSFLYYAPFDGILGLAYPSISSSGATPVFDNIWNQGLVSQDLFSVYLSADDQSGSVVIFGGIDSSYYTGSLNWVPVTVEGYWQITVDSITMNGEAIACAEGCQAIVDTGTSLLTGPTSPIANIQSDIGASENSDGDMVVSCSAISSLPDIVFTINGVQYPVPPSAYILQSEGSCISGFQGMNLPTESGELWILGDVFIRQYFTVFDRANNQVGLAPVA
